(19) United States
(12) Patent Application Publication
(10) Pub. No.: US 2024/0271122 A1
(43) Pub. Date: Aug. 15, 2024

(54) METHODS FOR CODON OPTIMIZATION AND USES THEREOF

(71) Applicant: Opentrons Labworks Inc., Brooklyn, NY (US)

(72) Inventors: Joel S. BADER, Bronx, NY (US); Leslie MITCHELL, New York, NY (US)

(21) Appl. No.: 18/286,611

(22) PCT Filed: Apr. 14, 2022
(86) PCT No.: PCT/US2022/024888

§ 371 Date: Oct. 12, 2023

Related U.S. Application Data
(60) Provisional application No. 63/174,823, filed on Apr. 14, 2021.

(51) Int. Cl. C12N 15/10

(52) U.S. Cl. CPC C12N 15/1058; C12N 15/1082; C12N 15/1089

(57) ABSTRACT

Provided herein are methods and systems for codon rewriting and replacement. In some aspects, provided herein, is a method comprising: analyzing at least a portion of a genome of an organism to identify a first plurality of codons based on at least in part on a first local context of a codon-of-interest in the genome of the organism to be rewritten; and rewriting the first plurality of codons in the genome of the organism to a second codon. Also provided herein are methods and systems for producing a synthetic genome.

### CROSS REFERENCE

[0001] This application claims the benefit of U.S. Provisional Application No. 63/174,823, filed on Apr. 14, 2021, which is incorporated herein by reference in its entirety.

### SEQUENCE LISTING

[0002] This instant application contains a Sequence Listing which has been submitted electronically in ASCII format and is hereby incorporated by reference in its entirety. Said ASCII copy, created on Apr. 14, 2022, is named 59725703601_SL.txt and is 23,977,365 bytes in size.

### BACKGROUND

[0003] Codon rewriting and repurposing translational machinery may be important tools to expand the genetic code artificially and ultimately to custom-design a synthetic genome.

[0004] These may also be important tools to enable incorporation of non-canonical amino acids (ncAAs) into proteins. However, approaches for determining codon replacement remain limited, and there is a need for improved approaches for selecting a codon/s for rewriting and replacement.

### SUMMARY

[0005] In some aspects, provided herein, is a method comprising: a) analyzing at least a portion of a genome of an organism to identify a first plurality of codons based on at least in part on a first local context of a codon-of-interest in the genome of the organism to be rewritten; b) rewriting the first plurality of codons in the genome of the organism to a second codon, wherein the first plurality of codons and the second codon encode a first amino acid, and wherein the rewriting of the first plurality of codons modulates an occurrence of the first plurality of codons; and c) synthesizing a nucleic acid construct comprising the portion of the genome, wherein the first plurality of codons is rewritten to the second codon.

[0006] Another aspect of the present disclosure provides a method of producing a polypeptide comprising a non-canonical amino acid (ncAA) or a population of polypeptide molecules comprising the ncAA in an organism, the method comprising: rewriting a first codon encoding a first amino acid to a second codon encoding the first amino acid in a genome of the organism, wherein the rewriting comprises identifying the first codon based at least in part on a first local context of a codon-of-interest in the genome of the organism; reassigning the first codon to encode the ncAA in the genome of the organism; and introducing into the organism an aminoacyl-tRNA synthetase (aaRS)/tRNA pair engineered to recognize the first codon and incorporate the ncAA into an amino acid sequence of the polypeptide or the population of the polypeptide molecules.

[0007] Another aspect of the present disclosure provides a method of producing a peptide, the method comprising editing a genome of an organism, wherein the editing comprises revising a codon of the genome to encode a non-canonical amino acid, wherein the peptide comprises the non-canonical amino acid.

[0008] Another aspect of the present disclosure provides a cell or a population of cells comprising a genome, wherein a first plurality of codons in the genome of the organism is rewritten to a second codon, wherein the first plurality of codons and the second codon encode a first amino acid, and wherein an occurrence of the first plurality of codons is modulated responsive to being rewritten to the second codon. Another aspect of the present disclosure provides an organism comprising the cell or the population of cells described herein.

[0009] Another aspect of the present disclosure provides a computer system for editing a genome of an organism, comprising: a database that is configured to store at least a portion of the genome of the organism; and one or more computer processors operatively coupled to said database, wherein said one or more computer processors are individually or collectively programmed to: a) analyze the at least the portion of the genome of the organism to identify a first plurality of codons in the genome of the organism to be rewritten; and b) rewrite the first plurality of codons in the genome of the organism to a second codon, wherein the first plurality of codons and the second codon encode a first amino acid, and wherein the rewriting of the first plurality of codons modulates an occurrence of the first plurality of codons, thereby editing the genome of the organism.

[0010] Another aspect of the present disclosure provides a non-transitory computer-readable storage medium comprising machine-executable code that, upon execution by one or more computer processors, implements a method for editing a genome of an organism, the method comprising: a) analyzing at least a portion of the genome of the organism to identify a first plurality of codons in the genome of the organism to be rewritten; and b) rewriting the first plurality of codons in the genome of the organism to a second codon, wherein the first plurality of codons and the second codon encode a first amino acid, and wherein the rewriting of the first plurality of codons modulates an occurrence of the first plurality of codons, thereby editing the genome of the organism.

[0011] Additional aspects and advantages of the present disclosure will become readily apparent to those skilled in this art from the following detailed description, wherein only illustrative embodiments of the present disclosure are shown and described. As will be realized, the present disclosure is capable of other and different embodiments, and its several details are capable of modifications in various obvious respects, all without departing from the disclosure. Accordingly, the drawings and description are to be regarded as illustrative in nature, and not as restrictive.

### INCORPORATION BY REFERENCE

[0012] Each patent, publication, and non-patent literature cited in the application is hereby incorporated by reference in its entirety as if each was incorporated by reference individually. To the extent publications and patents or patent applications incorporated by reference contradict the disclosure contained in the specification, the specification is intended to supersede and/or take precedence over any such contradictory material.

### BRIEF DESCRIPTION OF THE DRAWINGS

[0013] The features of the present disclosure are set forth with particularity in the appended claims. A better understanding of the features and advantages of the present disclosure will be obtained by reference to the following detailed description that sets forth illustrative embodiments, in which the principles of the disclosure are utilized, and the accompanying drawings (also “Figure” and “FIG.” herein), of which:

[0014] FIG. 1 depicts deviations from overall relative synonymous codon usage for codons in specific contexts. The context is determined as the codons on either side of a central codon. Given the amino acid of the central codon, the codon usage for the central codon is compared to the overall relative synonymous codon usage (RSCU) and a p-value is determined. Labels indicate central codons with significant deviations from the null, and the dashed line represents the significance threshold corrected for the number of tests.

[0015] FIG. 2 illustrates genome features that may be impacted by genome writing.

[0016] FIG. 3 illustrates exemplary genome features that may be impacted by genome writing. As seen in FIG. 3, lncRNA refers to long non-coding RNA.

[0017] FIG. 4 is an exemplary schematic for optimizing recoding one or more codons in a synthetic strain. As seen in FIG. 4, aaRS refers to a aminoacyl-tRNA synthetase, and ncAA refers to a non-canonical amino acid.

[0018] FIGS. 5A-5C show an exemplary quantitative report platform to evaluate non-canonical amino acid (ncAA) incorporation (FIG. 5A), including a dual reporter system for surface display (FIG. 5B) and for intracellular fluorescence (FIG. 5C).

[0019] FIG. 6 depicts an exemplary codon replacement design for leucine (Leu). See Example 1 for details. Anticodon TAG recognizes CTG, and a 3-gene family must be deleted to rewrite CTG. tRNA tL(GAG) is a single-copy gene and cells with deletion of this gene are viable. tL(UAG) is known to recognize all 6 Leu codons. Fitness of cells with tL(UAG)J/L1/L2 deletion likely requires supplementation with additional copies of tL(GAG). In some example embodiments, Candida and other yeasts where CTG encodes Ser may have tL(AAG) genes. Adenine (A) can be modified to inosine (I) and I recognizes uridine (U)/cytosine (C)/adenine(A) but not guanine (G) in the 3rd position. RSCU refers to Relative Synonymous Codon Usage; KO refers to knock out; an exemplary codon block for removal comprises CAG and TAG; in some example embodiments, codons that may be better to retain comprise AAG and GAG.

[0020] FIG. 7 depicts an exemplary codon replacement design for serine (Ser). See Example 1 for details. tS(CGA)C/SUP61 is a single-copy essential tRNA that recognizes TCG. By normal rules, tS(UGA) should recognize UCG by wobble. For robustness, 3 copies of tS(UGA) may need to be deleted in addition to single-copy tS(CGA). Recognition of AGT/AGC is standard, 4-copy tS(GCU) family, single deletions have slow growth. Ser TCG/TCA rewrite: 78K codons, 4 tRNAs (one single gene, one triple gene). Ser AGT/AGC rewrite: 70K codons, 4 tRNAs. RSCU refers to Relative Synonymous Codon Usage; KO refers to knock out; in some example embodiments, a codon block for removal comprises CGA and TGA; in some example embodiments, an alternative codon block for removal comprises ACT and GCT.

[0021] FIG. 8 depicts an exemplary codon replacement design for arginine (Arg). See Example 1 for details. In some example embodiments, a yeast mitochondrial genome is devoid of rare codons comprising CGG, CGA codons (vs. E. coli where the 2-codon box is rare). TRR4/tR(CCG) is a single-copy essential tRNA. According to the standard rules, TRR4 should have no wobble. CGA is likely recognized by tR(ACG), a 6-gene family which may recognize CGU/C/A through wobble, not CGG. CGA is low copy. Cross-talk risk can be reduced by rewriting CGG and CGA. Arg CGG/CGA rewrite: 14K codons, 1 tRNA. RSCU refers to Relative Synonymous Codon Usage; KO refers to knock out; in some example embodiments, a codon block for removal comprises CCG and TCG in some example embodiments, codons that may be better to retain comprise CCT and TCT.

[0022] FIG. 9 depicts an exemplary codon replacement using Goldilocks method.

[0023] FIG. 10 depicts an illustrative example for constructing a yeast strain with in silico designed synthetic genome.

[0024] FIG. 11 depicts an example of how a codon is selected for replacement and reassignment.

[0025] FIG. 12 is a table depicting pilot regions to select in yeast genome for best derisk design based on number of essential genes, number of codons to rewrite in essential genes, and/or additional genes and codons. Some of these regions may be extended to capture additional essential genes.

[0026] FIG. 13 is a table depicting a yeast codon usage.

[0027] FIG. 14 depicts a computer system comprising a program configured to implement methods provided herein. In some cases, the program comprises an algorithm. The computer system may be a machine learning-based computer system that determines codon frequency.

[0028] In some cases, the computer system comprises a computer processing unit and a sequence processing unit, wherein the computer processing unit and the sequence processing unit are bilaterally communicatively coupled. In some embodiments, the sequence processing unit and the computer processing unit comprise a storage component. 1410: Computer system. 1420: Central processing unit of computer system. 1430: Data storage with files containing the translation tables representing the genetic code of the organism whose genome is being rewritten. 1440: Instructions describing which translation table to use, the codons to be eliminated, and the locations of input and output files. 1450: Computer program implementing the methods to perform the codon rewriting. 1460: Input file, possibly on the same computer system or accessible from a different computer system, providing the sequence of protein-coding regions in the original genome. 1470, 1460: Output file, possibly on the same computer system or writeable on a different computer system, with the gene sequences rewritten to eliminate specified codons, and possible additional files with diagnostics, statistical analyses providing context-specific codon usage, and other reports. 1480: The computer system may also be attached to cloud resources for data import and export.

### DETAILED DESCRIPTION

[0029] Provided herein are methods for designing a genome of an organism by rewriting one or more codons. In some aspects, methods described herein may comprise replacing one or more codons with another codon encoding the same amino acid. In some aspects, the one or more codons being replaced may be used to encode another amino acid, for example, a non-canonical amino acid (ncAA). Provided herein are methods for reducing or minimizing an occurrence of one or more synonymous codons used to encode an amino acid. Also provided herein are methods for efficient translation of a protein or a portion thereof with one or more ncAAs. The present specification also describes how to identify one or more codons for rewriting and/or replacement.

### Definitions

[0030] As used in this specification and the appended claims, the singular forms “a,” “an,” and “the” include plural referents unless the content clearly dictates otherwise. It should also be noted that the term “or” is generally employed in its sense including “and/or” unless the content clearly dictates otherwise. The terms “and/or” and “any combination thereof” and their grammatical equivalents as used herein, can be used interchangeably. These terms can convey that any combination is specifically contemplated. Solely for illustrative purposes, the following phrases “A, B, and/or C” or “A, B, C, or any combination thereof” can mean “A individually; B individually; C individually; A and B; B and C; A and C; and A, B, and Cₙ” The term “or” can be used conjunctively or disjunctively, unless the context specifically refers to a disjunctive use.

[0031] The term “about” or “approximately” can mean within an acceptable error range for the particular value, which may depend in part on how the value is measured or determined, e.g., the limitations of the measurement system. For example, “about” can mean within 1 or more than 1 standard deviation. Alternatively, “about” can mean a range of up to 20%, up to 10%, up to 5%, or up to 1% of a given value. Alternatively, particularly with respect to biological systems or processes, the term can mean within an order of magnitude, within 5-fold, or within 2-fold, of a value. Where particular values are described in the application and claims, unless otherwise stated the term “about” meaning within an acceptable error range for the particular value should be assumed.

[0032] Throughout this disclosure, numerical features are presented in a range format. It should be understood that the description in range format is merely for convenience and brevity and should not be construed as an inflexible limitation on the scope of any embodiments. Accordingly, the description of a range should be considered to have specifically disclosed all the possible subranges as well as individual numerical values within that range to the tenth of the unit of the lower limit unless the context clearly dictates otherwise. For example, description of a range such as from 1 to 6 should be considered to have specifically disclosed subranges such as from 1 to 3, from 1 to 4, from 1 to 5, from 2 to 4, from 2 to 6, from 3 to 6 etc., as well as individual values within that range, for example, 1.1, 2, 2.3, 5, and 5.9. This applies regardless of the breadth of the range. The upper and lower limits of these intervening ranges may independently be included in the smaller ranges, and are also encompassed within the present disclosure, subject to any specifically excluded limit in the stated range. Where the stated range includes one or both of the limits, ranges excluding either or both of those included limits are also included in the present disclosure, unless the context clearly dictates otherwise.

[0033] As used in this specification and claim(s), the words “comprising” (and any form of comprising, such as “comprise” and “comprises”), “having” (and any form of having, such as “have” and “has”), “including” (and any form of including, such as “includes” and “include”) or “containing” (and any form of containing, such as “contains” and “contain”) are inclusive or open-ended and do not exclude additional, unrecited elements or method steps. It is contemplated that any embodiment discussed in this specification can be implemented with respect to any method or composition of the present disclosure, and vice versa. Furthermore, compositions of the present disclosure can be used to achieve methods of the present disclosure.

[0034] Reference in the specification to “some embodiments,” “an embodiment,” “one embodiment” or “other embodiments” means that a particular feature, structure, or characteristic described in connection with the embodiments is included in at least some embodiments, but not necessarily all embodiments, of the present disclosures. To facilitate an understanding of the present disclosure, a number of terms and phrases are defined below.

[0035] Certain specific details of this description are set forth in order to provide a thorough understanding of various embodiments. However, one skilled in the art will understand that the present disclosure may be practiced without these details. In other instances, well-known techniques or methods have not been shown or described in detail to avoid unnecessarily obscuring descriptions of the embodiments. Unless the context requires otherwise, throughout the specification and claims which follow, the word “comprise” and variations thereof, such as, “comprises” and “comprising” are to be construed in an open, inclusive sense, that is, as “including, but not limited to.” Further, headings provided herein are for convenience only and do not interpret the scope or meaning of the claimed disclosure.

[0036] The nomenclature used to describe polypeptides or proteins follows the conventional practice wherein the amino group is presented to the left (the amino- or N-terminus) and the carboxyl group to the right (the carboxy- or C-terminus) of each amino acid residue. When amino acid residue positions are referred to in a polypeptide or a protein, they are numbered in an amino to carboxyl direction with position one being the residue located at the amino terminal end of the polypeptide or the protein of which it can be a part. The amino acid sequences of peptides set forth herein are generally designated using the standard single letter or three letter symbol. (A or Ala for Alanine; C or Cys for Cysteine; D or Asp for Aspartic Acid; E or Glu for Glutamic Acid; F or Phe for Phenylalanine; G or Gly for Glycine; H or His for Histidine; I or Ile for Isoleucine; K or Lys for Lysine; L or Leu for Leucine; M or Met for Methionine; N or Asn for Asparagine; P or Pro for Proline; Q or Gln for Glutamine; R or Arg for Arginine; S or Ser for Serine; T or Thr for Threonine; V or Val for Valine; W or Trp for Tryptophan; and Y or Tyr for Tyrosine).

[0037] The term “non-canonical amino acid” or “ncAA” refers to any amino acid other than the 20 standard amino acids (alanine, arginine, asparagine, aspartic acid, cysteine, glutamic acid, glutamine, glycine, histidine, isoleucine, leucine, lysine, methionine, phenylalanine, proline, serine, threonine, tryptophan, tyrosine, and valine). There are over 700 known ncAA any of which may be used in the methods described herein. In some embodiments, examples of ncAA include, but are not limited to, L-Tryptazan, 5-Fluoro-L-tryptophan, L-Ethionine, L-Selenomethionine, Trifluoro-L-methionine, L-Norleucine, L-Homopropargylglycine, (2S)-2-amino-5-(methylsulfanyl) pentanoic acid, (2S)-2-amino-6-(methylsulfanyl) hexanoic acid, Para-fluoro-L-phenylalanine, Para-iodo-L-phenylalanine, Para-azido-L-phenylalanine, Para-acetyl-L-phenylalanine, Para-benzoyl-L-phenylalanine, Meta-fluoro-L-tyrosine, O-methyl-L-tyrosine, Para-propargyloxy-L-phenylalanine, (2S)-2-aminooctanoic acid, (2S)-2-aminononanoic acid, (2S)-2-aminodecanoic acid, (2S)-2-aminohept-6-enoic acid, (2S)-2-aminooct-7-enoic acid, L-Homocysteine, (2S)-2-amino-5-sulfanylpentanoic acid, (2S)-2-amino-6-sulfanylhexanoic acid, L-S-(2-nitrobenzyl) cysteine, L-S-ferrocenyl-cysteine, L-O-crotylserine, L-O-(pent-4-en-1-yl)serine, L-O-(4,5-dimethoxy-2-nitrobenzyl)serine, (2S)-2-amino-3-({[5-(dimethylamino)naphthaleₙ₋1-yl]sulfonyl}amino)propanoic acid, (2S)-3-[(6-acetyl-naphthaleₙ₋1-yl)amino]-2-aminopropanoic acid, L-Pyrrolysine, N⁶-[(propargyloxy)carbonyl]-L-lysine, L-N⁶-acetyllysine, N⁶-trifluoroacetyl-L-lysine, N⁶—{[1-(6-nitro-1,3-benzodioxol-5-yl)ethoxy]carbonyl}-L-lysine, N⁶—{[2-(3-methyl-3H-diaziren-3-yl)ethoxy]carbonyl}-L-lysine, p-azidophenylalanine, and 2-aminoisobutyric acid. In some embodiments, examples of ncAA include, but are not limited to, AbK (unnatural amino acid for Photo-crosslinking probe), 3-Aminotyrosine (unnatural amino acid for inducing red shift in fluorescent proteins and fluorescent protein-based biosensors), L-Azidohomoalanine hydrochloride (unnatural amino acid for bio-orthogonal labeling of newly synthesized proteins), L-Azidonorleucine hydrochloride (unnatural amino acid for bio-orthogonal or fluorescent labeling of newly synthesized proteins), BzF (photoreactive unnatural amino acid; photo-crosslinker), DMNB-caged-Serine (caged serine; excited by visible blue light), HADA (blue fluorescent D-amino acid for labeling peptidoglycans in live bacteria), NADA-green (fluorescent D-amino acid for labeling peptidoglycans in live bacteria), NB-caged Tyrosine hydrochloride (ortho-nitrobenzyl caged L-tyrosine), RADA (orange-red TAMRA-based fluorescent D-amino acid for labeling peptidoglycans in live bacteria), Rf470DL (blue rotor-fluorogenic fluorescent D-amino acid for labeling peptidoglycans in live bacteria), sBADA (green fluorescent D-amino acid for labeling peptidoglycans in bacteria), and YADA (green-yellow lucifer yellow-based fluorescent D-amino acid for labeling peptidoglycans in live bacteria). In some embodiments, examples of ncAA include, but are not limited to, β-alanine, D-alanine, 4-hydroxyproline, desmosine, D-glutamic acid, γ-aminobutyric acid, β-cyanoalanine, norvaline, 4-(E)-butenyl-4(R)-methyl-N-methyl-L-threonine, N-methyl-L-leucine, selenocysteine, and statine. In some embodiments, a ncAA comprises p-azidophenylalanine or 2-aminoisobutyric acid (also known as α-aminoisobutyric acid, AIB, α-methylalanine, or 2-methylalanine).

[0038] The terms “codon” and “anticodon” as used herein may refer to DNA or RNA. In some embodiments, DNA comprises nucleotide bases adenine (A), guanine (G), cytosine (C), or thymine (T). In some embodiments, RNA comprises nucleotide bases adenine (A), guanine (G), cytosine (C), or uracil (U). In some embodiments, DNA or RNA may comprise inosine (I). in some embodiments, inosine (I) may pair with adenine (A), cytosine (C), or uracil (U). In some embodiments, DNA or RNA may comprise queuosine (Q). In some embodiments, queuosine (Q) may pair with cytosine (C) or uracil (U).

[0039] Although methods and materials similar or equivalent to those described herein can be used in the practice or testing of the present disclosure, suitable methods, and materials are described below.

### Design Derisking for Genome Editing Design

### RNA Notation

[0040] In some aspects, provided herein are methods for selecting a codon for rewriting or replacement. In some embodiments, a codon may be selected based on an analysis of the genetic code. In some embodiments, the analysis may depend on messenger RNA (mRNA) codon recognition by a tRNA anticodon. In some embodiments, ribonucleotides (e.g., A, C, G, U, or I) may be used. In some embodiments, deoxyribonucleotides (e.g., A, C, G, or T) may be used.

### Wobble Minimization

[0041] In some aspects, a codon may be selected for replacement to minimize wobble. In some embodiments, more than one codon ending in different nucleotides can encode the same amino acid. For example, this may happen because a single transfer RNA (tRNA) anticodon can recognize multiple mRNA codons through wobble. The third nucleotide position of a codon is the wobble position, corresponding to the first nucleotide position of a corresponding anticodon.

[0042] For example, the wobble rule may be that an anticodon starting with the nucleotide C (e.g., CXX from 5′ to 3′ direction of an anticodon, wherein X can be any nucleotide) can only recognize the nucleotide G in the third nucleotide position of a corresponding codon (e.g., XXG from 5′ to 3′ direction of a codon, wherein X can be any nucleotide). In some embodiments, an anticodon starting with the nucleotide C may only recognize G in the third nucleotide position of a codon. Thus, in some embodiments, ATG codon may only encode methionine (Met). In some embodiments, UGG codon may only encode tryptophan (Trp). In some embodiments, CUA anticodon may suppress the amber stop codon UAG. In some embodiments, CUA anticodon may not suppress the ochre stop codon UAA.

[0043] In some embodiments, an anticodon may start with nucleotide G and G may be converted to queuosine (Q) that can recognize nucleotide C or U in a codon. In some embodiments, an anticodon may start with nucleotide A, and A may be converted to I (inosine) that can recognize nucleotide A, C, or U in a codon. In some embodiments, an anticodon may start with U and may be modified to recognize nucleotide A or G, or in some cases C or U. Thus, in an embodiment, a codon starting with G may be used in the wobble position as a target for rewriting.

TABLE 1
Codon-Anticodon Pairing under Wobble Rules

| 3′ end of a codon (or third | 5′ end of an anticodon (or first |
|---|---|
| nucleotide position of a codon) | nucleotide position of an anticodon) |
| C or U | G or Q (queosine) |
| G only | C (no wobble) |
| U only | A |
| A or G (or A, G, C, U in bacteria) | U |
| U, C, or A | A edited to I (inosine) |

[0044] In some embodiments, an amino acid may be encoded by one codon (e.g., out of 64 possible permutations of codons, having one of 4 different nucleotides at each of 3 different positions). For example, Methionine (Met) can be encoded by a single codon AUG. In some embodiments, an amino acid may be encoded by one or more codons. In some embodiments, an amino acid may be encoded by one or two codons (e.g., out of 64 possible permutations of codons). For example, Lysine (Lys) can be encoded by either of the two codons AAA or AAG. For example, Glutamic acid (Glu) can be encoded by either of the two codons GAA or GAG. In these embodiments, an anticodon starting with U may recognize AAA or GAA, and in addition, AAG or GAG, due to cross-talk (see Table 1). Thus, in some embodiments, a codon encoding an amino acid encoded by one or two codons may not be used for genome rewriting or replacement.

[0045] In some embodiments, an amino acid may be encoded by any of one, two, three, four, five, or six codons. For example, arginine (Arg) can be encoded by any of the six codons CGU, CGC, CGA, CGG, AGA, or AGG. For example, serine (Ser) can be encoded by any of the six codons AGU, AGC, UCU, UCC, UCA, or UCG. For examples, leucine (Leu) can be encoded by any of the six codons UUA, UUG, CUU, CUC, CUA, or CUG. In some embodiments, a codon of the set of one, two, three, four, five, or six codons that encode the same amino acid may be selected for rewriting or replacement.

[0046] Table 2 below shows standard rules for anticodon-codon pairing in a model organism, yeast. FIG. 13 shows codon usage in yeast.

TABLE 2
Standard Rules for Anticodon-Codon Pairing in Yeast

| tDNA | Number | | | |
|---|---|---|---|---|
| anticodon | of genes | Anticodon | Codon | Amino acid |
| AGC | 11 | IGC | gcu, gcc | Ala |
| TGC | 5 | UGC | gca, gcg | |
| ACG | 6 | ICG | cgu, cgc, cga | Arg |
| CCG | 1 | CCG | ccg | |
| TCT | 11 | UCU | aga | |
| CCT | 1 | CCU | agg | |
| GTT | 10 | GUU | aau, aac | Asn |
| GTC | 15 | GUC | gau, gac | Asp |
| GCA | 4 | GCA | ugu, ugc | Cys |
| TTG | 9 | UUG | caa | Gln |
| CTG | 1 | CUG | cag | |
| TTC | 14 | UUC | gaa | Glu |
| CTC | 2 | CUC | gag | |
| GCC | 16 | GCC | ggu, gge | Gly |
| TCC | 3 | UCC | gga | |
| CCC | 2 | CCC | ggg | |
| GTG | 7 | GUG | cau, cac | His |
| AAT | 13 | IAU | auu, auc | Ile |
| TAT | 2 | UAU | aua | |
| TAA | 7 | UAA | uua | Leu |
| CAA | 10 | CAA | uug | |
| GAG | 1 | GAG | cuu, cuc | |
| TAG | 3 | UAG | cua, cug | |
| TTT | 7 | UUU | aaa | Lys: |
| CTT | 14 | CUU | aag | |
| CAT | 5 | CAU | aug | Met |
| CAT | 5 | CAU | aug | Met |
| GAA | 10 | GAA | uuu, uuc | Phe |
| AGG | 2 | IGG | ccu, ccc | Pro |
| TGG | 10 | UGG | cca, ccg | |
| AGA | 11 | IGA | ucu, ucc | Ser |
| TGA | 3 | UGA | uca | |
| CGA | 1 | CGA | uga | |
| GCT | 4 | GCU | agu, agc | |
| AGT | 11 | IGU | acu, acc | Thr |
| TGT | 4 | UGU | aca | |
| CGT | 1 | CGU | acg | |
| CCA | 6 | CCA | ugg | Trp |
| GTA | 8 | GUA | uau, uac | Tyr |
| AAC | 14 | IAC | guu, guc | Val |
| TAC | 2 | UAC | gua | |
| CAC | 2 | CAC | gug | |

Gene copy number and predicted decoding specificities of yeast tRNAs

[0047] In some embodiments, a class of codons for which a corresponding anticodon is not a part of the tRNA identity element recognized by a corresponding aminoacyl-tRNA synthetase (aaRS) may be considered. In some embodiments, this class of codons comprises, but is not limited to, leucine (Leu), serine (Ser), or alanine (Ala).

### Codon Reassignment (Codon Capture)

[0048] In some aspects, provided herein are methods for codon rewriting and replacement that allow high fitness of an organism. In some embodiments, at the amino acid-to-tRNA level, aminoacyl-tRNA synthetase (aaRS) that may not interact with an anticodon for clean codon reassignment downstream may be considered. In some embodiments, yeast genetic code evolution may be considered. In some embodiments, at the codon-to-anticodon level, codon removal may allow for deletion of all tRNAs used for decoding. In some embodiments, deletion of tRNAs may not disable decoding of synonymous codons through wobble. In some embodiments, no remaining natural tRNAs can decode rewritten, replaced, or eliminated codon(s), if reinserted.

[0049] In some embodiments, methods for codon rewriting and/or replacement disclosed herein can use a context-sensitive design (e.g., learned from a host organism) for unbiased discovery of problematic motifs based on positive evolutionary selection and/or negative evolutionary selection. In some embodiments, each codon may be considered in the local context (e.g., based on the codons on either side of a given codon of interest), and codons may be selected for re-writing at least in part by normalizing for the observed frequency of the codon in the context of its surrounding codons relative to the null hypothesis of overall relative synonymous codon usage.

[0050] In some embodiments, genes such as Saccharomyces cerevisiae genes can be examined for context-sensitive codon usage. In some embodiments, S. cerevisiae genes may have statistically significant evolutionary signals, such as negative selection leading to predictable de-enriched sequences, such as “slippery sites” (e.g., homopolymer runs), and/or positive selection for functional regulatory motifs, such as Rap1 binding sites. In some embodiments, methods for selecting a replacement codon may comprise a statistical optimization or outlier avoidance approach (e.g., a “Goldilocks” approach) to avoid selection of a replacement codon with a positive evolutionary signal (e.g., a codon that is too “hot” having a usage that is significantly higher than the overall RSCU for that given codon) or a negative evolutionary signal (e.g., a codon that is too “cold” having a usage that is significantly lower than the overall RSCU for that given codon), and instead to select a replacement codon based at least in part on consideration of the codon's local context (e.g., by considering replacement codons whose relative synonymous usage in the given context most closely matches its relative synonymous usage overall). In some embodiments, such selection of replacement codons may comprise determining context-sensitive relative synonymous codon usage (RSCU) value for each of a plurality of codons (e.g., representing a local context of a given codon of interest), and identifying a codon from among the plurality of codons having a maximum or largest RSCU value. For example, the plurality of codons may comprise a codon of interest, a second codon that is upstream of the codon of interest, and a third codon that is downstream of the codon of interest. For example, the plurality of codons may comprise a set of at least three consecutive codons: a codon of interest, a second codon that is upstream of and adjacent to the codon of interest, and a third codon that is downstream of and adjacent to the codon of interest. For example, the maximal RSCU value may be at least about 0.01, at least about 0.05, at least about 0.10, at least about 0.11, at least about 0.12, at least about 0.13, at least about 0.14, at least about 0.15, at least about 0.16, at least about 0.17, at least about 0.18, at least about 0.19, at least about 0.20, at least about 0.21, at least about 0.22, at least about 0.23, at least about 0.24, at least about 0.25, at least about 0.26, at least about 0.27, at least about 0.28, at least about 0.29, at least about 0.30, at least about 0.31, at least about 0.32, at least about 0.33, at least about 0.34, at least about 0.35, at least about 0.36, at least about 0.37, at least about 0.38, at least about 0.39, at least about 0.40, at least about 0.41, at least about 0.42, at least about 0.43, at least about 0.44, at least about 0.45, at least about 0.46, at least about 0.47, at least about 0.48, at least about 0.49, at least about 0.50, at least about 0.51, at least about 0.52, at least about 0.53, at least about 0.54, at least about 0.55, at least about 0.56, at least about 0.57, at least about 0.58, at least about 0.59, at least about 0.60, at least about 0.61, at least about 0.62, at least about 0.63, at least about 0.64, at least about 0.65, at least about 0.66, at least about 0.67, at least about 0.68, at least about 0.69, at least about 0.70, at least about 0.71, at least about 0.72, at least about 0.73, at least about 0.74, at least about 0.75, at least about 0.76, at least about 0.77, at least about 0.78, at least about 0.79, at least about 0.80, at least about 0.81, at least about 0.82, at least about 0.83, at least about 0.84, at least about 0.85, at least about 0.86, at least about 0.87, at least about 0.88, at least about 0.89, or at least about 0.90, at least about 0.91, at least about 0.92, at least about 0.93, at least about 0.94, at least about 0.95, at least about 0.96, at least about 0.97, at least about 0.98, at least about 0.99, or about 1.00. This approach may advantageously select the replacement codon having the maximum context-sensitive codon usage. In some embodiments, motifs identified as associated with positive evolutionary signals or negative evolutionary signals that include codons that are to be replaced by a rewriting design may be highlighted as requiring greater scrutiny to avoid introducing fitness defects by rewriting. In this embodiment, methods using an approach to use a replacement codon that shares the same evolutionary signal as the re-written codon may be used. In some embodiments, rewriting designs may be selected to minimize the number of evolutionary motifs affected. In some embodiments, nonsynonymous codons may be introduced instead of introducing a motif with an evolutionary signal through replacement with a synonymous codon.

[0051] In some embodiments, codon and/or genome rewriting may comprise a risk. In some embodiments, the risk may comprise translational frameshifts (FIG. 2) or non-coding RNA (ncRNA, FIG. 3). In some embodiments, translational frameshifts may be used for gene regulation by a Ty repeat, killer virus elements, or yeast genes comprising OAZ1, ABP140, EST3, or YFS1. In some embodiments, ncRNA may comprise tRNA, small nuclear (snRNA), or small nucleolar RNA (snoRNA). In some embodiments, an ncRNA may be functional. In some embodiments, an ncRNA may not be functional. In some embodiments, the risk described herein can be addressed computationally during genome design through genome-wide alignment of designed CDSs to annotated ncRNAs to identify antisense binding.

[0052] In some embodiments, the risk may be related to orthogonal translation system. In some embodiments, the risk may comprise low uptake of ncAA from media into an organism (e.g., yeast), low expression levels of aaRS, or mislocalization of aaRS. In some embodiments, the risk may comprise inefficient interaction between an ncAA and the corresponding aaRS, inefficient acylation of a tRNA, or suboptimal ribosome interaction of tRNA or codon (FIG. 4). In some embodiments, the risk described herein can be obviated by, for example, rapid yeast pathway engineering, codon optimization, CDS copy number, tRNA copy number, promoter/terminator shuffling, transplant aaRS orthologs, CDS molecular breeding, or titratable gene expression systems. In some embodiments, the risk described herein can be obviated by, for example, two to four week cycle time for design-build-deliver-test-learn. In some embodiments, the risk described herein can be mitigated or obviated by, for example, performing parallelizable strain construction and screening.

[0053] In some embodiments, each aaRS may recognize all of the tRNAs for an amino acid for amino acid targeting. In some embodiments, recognition may involve amino acid and depending on the aaRS, regions of the tRNA, for example, attachment region, variable loops and stems, and/or an anticodon loop. In some embodiments, the anticodon loop recognition may pose an issue for a method disclosed herein. For example, if an anticodon that is part of aaRS recognition is used, then the native aaRS may still recognize the anticodon and give a mixture of canonical and non-canonical amino acid incorporation. Serine, leucine, and alanine are special in this regard as aaRS generally does not recognize the anticodon. In some embodiments, it may be because serine and leucine have 6 codon blocks, which can provide more diversity in the anticodon. In some embodiments, it may be because in yeast, a part of the anticodon loop is recognized for leucine.

### Derisked by Evolution: Leu, Arg, Ser, Stop

[0054] In some aspects, the genetic code may have variations depending on organism. This may be because of evolutionary reassignment of codons (see Table 3). For example, leucine codons are captured by serine in Candida (e.g., CTG). For example, leucine codons are captured by alanine in a fungal clade including Pachysolen. In another example, arginine codons have been lost in yeast mitochondria. In another example, serine-aaRS does not recognize serine anticodon.

[0055] In some embodiments, stop codons deleted for codon reassignment/replacement may be captured by nearby amino acids (eRFI in ciliates evolved for UGA vs UAA/UAG recognition). In some embodiments, alanine is not captured by evolution. In some embodiments, alanine's 4-codon block (i.e., there are 4 synonymous codons encoding alanine) in yeast is covered by two larger tRNA families, so it may be difficult to completely eliminate one of the families. In some embodiments, tRNA-aaRS interaction with amino acid works by excluding large sidechains.

TABLE 3
Codons Derisked by evolution: Leu, Arg, Ser and Stop codons

| | Standard | |
|---|---|---|
| Codon | Code | Alternative Code |
| UUY | Phe | |
| UUR | Leu | |
| CUY | Leu | Thr (mitoch) |
| CUA | Leu | Thr (mitoch) |
| CUG | Leu | Ser (Candida), Ala (Pachysolen), Thr/Ser (mitochi) |
| AUY | Ile | |
| AUA | Ile | Met (mitoch) |
| AUG | Met | |
| GUN | Val | |
| UCY | Ser | |
| UCR | Ser | Absent (Ec61) |
| CCN | Pro | |
| ACN | Thr | |
| GCN | Ala | |
| UAY | Tyr | |
| UAA | Stop | Gln/glu/Tyr (ciliate, mitoch) |
| UAG | Stop | Absent (Sc2O), Pyl *archae, eubact, Gln/Leu/Tyr |
| | | (ciliate, mitoch) |
| CAY | His | |
| CAR | Gln | |
| AAY | Asn | |
| AAA | Lys | Asn (mitoch) |
| AAG | Lys | |
| GAY | Asp | |
| GAR | Glu | |
| UGY | Cys | |
| UGA | Stop | Sec (Fungal ancestors), Trp/Gly/Cys (ciliate, |
| | | mitoch) |
| UGG | Trp | |
| CGY | Arg | |
| CGR | Arg | Absent (yeast mitoch) |
| AGY | Ser | |
| AGA | Arg | Ser (mitoch) |
| AGG | Arg | Set/Lys (mitoch) |
| GGN | Gly | |

Codon Capture across ~3B years of evolution
Calculated from S. cerevisiae S288C reference genome

[0056] In some embodiments, the following codons may be removed for rewriting and/or replacement.

TABLE 4
Possible Codon Replacement

| Amino | | Total number | |
|---|---|---|---|
| acid | Codons | of codons | Total number of tRNAs |
| Leucine | CTG/CTA | 69K codons | 3 tRNAs |
| Arginine | CGG/CGA | 14K codons | 1 tRNA |
| Serine | AGT/AGC | 70K codons | 4 tRNAs (choose one pair) |
| | TCG/TCA | 78K codons | 4 tRNAs (choose one pair) |
| Total | Over 6 | 153-161K codons | 8 tRNAs |
| | codons | | |

[0057] In some embodiments, a host genome may be divided into multiple regions for codon replacement design. In some embodiments, a host genome may be divided into at least 2, 3, 4,5,6,7,8,9, 10, 11, 12, 13, 14, 15, 16, 17, 18, 19, 20, 21, 22, 23, 24, 25, 26, 27, 28, 29, 30, 31, 32, 33, 34, 35, 36, 37, 38, 39, 40, 41, 42, 43, 44, 45, 46, 47, 48, 49, or at least 50 regions for codon design. In some embodiments, a host genome may be divided into approximately 2, 3,4,5,6,7,8,9, 10, 11, 12, 13, 14, 15, 16, 17, 18, 19, 20, 21, 22, 23, 24, 25, 26, 27, 28, 29, 30, 31, 32, 33, 34, 35, 36, 37, 38, 39, 40, 41, 42, 43, 44, 45, 46, 47, 48, 49, or approximately 50 regions for codon design. In some embodiments, a host genome may be divided into 5 regions for codon design.

[0058] In some embodiments, each region may be at least about 1, 2, 3, 4, 5, 6, 7, 8, 9, 10, 11, 12, 13, 14, 15, 16, 17, 18, 19, 20, 21, 22, 23, 24, 25, 26, 27, 28, 29, 30, 31, 32, 33, 34, 35, 36, 37, 38, 39, 40, 41, 42, 43, 44, 45, 46, 47, 48, 49, or at least about 50 kilobases (kb). In some embodiments, each region may be approximately 1, 2, 3, 4, 5, 6, 7, 8, 9, 10, 11, 12, 13, 14, 15, 16, 17, 18, 19, 20, 21, 22, 23, 24, 25, 26, 27, 28, 29, 30, 31, 32, 33, 34, 35, 36, 37, 38, 39, 40, 41, 42, 43, 44, 45, 46, 47, 48, 49, or approximately 50 kb. In some embodiments, each region may have at least 1, 2, 3, 4, 5, 6, 7, 8, 9, 10, 11, 12, 13, 14, 15, 16, 17, 18, 19, 20, 21, 22, 23, 24, 25, 26, 27, 28, 29, 30, 31, 32, 33, 34, 35, 36, 37, 38, 39, 40, 41, 42, 43, 44, 45, 46, 47, 48, 49, or at least 50 designs. In some embodiments, each region may have approximately 1,2,3,4,5,6,7,8,9, 10, 11, 12, 13, 14, 15, 16, 17, 18, 19, 20, 21, 22, 23, 24, 25, 26, 27, 28, 29, 30, 31, 32, 33, 34, 35, 36, 37, 38, 39, 40, 41, 42, 43, 44, 45, 46, 47, 48, 49, or approximately 50 designs.

[0059] In some embodiments, the total region of codon removal design may comprise at least 1,2,3,4,5,6,7,8,9, 10, 11, 12, 13, 14, 15, 16, 17, 18, 19, 20, 21, 22, 23, 24, 25, 26, 27, 28, 29, 30, 31, 32, 33, 34, 35, 36, 37, 38, 39, 40, 41, 42, 43, 44, 45, 46, 47, 48, 49, 50, 55, 60, 65, 70, 75, 80, 85, 90, 95, 100, 110, 120, 130, 140, 150, 160, 170, 180, 190, 200, 210, 220, 230, 240, 250, 260, 270, 280, 290, 300, 310, 320, 330, 340, 350, 360, 370, 380, 390, 400, 410, 420, 430, 440, 450, 500, 510, 520, 530, 540, 550, 560, 570, 580, 590, 600, 610, 620, 630, 640, 650, 660, 670, 680, 690, 700, 710, 720, 730, 740, 750, 760, 770, 780, 790, 800, 810, 820, 830, 840, 850, 860, 870, 880, 890, 900, 910, 920, 930, 940, 950, 960, 970, 980, 990, or at least 1000 kb. In some embodiments, the total region of codon removal design may comprise approximately 1, 2, 3, 4, 5, 6, 7, 8, 9, 10, 11, 12, 13, 14, 15, 16, 17, 18, 19, 20, 21, 22, 23, 24, 25, 26, 27, 28, 29, 30, 31, 32, 33, 34, 35, 36, 37, 38, 39, 40, 41, 42, 43, 44, 45, 46, 47, 48, 49, 50, 55, 60, 65, 70, 75, 80, 85, 90, 95, 100, 110, 120, 130, 140, 150, 160, 170, 180, 190, 200, 210, 220, 230, 240, 250, 260, 270, 280, 290, 300, 310, 320, 330, 340, 350, 360, 370, 380, 390, 400, 410, 420, 430, 440, 450, 500, 510, 520, 530, 540, 550, 560, 570, 580, 590, 600, 610, 620, 630, 640, 650, 660, 670, 680, 690, 700, 710, 720, 730, 740, 750, 760, 770, 780, 790, 800, 810, 820, 830, 840, 850, 860, 870, 880, 890, 900, 910, 920, 930, 940, 950, 960, 970, 980, 990, or approximately 1000 kb.

[0060] In some embodiments, each region may have at least 1, 2, 3, 4, 5, 6, 7, 8, 9, 10, 11, 12, 13, 14, 15, 16, 17, 18, 19, 20, 21, 22, 23, 24, 25, 26, 27, 28, 29, 30, 31, 32, 33, 34, 35, 36, 37, 38, 39, 40, 41, 42, 43, 44, 45, 46, 47, 48, 49, or at least 50 codons removed. In some embodiments, each region may have approximately 1, 2, 3, 4, 5, 6, 7, 8, 9, 10, 11, 12, 13, 14, 15, 16, 17, 18, 19, 20, 21, 22, 23, 24, 25, 26, 27, 28, 29, 30, 31, 32, 33, 34, 35, 36, 37, 38, 39, 40, 41, 42, 43, 44, 45, 46, 47, 48, 49, or approximately 50 codons removed. In some embodiments, each region may have 2 codons removed (e.g., “Individual” design). In some embodiments, the “Individual” design may comprise removing one or more codons encoding leucine, arginine, or serine. In some embodiments, each region may have 3 codons removed (e.g., “Paired” design). In some embodiments, the “Paired” design may comprise removing one or more codons encoding leucine/arginine, leucine/serine, or arginine/serine. In some embodiments, each region may have 6 codons removed (e.g., “All” design). In some embodiments, the “All” design may comprise removing one or more codons encoding leucine, arginine, and serine.

[0061] In some embodiments, the total number of codons removed, rewritten, or replaced may comprise at least 1, 10, 50, 100, 150, 200, 250, 300, 350, 400, 450, 500, 550, 600, 650, 700, 750, 800, 850, 900, 950, or at least 1000 codons. In some embodiments, the total number of codons removed, rewritten, or replaced may comprise approximately 1, 10, 50, 100, 150, 200, 250, 300, 350, 400, 450, 500, 550, 600, 650, 700, 750, 800, 850, 900, 950, or approximately 1000 codons. In some embodiments, the total number of codons removed, rewritten, or replaced may comprise at least 1K, 2K, 3K, 4K, 5K, 6K, 7K, 8K, 9K, 10K, 20K, 30K, 40K, 50K, 60K, 70K, 80K, 90K, 100K, 110K, 120K, 130K, 140K, 150K, 160K, 170K, 180K, 190K, 200K, 250K, 300K, 350K, 400K, 450K, 500K, 550K, 600K, 650K, 700K, 750K, 800K, 850K, 900K, 950K, or at least 1000K codons. In some embodiments, the total number of codons removed, rewritten, or replaced may comprise approximately 1K, 2K, 3K, 4K, 5K, 6K, 7K, 8K, 9K, 10K, 20K, 30K, 40K, 50K, 60K, 70K, 80K, 90K, 100K, 110K, 120K, 130K, 140K, 150K, 160K, 170K, 180K, 190K, 200K, 250K, 300K, 350K, 400K, 450K, 500K, 550K, 600K, 650K, 700K, 750K, 800K, 850K, 900K, 950K, or approximately 1000K codons.

### Codon Replacement: Synonymous Rewriting & Observed Bug Rate

[0062] In some aspects, provided herein are methods for synonymous codon rewriting and design rules for synonymous codon rewriting and observed bug rate. A bug or bugs, as used here, may refer to unanticipated fitness defect(s) caused by designed DNA sequence. In some embodiments, a bug may also be referred to a risk. Methods for synonymous codon rewriting may follow design rules that provide technical improvements in decreasing or minimizing a bug rate (e.g., by avoiding the selection of codons for use in re-writing that may introduce unanticipated fitness defects in the designed DNA sequence). In some embodiments, methods disclosed herein may comprise utilizing encoded watermarks (e.g., PCRTags or any other DNA barcodes) in the genome. For example, watermarks may be encoded in non-protein-coding regions. In some embodiments, watermarks may be encoded in ORFs. In some embodiments, methods described herein may synonymously rewrite 1 out of approximately every 20 codons globally. In some embodiments, methods disclosed herein may comprise performing a PCRTag algorithm. In some embodiments, the PCRTag algorithm may specify a ‘most-different’ design. In some embodiments, the “most-different” design may ignore the relative synonymous codon usage (RSCU), codon adaptation, or translation efficiency matching to maximize base pair changes. In some embodiments, the “most-different” design may yield about 1 bug per 10K codons removed, rewritten, or replaced. In some embodiments, the “most-different” design may yield about 3 bugs per 20K codons removed, rewritten, or replaced (details described in Richardson, et al., Science (2017) 355, 1040-1044, which is incorporated by reference herein in its entirety). In some embodiments, methods disclosed herein may decrease the number of bugs. In some embodiments, methods disclosed herein may eliminate one or more bugs. In some embodiments, methods disclosed herein may avoid a bug or a risk. In some embodiments, the risk may comprise a known regulatory site in ORFs that can impede transcription. In some embodiments, the known regulatory site may comprise a binding site of Repressor Activator Protein 1 (Rap1p, essential DNA-binding transcription regulator) in ORFs. Details are described in Yarrington, et al. Genetics (2012) 190(2):523-35 and Wu, et al., Science (2017) 355, 1048, each of which is incorporated by reference herein in its entirety. In some embodiments, a Rap1p binding site consensus sequence may comprise ACACCCRYACAYM (SEQ ID NO: 11,813), wherein R may be G or A, Y may be C or T, and M may be A or Cₙ

### Codon Replacement: Simple/Conventional Method

[0063] In some aspects, provided herein are methods for codon rewriting and/or replacement. In some embodiments, methods described herein may comprise rewriting and/or replacing a codon while retaining GC content. In some embodiments, a nucleotide in the wobble position of a codon (third position of a codon) is changed in a way that retains GC content. For example, a codon ending in G or A in a 4-codon block may be changed to C or T, respectively, to retain GC content. In some embodiments, these changes may also replace codons with other codons having the same frequency. Alternatively, in some embodiments, methods for codon rewriting and/or replacing described herein, may comprise changing one or more codons encoding an amino acid to the most frequently used codon for that specific amino acid in the genome. For example, one or more synonymous codons can be replaced with a synonymous codon with the highest number of occurrences for that specific amino acid in the genome. In some embodiments, methods that have the smallest effect on tRNA pools may be used.

### Codon Replacement Via Statistical Analysis: Goldilocks Method

[0064] Many synonymous codon rewriting methods are based on matching single-codon properties such as, for example, relative synonymous codon usage (RSCU) over all genes, codon adaptation index (CAI) over highly-expressed or stress-response genes, and translational efficiency (TE) incorporating tRNA pool. Some methods optimize over 2-codon windows or mRNA secondary structure using a hidden Markov model (HMM). Another new approach for codon rewriting and/or replacement is a Goldilocks method which utilizes machine learning analysis (e.g., statistical analysis) of a host genome.

[0065] The present disclosure provides computer systems that are programmed to implement methods of the disclosure. FIG. 14 depicts a computer system that is programmed or otherwise configured to implement methods provided herein. The computer system 1410 may be programmed or otherwise configured to, for example, analyze at least a portion of the genome of the organism to identify a first plurality of codons in the genome of the organism to be rewritten, rewrite the first plurality of codons in the genome of the organism to a second codon, and analyze a local context of a codon-of-interest in the genome of the organism.

[0066] The computer system 1410 can regulate various aspects of analysis, calculation, and generation of the present disclosure, such as, for example, analyzing at least a portion of the genome of the organism to identify a first plurality of codons in the genome of the organism to be rewritten, rewriting the first plurality of codons in the genome of the organism to a second codon, and analyzing a local context of a codon-of-interest in the genome of the organism. The computer system 1410 can be an electronic device of a user or a computer system that is remotely located with respect to the electronic device. The electronic device can be a mobile electronic device.

[0067] The computer system 1410 includes a central processing unit (CPU, also “processor” and “computer processor” herein) 1420, which can be a single core or multi core processor, or a plurality of processors for parallel processing. The computer system 1410 also includes memory or memory location 1440 (e.g., random-access memory, read-only memory, flash memory), electronic storage unit 1430 (e.g., hard disk), communication interface 1420 (e.g., network adapter) for communicating with one or more other systems, and peripheral devices 1450, such as cache, other memory, data storage and/or electronic display adapters. The memory 1440, storage unit 1430, interface 1420 and peripheral devices 1450 are in communication with the CPU 1420 through a communication bus (solid lines), such as a motherboard. The storage unit 1430 can be a data storage unit (or data repository) for storing data. The computer system 1410 can be operatively coupled to a computer network (“network”) 1480 with the aid of the communication interface 1420. The network 1480 can be the Internet, an internet and/or extranet, or an intranet and/or extranet that is in communication with the Internet.

[0068] The network 1480 in some cases is a telecommunication and/or data network. The network 1480 can include one or more computer servers, which can enable distributed computing, such as cloud computing. For example, one or more computer servers may enable cloud computing over the network 1480 (“the cloud”) to perform various aspects of analysis, calculation, and generation of the present disclosure, such as, for example, analyzing at least a portion of the genome of the organism to identify a first plurality of codons in the genome of the organism to be rewritten, rewriting the first plurality of codons in the genome of the organism to a second codon, and analyzing a local context of a codon-of-interest in the genome of the organism. Such cloud computing may be provided by cloud computing platforms such as, for example, Amazon Web Services (AWS), Microsoft Azure, Google Cloud Platform, and IBM cloud. The network 1480, in some cases with the aid of the computer system 1410, can implement a peer-to-peer network, which may enable devices coupled to the computer system 1410 to behave as a client or a server.

[0069] The CPU 1420 may comprise one or more computer processors and/or one or more graphics processing units (GPUs). The CPU 1420 can execute a sequence of machine-readable instructions, which can be embodied in a program or software. The instructions may be stored in a memory location, such as the memory 1440. The instructions can be directed to the CPU 1420, which can subsequently program or otherwise configure the CPU 1420 to implement methods of the present disclosure. Examples of operations performed by the CPU 1420 can include fetch, decode, execute, and writeback.

[0070] The CPU 1420 can be part of a circuit, such as an integrated circuit. One or more other components of the system 1410 can be included in the circuit. In some cases, the circuit is an application specific integrated circuit (ASIC).

[0071] The storage unit 1430 can store files, such as drivers, libraries and saved programs. The storage unit 1430 can store user data, e.g., user preferences and user programs. The computer system 1410 in some cases can include one or more additional data storage units that are external to the computer system 1410, such as located on a remote server that is in communication with the computer system 1410 through an intranet or the Internet.

[0072] The computer system 1410 can communicate with one or more remote computer systems through the network 1480. For instance, the computer system 1410 can communicate with a remote computer system of a user. Examples of remote computer systems include personal computers (e.g., portable PC), slate or tablet PC's (e.g., Apple® iPad, Samsung® Galaxy Tab), telephones, Smart phones (e.g., Apple® iPhone, Android-enabled device, Blackberry®), or personal digital assistants. The user can access the computer system 1410 via the network 1480.

[0073] Methods as described herein can be implemented by way of machine (e.g., computer processor) executable code stored on an electronic storage location of the computer system 1410, such as, for example, on the memory 1440 or electronic storage unit 1430. The machine executable or machine readable code can be provided in the form of software. During use, the code can be executed by the processor 1420. In some cases, the code can be retrieved from the storage unit 1430 and stored on the memory 1440 for ready access by the processor 1420. In some situations, the electronic storage unit 1430 can be precluded, and machine-executable instructions are stored on memory 1440.

[0074] The code can be pre-compiled and configured for use with a machine having a processer adapted to execute the code, or can be compiled during runtime. The code can be supplied in a programming language that can be selected to enable the code to execute in a pre-compiled or as-compiled fashion.

[0075] Aspects of the systems and methods provided herein, such as the computer system 1410, can be embodied in programming. Various aspects of the technology may be thought of as “products” or “articles of manufacture” typically in the form of machine (or processor) executable code and/or associated data that is carried on or embodied in a type of machine readable medium. Machine-executable code can be stored on an electronic storage unit, such as memory (e.g., read-only memory, random-access memory, flash memory) or a hard disk. “Storage” type media can include any or all of the tangible memory of the computers, processors or the like, or associated modules thereof, such as various semiconductor memories, tape drives, disk drives and the like, which may provide non-transitory storage at any time for the software programming. All or portions of the software may at times be communicated through the Internet or various other telecommunication networks. Such communications, for example, may enable loading of the software from one computer or processor into another, for example, from a management server or host computer into the computer platform of an application server. Thus, another type of media that may bear the software elements includes optical, electrical and electromagnetic waves, such as used across physical interfaces between local devices, through wired and optical landline networks and over various air-links. The physical elements that carry such waves, such as wired or wireless links, optical links or the like, also may be considered as media bearing the software. As used herein, unless restricted to non-transitory, tangible “storage” media, terms such as computer or machine “readable medium” refer to any medium that participates in providing instructions to a processor for execution.

[0076] Hence, a machine readable medium, such as computer-executable code, may take many forms, including but not limited to, a tangible storage medium, a carrier wave medium or physical transmission medium. Non-volatile storage media include, for example, optical or magnetic disks, such as any of the storage devices in any computer(s) or the like, such as may be used to implement the databases, etc. shown in the drawings. Volatile storage media include dynamic memory, such as main memory of such a computer platform. Tangible transmission media include coaxial cables; copper wire and fiber optics, including the wires that comprise a bus within a computer system. Carrier-wave transmission media may take the form of electric or electromagnetic signals, or acoustic or light waves such as those generated during radio frequency (RF) and infrared (IR) data communications. Common forms of computer-readable media therefore include for example: a floppy disk, a flexible disk, hard disk, magnetic tape, any other magnetic medium, a CD-ROM, DVD or DVD-ROM, any other optical medium, punch cards paper tape, any other physical storage medium with patterns of holes, a RAM, a ROM, a PROM and EPROM, a FLASH-EPROM, any other memory chip or cartridge, a carrier wave transporting data or instructions, cables or links transporting such a carrier wave, or any other medium from which a computer may read programming code and/or data. Many of these forms of computer readable media may be involved in carrying one or more sequences of one or more instructions to a processor for execution.

[0077] The computer system 1410 can include or be in communication with an electronic display 1460 that comprises a user interface (UI) 1470 for providing, for example, a visual display indicative of training and testing of a trained algorithm. Examples of UIs include, without limitation, a graphical user interface (GUI) and web-based user interface.

[0078] Methods and systems of the present disclosure can be implemented by way of one or more algorithms. An algorithm can be implemented by way of software upon execution by the central processing unit 1420. The algorithm can, for example, analyze at least a portion of the genome of the organism to identify a first plurality of codons in the genome of the organism to be rewritten, rewrite the first plurality of codons in the genome of the organism to a second codon, and analyze a local context of a codon-of-interest in the genome of the organism.

[0079] In some embodiments, the computer system may be a machine learning-based computer system comprising a computer processing unit communicatively coupled to a sequence processing unit via a first controller and to a storage unit via a second controller. In some embodiments, the machine learning-based computer system optionally comprises a sequence analyzer that sequences at least a portion of a genome of an organism (e.g., at least in part by assaying nucleic acid molecules obtained or derived from the organism to determine genetic sequences of the at least the portion of the genome of the organism). In some embodiments, the sequence processing unit comprises a storage component that retains genome sequence data generated by the sequence processing unit. The sequence processing unit may receive input data from the computer processing unit. For example, the input data may comprise translation tables obtained from the National Center for Biotechnology Information (NCBI), a sequence read of at least a portion of a genome of an organism contained in a sample, or a combination thereof. In some embodiments, the at least the portion of the genome comprises a nucleus-derived DNA. In some embodiments, the at least the portion of the genome comprises protein-coding genes. In some embodiments, mitochondrial genes, transposable element genes, pseudogenes, and blocked reading frames are excluded from the method disclosed herein. The sequence processing unit determines the codon count for each of a plurality of codons in the genome (e.g., including stop codons). In some embodiments, a translation table is used to map codons to amino acids. In some embodiments, the sequence processing unit determines an RSCU for each codon (e.g., as the number of counts for the codon divided by the number of counts for all codons for the same amino acid).

[0080] In some embodiments, the sequence processing unit determines the frequency of 9 mers in coding domains of a genome of an organism. In some embodiments, the 9 mers are converted to contexts. Contexts, as disclosed herein, may comprise a codon-amino acid-codon pattern.

[0081] In some embodiments, the sequence processing unit comprises an algorithm that determines a value for each coding sequence by identifying positions of one or more codons to eliminate; analyzing each codon, in turn; and rewriting the codon with the most frequently used codon as the central codon in a 3-codon (9 mer) context. In some embodiments, the first codon is unique because there is no preceding context. In standard genetic codes, however, the first codon is always ATG. In some cases, the last codon (e.g., stop codon) has no following context. In some embodiments, if stop codons are rewritten, a favored design comprises changing TAA and TAG to TGA. TGA has only one single choice. Alternatively, in some embodiments, a 6nt (6-nucleotide) context or 9nt (9-nucleotide) context with the stop codon as the final 3nt may be used.

[0082] In some embodiments, the sequence processing unit performs dynamical programming for treatment of neighboring codons. In some embodiments, the sequencing processing unit uses a different codon selection criterion, such as maintaining GC content, codon adaptation index, or translational efficiency, as the main codon replacement rule. In some embodiments, the sequence processing unit employs a Goldilocks codon with the greatest fold-enrichment, rather than a Goldilocks codon that is most often used, in the context. In some embodiments, the sequence processing unit uses random codons selected using the Goldilocks context-dependent probabilities as the probability distribution.

[0083] In some embodiments, the final codon is a stop codon and a special case. Most designs may be a single choice for the stop codon, TGA, or a pair of choices, TGA and TAA. For the stop codon, a 9 mer pattern or a 5 mer pattern ending with the stop codon may be used instead of the 9 mer pattern with the codon of interest in the middle position. Some example embodiments avoid significantly enriched codons as possible regulatory signals (e.g., too hot), thereby choosing codons whose usage matches the overall RSCU. Some example embodiments avoid codons that are used significantly less (e.g., too cold), thereby choosing codons whose usage matches the overall RSCU. Some example embodiments may consider the RSCU value for the specific codon. In some embodiments, a codon with an RSCU value of at least about 0.01, at least about 0.05, at least about 0.10, at least about 0.11, at least about 0.12, at least about 0.13, at least about 0.14, at least about 0.15, at least about 0.16, at least about 0.17, at least about 0.18, at least about 0.19, at least about 0.20, at least about 0.21, at least about 0.22, at least about 0.23, at least about 0.24, at least about 0.25, at least about 0.26, at least about 0.27, at least about 0.28, at least about 0.29, at least about 0.30, at least about 0.31, at least about 0.32, at least about 0.33, at least about 0.34, at least about 0.35, at least about 0.36, at least about 0.37, at least about 0.38, at least about 0.39, at least about 0.40, at least about 0.41, at least about 0.42, at least about 0.43, at least about 0.44, at least about 0.45, at least about 0.46, at least about 0.47, at least about 0.48, at least about 0.49, at least about 0.50, at least about 0.51, at least about 0.52, at least about 0.53, at least about 0.54, at least about 0.55, at least about 0.56, at least about 0.57, at least about 0.58, at least about 0.59, at least about 0.60, at least about 0.61, at least about 0.62, at least about 0.63, at least about 0.64, at least about 0.65, at least about 0.66, at least about 0.67, at least about 0.68, at least about 0.69, at least about 0.70, at least about 0.71, at least about 0.72, at least about 0.73, at least about 0.74, at least about 0.75, at least about 0.76, at least about 0.77, at least about 0.78, at least about 0.79, at least about 0.80, at least about 0.81, at least about 0.82, at least about 0.83, at least about 0.84, at least about 0.85, at least about 0.86, at least about 0.87, at least about 0.88, at least about 0.89, or at least about 0.90, at least about 0.91, at least about 0.92, at least about 0.93, at least about 0.94, at least about 0.95, at least about 0.96, at least about 0.97, at least about 0.98, at least about 0.99, or about 1.00 may be selected. In some embodiments, a codon with the highest RSCU value for a local context may be selected.

[0084] Codons are under evolutionary selection pressure such as positive selection or negative selection. For example, positive selection can include, but is not limited to, within-ORF regulatory elements. For example, negative selection can include, but is not limited to, frameshifts, ribosome stalls, and secondary structure interfering with transcription/translation. Codon choice can depend on context of surrounding codons.

[0085] For example, a Goldilocks method may be performed based on a principle that 1) most open reading frame (ORF) regions are not regulatory, 2) a replacement codon that is not too “hot” (e.g., a codon with usage that is significantly higher than the overall RSCU for that specific codon; positive selection) and not too “cold” (e.g., a codon with usage that is significantly lower than the overall RSCU for that specific codon; negative selection) is chosen, and 3) a replacement codon depends on context of upstream and downstream codons. In some embodiments, a replacement codon that is “too hot” may comprise a codon that may have been evolutionarily positively selected.

[0086] In some embodiments, methods for selecting a replacement codon may comprise an optimization or outlier avoidance approach (e.g., a “Goldilocks”) approach to avoid selection of a replacement codon with a positive evolutionary signal (e.g., a codon that is too “hot” having a usage that is significantly higher than the overall RSCU for that given codon) or a negative evolutionary signal (e.g., a codon that is too “cold” having a usage that is significantly lower than the overall RSCU for that given codon), and instead to select a replacement codon based at least in part on consideration of the codon's local context (e.g., by considering replacement codons whose relative synonymous usage in the given context most closely matches its relative synonymous usage overall). In some embodiments, such selection of replacement codons may comprise determining context-sensitive relative synonymous codon usage (RSCU) value for each of a plurality of codons (e.g., representing a local context of a given codon of interest), and identifying a codon from among the plurality of codons having a maximum or largest RSCU value. For example, the plurality of codons may comprise a codon of interest, a second codon that is upstream of the codon of interest, and a third codon that is downstream of the codon of interest. For example, the plurality of codons may comprise a set of at least three consecutive codons: a codon of interest, a second codon that is upstream of and adjacent to the codon of interest, and a third codon that is downstream of and adjacent to the codon of interest. For example, the maximal RSCU value may be at least about 0.01, at least about 0.05, at least about 0.10, at least about 0.11, at least about 0.12, at least about 0.13, at least about 0.14, at least about 0.15, at least about 0.16, at least about 0.17, at least about 0.18, at least about 0.19, at least about 0.20, at least about 0.21, at least about 0.22, at least about 0.23, at least about 0.24, at least about 0.25, at least about 0.26, at least about 0.27, at least about 0.28, at least about 0.29, at least about 0.30, at least about 0.31, at least about 0.32, at least about 0.33, at least about 0.34, at least about 0.35, at least about 0.36, at least about 0.37, at least about 0.38, at least about 0.39, at least about 0.40, at least about 0.41, at least about 0.42, at least about 0.43, at least about 0.44, at least about 0.45, at least about 0.46, at least about 0.47, at least about 0.48, at least about 0.49, at least about 0.50, at least about 0.51, at least about 0.52, at least about 0.53, at least about 0.54, at least about 0.55, at least about 0.56, at least about 0.57, at least about 0.58, at least about 0.59, at least about 0.60, at least about 0.61, at least about 0.62, at least about 0.63, at least about 0.64, at least about 0.65, at least about 0.66, at least about 0.67, at least about 0.68, at least about 0.69, at least about 0.70, at least about 0.71, at least about 0.72, at least about 0.73, at least about 0.74, at least about 0.75, at least about 0.76, at least about 0.77, at least about 0.78, at least about 0.79, at least about 0.80, at least about 0.81, at least about 0.82, at least about 0.83, at least about 0.84, at least about 0.85, at least about 0.86, at least about 0.87, at least about 0.88, at least about 0.89, or at least about 0.90, at least about 0.91, at least about 0.92, at least about 0.93, at least about 0.94, at least about 0.95, at least about 0.96, at least about 0.97, at least about 0.98, at least about 0.99, or about 1.00. This approach may advantageously select the replacement codon having the maximum context-sensitive codon usage. In some embodiments, motifs identified as associated with positive evolutionary signals or negative evolutionary signals that include codons that are to be replaced by a rewriting design may be highlighted as requiring greater scrutiny to avoid introducing fitness defects by rewriting. In this embodiment, methods using an approach to use a replacement codon that shares the same evolutionary signal as the re-written codon may be used. In some embodiments, rewriting designs may be selected to minimize the number of evolutionary motifs affected. In some embodiments, nonsynonymous codons may be introduced instead of introducing a motif with an evolutionary signal through replacement with a synonymous codon.

[0087] In some embodiments, a replacement codon that is “too hot” may comprise a codon that may be a regulatory element, e.g., an within-ORF regulatory element. In some embodiments, a replacement codon that is not “too hot” may comprise a codon that may not be an regulatory element, e.g., an within-ORF regulatory element. In some embodiments, a replacement codon that is “too cold” may comprise a codon that may have been evolutionarily negatively selected. In some embodiments, a replacement codon that is “too cold” may comprise a codon that may cause frameshifts, ribosome stalls, or secondary structure interfering with transcription and/or translation. In some embodiments, a replacement codon that is not “too cold” may comprise a codon that may not cause frameshifts, ribosome stalls, or secondary structure interfering with transcription and/or translation. In some embodiments, machine learning approaches (e.g., statistical analysis approaches) can be performed to determine the rules for Goldilocks methods for codon replacement from the host genome. Details of examples of Goldilocks methods are provided in, for example, Example 3 and Example 4. In some embodiments, sequences of original yeast ORFs (Saccharomyces cerevisiae S288C strain) and rewritten yeast ORFs using methods described herein are shown as SEQ ID NOs: 1-11,812.

[0088] In some aspects, provided herein are methods for codon rewriting and/or replacement, wherein a codon may be selected by examining a local context of the codon. In some embodiments, a codon may be selected by examining a local context of a codon-of-interest within an ORF or a gene. In some embodiments, a local context of a codon-of-interest may comprise the codon-of-interest and a codon on each side of the codon-of-interest. In some embodiments, a local context of a codon-of-interest may comprise the codon-of-interest and codons on both 5′ and 3′ side of the codon-of-interest. In some embodiments, a local context of a codon-of-interest may comprise a preceding codon, the codon-of-interest, and the subsequent codon. In some embodiments, a local context of a codon-of-interest may comprise a codon upstream of the codon-of-interest, the codon-of-interest, and a codon downstream of the codon-of-interest. In some embodiments, a local context of a codon-of-interest may comprise a codon 5′ to the codon-of-interest, the codon-of-interest, and a codon 3′ to the codon-of-interest.

[0089] In some embodiments, a local context of a codon-of-interest may comprise at least 1, 2, 3, 4, 5, 6, 7, 8, 9, 10, 11, 12, 13, 14, 15, 16, 17, 18, 19, 20, or at least 21 codons. In some embodiments, a local context of a codon-of-interest may comprise 3 codons, i.e., a preceding codon, the codon-of-interest, and the subsequent codon. In some embodiments, a local context of a codon-of-interest may comprise 3 codons, i.e., a codon upstream of (or 5′ to) the codon-of-interest, the codon-of-interest, and a codon downstream of (or 3′ to) the codon-of-interest. In some embodiments, a local context of a codon-of-interest may comprise 5 codons, i.e., two preceding codons, the codon-of-interest, and the two subsequent codons. In some embodiments, a local context of a codon-of-interest may comprise 5 codons, i.e., two codons upstream of (or 5′ to) the codon-of-interest, the codon-of-interest, and two codons downstream of (or 3′ to) the codon-of-interest.

[0090] In some embodiments, a local context of a codon-of-interest may comprise at least 3, 4,5,6,7,8,9, 10, 11, 12, 13, 14, 15, 16, 17, 18, 19, 20, 21, 22, 23, 24, 25, 26, 27, 28, 29, 30, 31, 32, 33, 34, 35, 36, 37, 38, 39, 40, 41, 42, 43, 44, 45, 46, 47, 48, 49, 50, 51, 52, 53, 54, 55, 56, 57, 58, 59, 60, 61, 62, or at least 63 nucleotides or base pairs. In some embodiments, a local context of a codon-of-interest may comprise a total of 9 nucleotides. For example, a local context of a codon-of-interest may comprise a 3 nucleotide preceding codon, the 3 nucleotide codon-of-interest, and a 3 nucleotide subsequent codon. For example, a local context of a codon-of-interest may comprise a 3 nucleotide codon upstream of (or 5′ to) the codon-of-interest, the 3 nucleotide codon-of-interest, and a 3 nucleotide codon downstream of (or 3′ to) the codon-of-interest. In some embodiments, a local context of a codon-of-interest may comprise a total of 11 nucleotides. For example, a local context of a codon-of-interest may comprise 4 nucleotides upstream of (or 5′ to) the codon-of-interest, the 3 nucleotide codon-of-interest, and 4 nucleotides downstream of (or 3′ to) the codon-of-interest. In some embodiments, a local context of a codon-of-interest may comprise a total of 15 nucleotides. For example, a local context of a codon-of-interest may comprise two preceding codons, each having 3 nucleotides, the 3 nucleotide codon-of-interest, and two subsequent codons, each having 3 nucleotides. For example, a local context of a codon-of-interest may comprise two codons, each having 3 nucleotides, upstream of (or 5′ to) the codon-of-interest, the 3 nucleotide codon-of-interest, and two codons, each having 3 nucleotides, downstream of (or 3′ to) the codon-of-interest.

[0091] In some embodiments, a local context of a codon-of-interest may comprise

C₍ₙ₋₁₎−Cₙ−C₍ₙ₊₁₎, wherein

C₍ₙ₋₁₎ denotes a codon downstream of the codon-of-interest;
Cₙ denotes the codon-of-interest; and
C₍ₙ₊₁₎ denotes a codon upstream of the codon-of-interest.

[0092] In some embodiments, a local context of a codon-of-interest may comprise

C₍ₙ₋1)−AAₙ−C₍ₙ₊₁₎, wherein

C₍ₙ₋₁₎ denotes a codon downstream of the codon-of-interest;
AAₙ is an amino acid encoded by the codon-of-interest; and
C₍ₙ₊₁₎ denotes a codon upstream of the codon-of-interest.

[0093] In some embodiments, methods described herein may comprise determining a number of occurrences of the local context of the codon-of-interest. In some embodiments, methods described herein may comprise determining a relative synonymous codon usage (RSCU) of the codon-of-interest (Cₙ). In some embodiments, the RSCU may be determined as the frequency of a codon divided by the frequency of all codons encoding the same amino acid.

[0094] In some embodiments, a codon may be selected based on the RSCU value of the codon for a local context. In some embodiments, a codon with an RSCU value of at least about 0.01, at least about 0.05, at least about 0.10, at least about 0.11, at least about 0.12, at least about 0.13, at least about 0.14, at least about 0.15, at least about 0.16, at least about 0.17, at least about 0.18, at least about 0.19, at least about 0.20, at least about 0.21, at least about 0.22, at least about 0.23, at least about 0.24, at least about 0.25, at least about 0.26, at least about 0.27, at least about 0.28, at least about 0.29, at least about 0.30, at least about 0.31, at least about 0.32, at least about 0.33, at least about 0.34, at least about 0.35, at least about 0.36, at least about 0.37, at least about 0.38, at least about 0.39, at least about 0.40, at least about 0.41, at least about 0.42, at least about 0.43, at least about 0.44, at least about 0.45, at least about 0.46, at least about 0.47, at least about 0.48, at least about 0.49, at least about 0.50, at least about 0.51, at least about 0.52, at least about 0.53, at least about 0.54, at least about 0.55, at least about 0.56, at least about 0.57, at least about 0.58, at least about 0.59, at least about 0.60, at least about 0.61, at least about 0.62, at least about 0.63, at least about 0.64, at least about 0.65, at least about 0.66, at least about 0.67, at least about 0.68, at least about 0.69, at least about 0.70, at least about 0.71, at least about 0.72, at least about 0.73, at least about 0.74, at least about 0.75, at least about 0.76, at least about 0.77, at least about 0.78, at least about 0.79, at least about 0.80, at least about 0.81, at least about 0.82, at least about 0.83, at least about 0.84, at least about 0.85, at least about 0.86, at least about 0.87, at least about 0.88, at least about 0.89, or at least about 0.90, at least about 0.91, at least about 0.92, at least about 0.93, at least about 0.94, at least about 0.95, at least about 0.96, at least about 0.97, at least about 0.98, at least about 0.99, or about 1.00 may be selected. In some embodiments, a codon with the highest RSCU value for a local context may be selected.

[0095] In some embodiments, methods described herein may comprise determining an expected number of occurrences of the local context of the codon-of-interest. In some embodiments, the expected number of occurrences of the first local context of the codon-of-interest is determined as a product of: a number of occurrences of the second local context of the codon-of-interest, and the determined RCSU of the codon-of-interest. In some embodiments, the expected number of occurrences of C₍ₙ₋₁₎−Cₙ−C₍ₙ₊₁₎ is determined as:

(a number of occurrences of C₍ₙ₋₁₎−AAₙ−C₍ₙ₊₁₎)X(RCSU of theCₙ).

[0096] In some embodiments, methods described herein may comprise identifying a statistically significant evolutionary signal. In some embodiments, statistically significant evolutionary signals may comprise a negative evolutionary selection signal, a positive evolutionary selection signal, or a combination thereof. For example, the negative selection signal may include, but is not limited to, a frameshift, a ribosome stall, or a secondary RNA structure interfering with transcription and/or translation. For example, the positive selection signal may include, but is not limited to, a regulatory element within an open reading frame (ORF).

tRNA Removal & Supplementation

[0097] In some embodiments, methods described herein may comprise removing or supplementing one or more tRNAs with corresponding codons to one or more codons to be rewritten or replaced. In some embodiments, methods described herein may comprise supplementing the ones that may be oversubscribed as a function of replacement strategy

[0098] In some embodiments, performing genome design may comprise removing codons and corresponding tRNAs for rewriting and/or replacement. For example, codons may be rewritten synonymously and tRNAs with complementary anticodons may be deleted as part of the genome design (e.g., deleting tRNA genes). In this embodiment, deleting one or more tRNA genes prior to rewriting the entire genome may cause slow growth or lethality of an organism. In some embodiments, tRNA genes may be provided on a plasmid or chromosomal region that may be removed at the final step of genome rewriting or strain construction.

[0099] In some embodiments, additional tRNAs with anticodons recognizing the newly assigned codons (i.e., codons encoding a newly assigned amino acid or an ncAA) may be provided. In some embodiments, the total number of tRNA genes deleted can be determined, and the copy number of the remaining tRNA genes for an amino acid can be increased by the same amount. In some embodiments, wobble rules can be used to identify the tRNA genes responsible for decoding the replacement codons, and copy number increases can be allocated proportionally. In some embodiments, one or more non-native tRNA genes may be introduced. For example, for leucine, tL(AAG) from Candida species may be introduced.

### Nucleic Acid Construction and Replacing Genome

[0100] In some aspects, methods described herein may comprise synthesizing a nucleic acid construct comprising one or more codons rewritten based on codon rewriting/replacement methods described herein. In some embodiments, any known methods in the art can be used to synthesize the nucleic acid construct comprising one or more codons rewritten based on codon rewriting/replacement methods described herein. In some embodiments, a chromosome can be computationally divided into 30-60 kilobase long constructs, each comprising a set of segments that is less than about 10 kilobase in length. Each segment can be synthesized using any known methods in the art, e.g., a polymerase chain reaction (PCR), and/or restriction enzyme digestion/ligation. In some embodiments, these segments can be assembled into a construct by restriction enzyme cutting and ligation in vitro, or any other methods known in the art. In some embodiments, the construct can be sequenced to confirm the sequence of the nucleic acid construct and subsequently integrated into the host genome, e.g., an yeast genome, using any known methods in the art to replace the corresponding portion, region, or segment of the wile-type.

[0101] In some aspects, methods described herein may further comprise replacing a portion of a genome with a nucleic acid construct comprising one or more codons rewritten based on codon rewriting/replacement methods described herein. In some embodiments, site-specific nucleases (SSNs) or homology-directed recombination (HR) can be used to replace a portion of a genome. In some embodiments, HR can be used utilizing an endogenous homologous recombination machinery. In some embodiments, a yeast homologous recombination machinery can be used as detailed in Example 6.

[0102] In some embodiments, SSN may comprise meganucleases, zinc-finger nucleases (ZFN), TAL effector nucleases (TALEN), and clustered regularly interspaced short palindromic repeats (CRISPR)/CRISPR-associated (Cas) system. These four major classes of gene-editing techniques, namely, meganucleases, ZFNs, TALENs, CRISPR/Cas systems share a common mode of action in binding a user-defined sequence of DNA and mediating a double-stranded DNA break (DSB). DSB may then be repaired by HR, an event that introduces the homologous sequence from a donor DNA fragment, or by non-homologous end joining (NHEJ), when there is no donor DNA present.

[0103] CRISPR-Cas system may be used with a guide target sequence for genetic screening, targeted transcriptional regulation, targeted knock-in, and targeted genome editing, including base editing, epigenetic editing, and introducing double strand breaks (DSBs) for homologous recombination-mediated insertion of a nucleotide sequence. CRISPR-Cas system comprises an endonuclease protein whose DNA-targeting specificity and cutting activity can be programmed by a short guide RNA or a duplex crRNA/TracrRNA. A CRISPR endonuclease comprises a caspase effector nuclease, typically microbial Cas9 and a short guide RNA (gRNA) or a RNA duplex comprising a 18 to 20 nucleotide targeting sequence that directs the nuclease to a location of interest in the genome. Genome editing can refer to the targeted modification of a DNA sequence, including but not limited to, adding, removing, replacing, or modifying existing DNA sequences, and inducing chromosomal rearrangements or modifying transcription regulation elements (e.g., methylation/demethylation of a promoter sequence of a gene) to alter gene expression. As described above CRISPR-Cas system requires a guide system that can locate Cas protein to the target DNA site in the genome. In some instances, the guide system comprises a crispr RNA (crRNA) with a 17-20 nucleotide sequence that is complementary to a target DNA site and a trans-activating crRNA (tracrRNA) scaffold recognized by the Cas protein (e.g., Cas9). The 17-20 nucleotide sequence complementary to a target DNA site is referred to as a spacer while the 17-20 nucleotide target DNA sequence is referred to a protospacer. While crRNAs and tracrRNAs exist as two separate RNA molecules in nature, single guide RNA (sgRNA or gRNA) can be engineered to combine and fuse crRNA and tracrRNA elements into one single RNA molecule. Thus, in one embodiment, the gRNA comprises two or more RNAs, e.g., crRNA and tracrRNA. In another embodiment, the gRNA comprises a sgRNA comprising a spacer sequence for genomic targeting and a scaffold sequence for Cas protein binding. In some instances, the guide system naturally comprises a sgRNA. For example, Cas12a/Cpf1 utilizes a guide system lacking tracrRNA and comprising only a crRNA containing a spacer sequence and a scaffold for Cas12a/Cpf1 binding. While the spacer sequence can be varied depending on a target site in the genome, the scaffold sequence for Cas protein binding can be identical for all gRNAs.

[0104] CRISPR-Cas systems described herein can comprise different CRISPR enzymes. For example, the CRISPR-Cas system can comprise Cas9, Cas12a/Cpf1, Cas12b/C2cl, Cas12c/C2c3, Cas12d/CasY, Cas12e/CasX, Cas12g, Cas12h, or Cas12i. Non-limiting examples of Cas enzymes include, but are not limited to, Cas1, Cas1B, Cas2, Cas3, Cas4, Cas5, Cas5d, Cas5t, Cas5h, Cas5a, Cas6, Cas7, Cas8, Cas8a, Cas8b, Cas8c, Cas9 (also known as Csn1 or Csx12), Cas10, Cas10d, Cas12a/Cpf1, Cas12b/C2cl, Cas12c/C2c3, Cas12d/CasY, Cas12e/CasX, Cas12f/Cas14/C2c10, Cas12g, Cas12h, Cas12i, Cas12k/C2c5, Cas13a/C2c2, Cas13b, Cas13c, Cas13d, C2c4, C2c8, C2c9, Csy1, Csy2, Csy3, Csy4, Cse1, Cse2, Cse3, Cse4, Cse5e, Csc1, Csc2, Csa5, Csn1, Csn2, Csm1, Csm2, Csm3, Csm4, Csm5, Csm6, Cmr1, Cmr3, Cmr4, Cmr5, Cmr6, Csb1, Csb2, Csb3, Csx17, Csx14, Csx1O, Csx16, CsaX, Csx3, Csx1, Csx1S, Csx11, Csf1, Csf2, CsO, Csf4, Csd1, Csd2, Cst1, Cst2, Csh1, Csh2, Csa1, Csa2, Csa3, Csa4, Csa5, GSU0054, Type II Cas effector proteins, Type V Cas effector proteins, Type VI Cas effector proteins, CARF, DinG, homologues thereof, or modified or engineered versions thereof such as dCas9 (endonuclease-dead Cas9) and nCas9 (Cas9 nickase that has inactive DNA cleavage domain). In some cases, the compositions, methods, devices, and systems, described herein, may use the Cas9 nuclease from Streptococcus pyogenes, of which amino acid sequences and structures are well known to those skilled in the art.

[0105] In some aspects, described herein, are methods for contacting a genome from a sample with one or more agents configured to cleave the genome at a locus. In some embodiments, the contacting may occur in vitro. In some embodiments, the contacting may occur in vivo, e.g., in a cell. In some embodiments, the one or more agents comprise a polypeptide, a polynucleotide, or a combination thereof. In some embodiments, the polypeptide comprises an enzyme, e.g., a site-specific nuclease. Examples of a site-specific nuclease are shown above. In some embodiments, a site-specific nuclease comprises an engineered homing endonuclease or meganuclease, a zinc-finger nuclease (ZFN), a transcription activator-like effector nuclease (TALEN), a clustered regularly interspaced short palindromic repeat (CRISPR/Cas), or a combination thereof. In some embodiments, the polynucleotide comprises a guide RNA (gRNA). In some embodiments, the one or more agents comprise a site-specific nuclease and a gRNA (e.g., CRISPR/Cas system).

[0106] Agents described herein can be delivered into cells in vitro or in vivo by art-known methods or as described herein. Delivery methods such as physical, chemical, and viral methods are also known in the art. In some instances, physical delivery methods can be selected from the methods but not limited to electroporation, microinjection, or use of ballistic particles. On the other hand, chemical delivery methods require use of complex molecules such calcium phosphate, lipid, or protein. In some embodiments, viral delivery methods are applied for gene editing techniques using viruses such as but not limited to adenovirus, lentivirus, and retrovirus. In some embodiments, agents described herein can be delivered via a carrier. In some embodiments, agents described herein can be delivered by, e.g., vectors (e.g., viral or non-viral vectors), non-vector based methods (e.g., using naked DNA, DNA complexes, lipid nanoparticles, RNA such as mRNA), or a combination thereof. In some embodiments, a carrier can comprise comprises a vector, a messenger RNA (mRNA), double stranded DNA (dsDNA), single stranded DNA (ssDNA), or a plasmid. In some embodiments, agents can be delivered directly to cells as naked DNA or RNA, for instance by means of transfection or electroporation, or can be conjugated to molecules (e.g., N-acetylgalactosamine) promoting uptake by cells.

[0107] In some embodiments, vectors can comprise one or more sequences encoding one or more agents described herein. Vectors can also comprise a sequence encoding a signal peptide (e.g., for nuclear localization, nucleolar localization, or mitochondrial localization), associated with (e.g., inserted into or fused to) a sequence coding for a protein. As one example, vectors can include a Cas9 coding sequence that includes one or more nuclear localization sequences (e.g., a nuclear localization sequence from SV40). Vectors described herein can also include any suitable number of regulatory/control elements, e.g., promoters, enhancers, introns, polyadenylation signals, Kozak consensus sequences, or internal ribosome entry sites (IRES). These elements are well known in the art. Vectors described herein may include recombinant viral vectors. Any viral vectors known in the art can be used. Examples of viral vectors include, but are not limited to lentivirus (e.g., HIV and FIV-based vectors), Adenovirus (e.g., AD100), Retrovirus (e.g., Maloney murine leukemia virus, MML-V), herpesvirus vectors (e.g., HSV-2), and Adeno-associated viruses (AAVs), or other plasmid or viral vector types. In some embodiments, agents described herein may be delivered in one carrier (e.g., one vector). In some embodiments, agents described herein may be delivered in in multiple carriers (e.g., multiple vectors).

[0108] In addition, viral particles can be used to deliver agents in nucleic acid and/or peptide form. For example, “empty” viral particles can be assembled to contain any suitable cargo. Viral vectors and viral particles can also be engineered to incorporate targeting ligands to alter target tissue specificity. Non-viral vectors can be also used to deliver agents according to the present disclosure. One example of non-viral nucleic acid vectors is an nanoparticle, which can be organic or inorganic. Nanoparticles are well known in the art. Any suitable nanoparticle design can be used to deliver agents described herein (e.g., nucleic acids encoding such agents).

[0109] In some embodiments, agents described herein can be delivered as a ribonucleoprotein (RNP) to cells. An RNP may comprise a nucleic acid binding protein, e.g., Cas9, in a complex with a gRNA targeting a genome/locus/sequence of interest. RNPs can be delivered to cells using known methods in the art, including, but not limited to electroporation, nucleofection, or cationic lipid-mediated methods, for example, as reported by Zuris, J. A. et al., 2015, Nat. Biotechnology, 33(1):73-80.

### Machine Learning-Based Computer Systems

[0110] In some aspects, methods described herein may comprise utilizing a machine learning-based computer system. In some embodiments, machine learning-based computer systems described herein may comprise one or more storage units comprising, respectively, one or more storage devices included within respective storage arrays controlled by a respective one or more storage controllers; and one or more computer processing units, wherein the one or more computer processing units are configured to communicate with the one or more storage units over a communication interface.

[0111] In some embodiments, the machine learning-based computer system provides the plurality of intermediate scores to a machine learning algorithm that processes the plurality of intermediate scores to generate the rewritten codons (e.g., the first plurality of codons that are selected to be rewritten into a second codon). The machine learning algorithm may comprise a function that determines how intermediate scores are combined and weighted. The machine learning algorithm may comprise a supervised machine learning algorithm. The supervised machine learning algorithm may be trained on prior data from a reference genome, or on prior data from multiple genomes. The prior data may include observed fitness values for genomes, including growth rates on different media. The machine learning-based computer system can train the supervised machine learning algorithm by providing examples of fitness values to an untrained or partially trained version of the algorithm to generate replacement codons for one or more of the input genomes or of a different genome. The system can compare the predicted fitness to the measured fitness (i.e., whether the cell growth rate was maintained), and if there is a difference, the system can perform training at least in part by updating the parameters of the supervised machine learning algorithm. The supervised machine learning algorithm may comprise a regression algorithm, a support vector machine, a decision tree, a neural network, or the like. In cases in which the machine learning algorithm comprises a regression algorithm, the weights may be regression parameters. The supervised machine learning algorithm may comprise a classifier or a predictor that determines a prediction of which replacement codons (e.g., selected from among a plurality of possible replacement codons) are least likely to result in a fitness deficit. The predictor may generate a fitness risk score that is indicative of a likelihood of being indicative of a fitness risk (e.g., probabilistic fitness risk score between 0 and 1). In some cases, the machine learning-based computer system may map the probabilistic risk score to a qualitative risk category (e.g., selected from among a plurality of risk categories). For example, a fitness risk score that is at least 0.5 may be considered a high risk, while a fitness risk score that is less than 0.5 may be considered a low risk. Alternatively, the supervised machine learning algorithm may be a multi-class classifier (e.g., binary classifier) that predicts a qualitative risk category directly.

[0112] The machine learning algorithm may be comprise unsupervised machine learning algorithm. The unsupervised machine learning algorithm may identify patterns in a genome or multiple genomes of interest. For example, it may identify a set of codon usage contexts that are an outlier as compared to other sets of codon usage for the same amino acid. If the unsupervised machine learning algorithm determines that a particular context-dependent codon usage is an outlier, the machine learning-based computer system may determine that relying on genome-wide codon usage for codon selection may lead to a fitness deficit. On the other hand, a set of codon usage scores that is consistent with overall codon usage for the genome may indicate that codon replacement has lower risk of generating a fitness defect. The unsupervised machine learning algorithm may comprise a clustering algorithm, an isolation forest, an autoencoder, or the like.

### Trained Algorithms

[0113] In some aspects, methods and systems described herein may employ one or more trained algorithms. The trained algorithm(s) may process or operate on one or more datasets comprising information about a codon-of-interest, a codon upstream of (or 5′ to) the codon-of-interest, a codon downstream of (or 3′ to) the codon-of-interest, or any combination thereof. In some embodiments, the datasets comprise structural or sequence information about codons. In some embodiments, the datasets comprise one or more datasets of codons. The one or more datasets may be observed empirically, derived from computational studies, be derived from or retrieved from one or more databases, be artificially generated (e.g., as in silico variants of empirically observed datasets), or any combination thereof.

[0114] The trained algorithm may comprise an unsupervised machine learning algorithm. The trained algorithm may comprise a supervised machine learning algorithm. The trained algorithm may comprise a classification and regression tree (CART) algorithm. The supervised machine learning algorithm may comprise, for example, a Random Forest, a support vector machine (SVM), a neural network, or a deep learning algorithm. The trained algorithm may comprise a self-supervised machine learning algorithm. The trained algorithm may comprise a statistical model, statistical analysis, or statistical learning.

[0115] In some embodiments, a machine learning algorithm (or software module) of a platform as described herein utilizes one or more neural networks. In some embodiments, a neural network is a type of computational system that can learn the relationships between an input dataset and a target dataset. A neural network may be a software representation of a human neural system (e.g., cognitive system), intended to capture “learning” and “generalization” abilities as used by a human. In some embodiments, the machine learning algorithm (or software module) comprises a neural network comprising a convolutional neural network (CNN). Non-limiting examples of structural components of embodiments of the machine learning software described herein include: CNNs, recurrent neural networks, dilated CNNs, fully-connected neural networks, deep generative models, and Boltzmann machines.

[0116] In some embodiments, a neural network comprises a series of layers termed “neurons.” In some embodiments, a neural network comprises an input layer, to which data is presented; one or more internal, and/or “hidden”, layers; and an output layer. A neuron may be connected to neurons in other layers via connections that have weights, which are parameters that control the strength of the connection. The number of neurons in each layer may be related to the complexity of the problem to be solved. The minimum number of neurons required in a layer may be determined by the problem complexity, and the maximum number may be limited by the ability of the neural network to generalize. The input neurons may receive data being presented and then transmit that data to the first hidden layer through connections' weights, which are modified during training. The first hidden layer may process the data and transmit its result to the next layer through a second set of weighted connections. Each subsequent layer may “pool” the results from a set of the previous layers into more complex relationships. In addition, whereas some software programs require writing specific instructions to perform a task, neural networks are programmed by training them with a known sample set and allowing them to modify themselves during (and after) training so as to provide a desired output such as an output value (e.g., predicted value). After training, when a neural network is presented with new input data, it generalizes what was “learned” during training and applies what was learned from training to the new, previously unseen, input data in order to generate an output associated with that input (e.g., a predicted value). The output may be generated in order to minimize an expected error or loss function between the output value and an expected value.

[0117] In some embodiments, the neural network comprises artificial neural networks (ANNs). ANNs may be machine learning algorithms that may be trained to map an input dataset to an output dataset, where the ANN comprises an interconnected group of nodes organized into multiple layers of nodes. For example, the ANN architecture may comprise at least an input layer, one or more hidden layers, and an output layer. The ANN may comprise any total number of layers, and any number of hidden layers, where the hidden layers function as trainable feature extractors that allow mapping of a set of input data to an output value or set of output values. As used herein, a deep learning algorithm (such as a deep neural network, or DNN) is an ANN comprising a plurality of hidden layers, e.g., two or more hidden layers. Each layer of the neural network may comprise a number of nodes (or “neurons”). A node receives a set of inputs that are retrieved from either directly from the input data or the output of nodes in previous layers, and performs a specific operation, e.g., a summation operation, on the set of inputs. A connection from an input to a node is associated with a weight (or weighting factor). The node may determine a sum of the products of all pairs of inputs and their associated weights. The weighted sum may be offset with a bias. The output of a node or neuron may be gated using a threshold or activation function. The activation function may be a linear or non-linear function. The activation function may be, for example, a rectified linear unit (ReLU) activation function, a Leaky ReLU activation function, or other function such as a saturating hyperbolic tangent, identity, binary step, logistic, arctan, softsign, parametric rectified linear unit, exponential linear unit, softplus, bent identity, softexponential, sinusoid, sine, Gaussian, or sigmoid function, or any combination thereof.

[0118] The weighting factors, bias values, and threshold values, or other computational parameters of the neural network, may be “taught” or “learned” in a training phase using one or more sets of training data. For example, the parameters may be trained using the input data from a training dataset and a gradient descent or backward propagation method so that the output value(s) that the ANN determines are consistent with the examples included in the training dataset.

[0119] The number of nodes used in the input layer of the ANN or DNN may be at least about 10, 50, 100, 200, 300, 400, 500, 600, 700, 800, 900, 1,000, 2,000, 3,000, 4,000, 5,000, 6,000, 7,000, 8,000, 9,000, 10,000, 20,000, 30,000, 40,000, 50,000, 60,000, 70,000, 80,000, 90,000, 100,000, or greater. In other instances, the number of node used in the input layer may be at most about 100,000, 90,000, 80,000, 70,000, 60,000, 50,000, 40,000, 30,000, 20,000, 10,000, 9,000, 8,000, 7,000, 6,000, 5,000, 4,000, 3,000, 2,000, 1,000, 900, 800, 700, 600, 500, 400, 300, 200, 100, 50, 10, or fewer. In some instances, the total number of layers used in the ANN or DNN (including input and output layers) may be at least about 3, 4, 5, 10, 15, 20, or greater. In other instances, the total number of layers may be at most about 20, 15, 10, 5, 4, 3, or fewer.

[0120] In some instances, the total number of learnable or trainable parameters, e.g., weighting factors, biases, or threshold values, used in the ANN or DNN may be at least about 10, 50, 100, 200, 300, 400, 500, 600, 700, 800, 900, 1,000, 2,000, 3,000, 4,000, 5,000, 6,000, 7,000, 8,000, 9,000, 10,000, 20,000, 30,000, 40,000, 50,000, 60,000, 70,000, 80,000, 90,000, 100,000, or greater. In other instances, the number of learnable parameters may be at most about 100,000, 90,000, 80,000, 70,000, 60,000, 50,000, 40,000, 30,000, 20,000, 10,000, 9,000, 8,000, 7,000, 6,000, 5,000, 4,000, 3,000, 2,000, 1,000, 900, 800, 700, 600, 500, 400, 300, 200, 100, 50, 10, or fewer.

[0121] In some embodiments of a machine learning software module as described herein, a machine learning software module comprises a neural network such as a deep CNN. In some embodiments in which a CNN is used, the network is constructed with any number of convolutional layers, dilated layers, or fully-connected layers. In some embodiments, the number of convolutional layers is between 1-10, and the number of dilated layers is between 0-10. The total number of convolutional layers (including input and output layers) may be at least about 1, 2, 3, 4, 5, 10, 15, 20, or greater, and the total number of dilated layers may be at least about 1, 2, 3, 4, 5, 10, 15, 20, or greater. The total number of convolutional layers may be at most about 20, 15, 10, 5, 4, 3, or fewer, and the total number of dilated layers may be at most about 20, 15, 10, 5, 4, 3, or fewer. In some embodiments, the number of convolutional layers is between 1-10 and the fully-connected layers between 0-10. The total number of convolutional layers (including input and output layers) may be at least about 1, 2, 3, 4, 5, 10, 15, 20, or greater, and the total number of fully-connected layers may be at least about 1, 2, 3, 4, 5, 10, 15, 20, or greater. The total number of convolutional layers may be at most about 20, 15, 10, 5, 4, 3, 2, 1, or less, and the total number of fully-connected layers may be at most about 20, 15, 10, 5, 4, 3, 2, 1, or fewer.

[0122] In some embodiments, the input data for training of the ANN may comprise a variety of input values depending whether the machine learning algorithm is used for processing sequence or structural data. In some embodiments, the ANN or deep learning algorithm may be trained using one or more training datasets comprising the same or different sets of input and paired output data.

[0123] In some embodiments, a machine learning software module comprises a neural network comprising a CNN, recurrent neural network (RNN), dilated CNN, fully-connected neural networks, deep generative models, and deep restricted Boltzmann machines.

[0124] In some embodiments, a machine learning algorithm comprises CNNs. The CNN may be deep and feedforward ANNs. The CNN may be applicable to analyzing visual imagery. The CNN may comprise an input, an output layer, and multiple hidden layers. The hidden layers of a CNN may comprise convolutional layers, pooling layers, fully-connected layers, and normalization layers. The layers may be organized in 3 dimensions: width, height, and depth.

[0125] The convolutional layers may apply a convolution operation to the input and pass results of the convolution operation to the next layer. For processing sequence data, the convolution operation may reduce the number of free parameters, allowing the network to be deeper with fewer parameters. In neural networks, each neuron may receive input from some number of locations in the previous layer. In a convolutional layer, neurons may receive input from only a restricted subarea of the previous layer. The convolutional layer's parameters may comprise a set of learnable filters (or kernels). The learnable filters may have a small receptive field and extend through the full depth of the input volume. During the forward pass, each filter may be convolved across the length of the input sequence, determine the dot product between the entries of the filter and the input, and produce a two-dimensional activation map of that filter. As a result, the network may learn filters that activate when it detects some specific type of feature at some spatial position in the input.

[0126] In some embodiments, the pooling layers comprise global pooling layers. The global pooling layers may combine the outputs of neuron clusters at one layer into a single neuron in the next layer. For example, max pooling layers may use the maximum value from each of a cluster of neurons in the prior layer; and average pooling layers may use the average value from each of a cluster of neurons at the prior layer.

[0127] In some embodiments, the fully-connected layers connect every neuron in one layer to every neuron in another layer. In neural networks, each neuron may receive input from some number locations in the previous layer. In a fully-connected layer, each neuron may receive input from every element of the previous layer.

[0128] In some embodiments, the normalization layer is a batch normalization layer. The batch normalization layer may improve the performance and stability of neural networks. The batch normalization layer may provide any layer in a neural network with inputs that are zero mean/unit variance. The advantages of using batch normalization layer may include faster trained networks, higher learning rates, easier to initialize weights, more activation functions viable, and simpler process of creating deep networks.

[0129] In some embodiments, a machine learning software module comprises a recurrent neural network software module. A recurrent neural network software module may receive sequential data as an input, such as consecutive data inputs, and the recurrent neural network software module updates an internal state at every time step. A recurrent neural network can use internal state (memory) to process sequences of inputs. The recurrent neural network may be applicable to tasks such as codon selection. The recurrent neural network may also be applicable to next codon prediction, and codon usage anomaly detection. A recurrent neural network may comprise fully recurrent neural network, independently recurrent neural network, Elman networks, Jordan networks, Echo state, neural history compressor, long short-term memory, gated recurrent unit, multiple timescales model, neural Turing machines, differentiable neural computer, and neural network pushdown automata.

[0130] In some embodiments, a machine learning software module comprises a supervised or unsupervised learning method such as, for example, support vector machines (“SVMs”), random forests, clustering algorithm (or software module), gradient boosting, linear regression, logistic regression, and/or decision trees. The supervised learning algorithms may be algorithms that rely on the use of a set of labeled, paired training data examples to infer the relationship between an input data and output data. The unsupervised learning algorithms may be algorithms used to draw inferences from training datasets to the output data. The unsupervised learning algorithm may comprise cluster analysis, which may be used for exploratory data analysis to find hidden patterns or groupings in process data. One example of unsupervised learning method may comprise principal component analysis. The principal component analysis may comprise reducing the dimensionality of one or more variables. The dimensionality of a given variable may be at least 1, 5, 10, 50, 100, 200, 300, 400, 500, 600, 700, 800, 900, 1,000, 1,100, 1,200, 1,300, 1,400, 1,500, 1,600, 1,700, 1,800, or greater. The dimensionality of a given variables may be at most 1,800, 1,700, 1,600, 1,500, 1,400, 1,300, 1,200, 1,100, 1,000, 900, 800, 700, 600, 500, 400, 300, 200, 100, 50, 10, or fewer.

[0131] In some embodiments, the machine learning algorithm may comprise reinforcement learning algorithms. The reinforcement learning algorithm may be used for optimizing Markov decision processes (i.e., mathematical models used for studying a wide range of optimization problems where future behavior cannot be accurately predicted from past behavior alone, but rather also depends on random chance or probability). One example of reinforcement learning may be Q-learning. Reinforcement learning algorithms may differ from supervised learning algorithms in that correct training data input/output pairs are not presented, nor are sub-optimal actions explicitly corrected. The reinforcement learning algorithms may be implemented with a focus on real-time performance through finding a balance between exploration of possible outcomes (e.g., correct compound identification) based on updated input data and exploitation of past training.

[0132] In some embodiments, training data resides in a cloud-based database that is accessible from local and/or remote computer systems on which the machine learning-based sensor signal processing algorithms are running. The cloud-based database and associated software may be used for archiving electronic data, sharing electronic data, and analyzing electronic data. In some embodiments, training data generated locally may be uploaded to a cloud-based database, from which it may be accessed and used to train other machine learning-based detection systems at the same site or a different site.

[0133] The trained algorithm may accept a plurality of input variables and produce one or more output variables based on the plurality of input variables. The input variables may comprise one or more datasets of codons. For example, the input variables may comprise information about a codon-of-interest, a codon upstream of (or 5′ to) the codon-of-interest, a codon downstream of (or 3′ to) the codon-of-interest, or any combination thereof.

[0134] The trained algorithm may be trained with a plurality of independent training samples. Each of the independent training samples may comprise information about a codon-of-interest, a codon upstream of (or 5′ to) the codon-of-interest, a codon downstream of (or 3′ to) the codon-of-interest, or a combination thereof. The trained algorithm may be trained with at least about 5, at least about 10, at least about 15, at least about 20, at least about 25, at least about 30, at least about 35, at least about 40, at least about 45, at least about 50, at least about 100, at least about 150, at least about 200, at least about 250, at least about 300, at least about 350, at least about 400, at least about 450, at least about 500, at least about 1,000, at least about 1,500, at least about 2,000, at least about 2,500, at least about 3,000, at least about 3,500, at least about 4,000, at least about 4,500, at least about 5,000, at least about, 5,500, at least about 6,000, at least about 6,500, at least about 7,000, at least about 7,500, at least about 8,000, at least about 8,500, at least about 9,000, at least about 9,500, at least about 10,000, or more independent training samples.

[0135] The trained algorithm may associate information about a codon-of-interest, a codon upstream of (or 5′ to) the codon-of-interest, a codon downstream of (or 3′ to) the codon-of-interest, or a combination thereof for the best selection of codons for rewriting/replacement at an accuracy of at least about 50%, at least about 55%, at least about 60%, at least about 65%, at least about 70%, at least about 75%, at least about 80%, at least about 81%, at least about 82%, at least about 83%, at least about 84%, at least about 85%, at least about 86%, at least about 87%, at least about 88%, at least about 89%, at least about 90%, at least about 91%, at least about 92%, at least about 93%, at least about 94%, at least about 95%, at least about 96%, at least about 97%, at least about 98%, at least about 99%, or more. The trained algorithm may be adjusted or tuned to improve a performance or accuracy of determining the prediction or classification. The trained algorithm may be adjusted or tuned by adjusting parameters of the trained algorithm. The trained algorithm may be adjusted or tuned continuously during the training process or after the training process has completed.

[0136] After the trained algorithm is initially trained, a subset of the inputs may be identified as most influential or most important to be included for making high-quality predictions. For example, a subset of the data may be identified as most influential or most important to be included for making high-quality choice for selecting codons for rewriting and/or replacement. The data or a subset thereof may be ranked based on classification metrics indicative of each parameter's influence or importance toward making high-quality selection of codons for rewriting and/or replacement. Such metrics may be used to reduce, in some embodiments significantly, the number of input variables (e.g., predictor variables) that may be used to train the trained algorithm to a desired performance level (e.g., based on a desired minimum accuracy). For example, if training the trained algorithm with a plurality comprising several dozen or hundreds of input variables in the trained algorithm results in an accuracy of classification of more than 99%, then training the trained algorithm instead with only a selected subset of no more than about 5, no more than about 10, no more than about 15, no more than about 20, no more than about 25, no more than about 30, no more than about 35, no more than about 40, no more than about 45, no more than about 50, or no more than about 100 such most influential or most important input variables among the plurality can yield decreased but still acceptable accuracy of classification (e.g., at least about 50%, at least about 55%, at least about 60%, at least about 65%, at least about 70%, at least about 75%, at least about 80%, at least about 81%, at least about 82%, at least about 83%, at least about 84%, at least about 85%, at least about 86%, at least about 87%, at least about 88%, at least about 89%, at least about 90%, at least about 91%, at least about 92%, at least about 93%, at least about 94%, at least about 95%, at least about 96%, at least about 97%, at least about 98%, or at least about 99%). The subset may be selected by rank-ordering the entire plurality of input variables and selecting a predetermined number (e.g., no more than about 5, no more than about 10, no more than about 15, no more than about 20, no more than about 25, no more than about 30, no more than about 35, no more than about 40, no more than about 45, no more than about 50, or no more than about 100) of input variables with the best association metrics.

[0137] Systems and methods as described herein may use more than one trained algorithm to determine an output. Systems and methods may comprise 1, 2, 3, 4, 5, 6, 7, 8, 9, 10, 11, 12, 13, 14, 15, 16, 17, 18, 19, 20, or more trained algorithms. A trained algorithm of the plurality of trained algorithms may be trained on a particular type of data (e.g., sequence data, structural data). Alternatively, a trained algorithm may be trained on more than one type of data. The inputs of one trained algorithm may comprise the outputs of one or more other trained algorithms. Additionally, a trained algorithm may receive as its input the output of one or more trained algorithms. A set of outputs generated using one or more trained algorithms may be combined into a single output (e.g., by determining a sum, an average, a minimum, a maximum, or any other function applied to the set of outputs).

### New Assignment of Rewritten/Replaced Codons

[0138] In some aspects, provided herein, are methods for codon rewriting and replacement. In some embodiments, codons rewritten or replaced can be used to encode a new amino acid. In some embodiments, the new amino acid can be any canonical amino acids. For example, the new amino acid can be alanine, arginine, asparagine, aspartic acid, cysteine, glutamine, glutamic acid, glycine, histidine, isoleucine, leucine, lysine, methionine, phenylalanine, proline, serine, threonine, tryptophan, tyrosine, or valine. In some embodiments, the new amino acid can be a non-canonical amino acid (ncAA).

[0139] In some aspects, provided herein, are methods for genetic code expansion using codon rewriting and replacement. In some embodiments, methods described herein, may enable site-specific, co-translational incorporation of one or more ncAAs into a polypeptide or a protein. In some embodiments, methods described herein can provide transformational approaches to understand and control one or more biological functions. For example, codon rewriting/replacement can allow genetically encoding amino acids corresponding to post-translationally modified versions of natural amino acids. For example, codon rewriting/replacement to allow genetically encoding photocaged amino acids can enable the rapid activation of protein function with light to dissect dynamic processes in cells. For example, codon rewriting/replacement to allow genetically encoding crosslinkers can provide a way to map protein interactions. For example, ncAAs containing fluorophores or other biophysical probes can be used to follow changes in protein structure and/or activity. In some embodiments, ncAAs may be used to alter enzyme function. In some embodiments, ncAAs may be used to trap labile enzyme-substrate intermediates for structural studies and substrate identification. In some embodiments, ncAAs bearing bio-orthogonal and chemically reactive groups may provide strategies for rapidly attaching a wide range of functionalities to proteins to precisely control and image protein function in cells and to create protein conjugates, including defined therapeutic conjugates. In some embodiments, genetic code expansion using codon rewriting and replacement methods described herein may form the basis of strategies for the reversible control of gene expression in animals and strategies for determining cell type-specific proteomes in animals. In some embodiments, genetic code expansion using codon rewriting and replacement methods described herein may allow incorporating multiple distinct ncAAs into polypeptides or proteins.

Non-Canonical Amino Acid (ncAA)

[0140] As used herein, a non-canonical amino acid (ncAA) can refer to any amino acid other than the 20 genetically encoded alpha-amino acids comprising alanine, arginine, asparagine, aspartic acid, cysteine, glutamine, glutamic acid, glycine, histidine, isoleucine, leucine, lysine, methionine, phenylalanine, proline, serine, threonine, tryptophan, tyrosine, or valine. In some aspects, described herein are non-canonical amino acids (ncAAs) that may comprise side chain chemistries and/or structures that are not available from canonical amino acids (cAAs). In some embodiments, ncAAs may comprise fluorinated amino acids or amino acids comprising a reactive group (e.g., carbonyl, alkene, or alkyne moieties), or photoactivatable group (e.g., azide, benzophenone, or fluorophores). Translation of ncAAs into proteins may allow chemical modification and accordingly, ncAAs may be useful for in vivo structure-function studies, protein-protein interaction studies, protein localization studies, protein activity regulation studies or studies to generate new protein function. ncAA can be incorporated in different cells, including, but not limited to bacterial cells (e.g., Escherichia coli), yeast cells (e.g., Saccharomyces cerevisiae, Pichia pastoris, or Candida albicans), mammalian cells and plant cells or in organisms, including, but not limited to Drosophila melanogaster, Caenorhabditis elegans, Bombyx mori, rabbit and cow.

[0141] In some embodiments, a ncAA may comprise Para-fluoro-L-phenylalanine, Para-iodo-L-phenylalanine, Para-azido-L-phenylalanine, Para-acetyl-L-phenylalanine, Para-benzoyl-L-phenylalanine, Meta-fluoro-L-tyrosine, O-methyl-L-tyrosine, Para-propargyloxy-L-phenylalanine, (2S)-2-aminooctanoic acid, (2S)-2-aminononanoic acid, (2S)-2-aminodecanoic acid, (2S)-2-aminohept-6-enoic acid, (2S)-2-aminooct-7-enoic acid, L-Homocysteine, (2S)-2-amino-5-sulfanylpentanoic acid, (2S)-2-amino-6-sulfanylhexanoic acid, L-S-(2-nitrobenzyl) cysteine, L-S-ferrocenyl-cysteine, L-O-crotylserine, L-O-(pent-4-en-1-yl)serine, L-O—(4,5-dimethoxy-2-nitrobenzyl)serine, (2S)-2-amino-3-({[5-(dimethylamino)naphthalen-1-yl]sulfonyl}amino)propanoic acid, (2S)-3-[(6-acetyl-naphthalen-1-yl)amino]-2-aminopropanoic acid, L-Pyrrolysine, N6-[(propargyloxy)carbonyl]-L-lysine, L-N6-acetyllysine, N6-trifluoroacetyl-L-lysine, N6-{[1-(6-nitro-1,3-benzodioxol-5-yl)ethoxy]carbonyl}-L-lysine, N6-{[2-(3-methyl-3H-diaziren-3-yl)ethoxy]carbonyl}-L-lysine, p-azidophenylalanine or 2-aminoisobutyric acid (also known as α-aminoisobutyric acid, AIB, α-methylalanine, or 2-methylalanine).

[0142] In some embodiments, a ncAA may comprise AbK (unnatural amino acid for Photo-crosslinking probe), 3-Aminotyrosine (unnatural amino acid for inducing red shift in fluorescent proteins and fluorescent protein-based biosensors), L-Azidohomoalanine hydrochloride (unnatural amino acid for bio-orthogonal labeling of newly synthesized proteins), L-Azidonorleucine hydrochloride (unnatural amino acid for bio-orthogonal or fluorescent labeling of newly synthesized proteins), BzF (photoreactive unnatural amino acid; photo-crosslinker), DMNB-caged-Serine (caged serine; excited by visible blue light), HADA (blue fluorescent D-amino acid for labeling peptidoglycans in live bacteria), NADA-green (fluorescent D-amino acid for labeling peptidoglycans in live bacteria), NB-caged Tyrosine hydrochloride (ortho-nitrobenzyl caged L-tyrosine), RADA (orange-red TAMRA-based fluorescent D-amino acid for labeling peptidoglycans in live bacteria), Rf470DL (blue rotor-fluorogenic fluorescent D-amino acid for labeling peptidoglycans in live bacteria), sBADA (green fluorescent D-amino acid for labeling peptidoglycans in bacteria), or YADA (green-yellow lucifer yellow-based fluorescent D-amino acid for labeling peptidoglycans in live bacteria).

[0143] In some embodiments, a ncAA may comprise an O-methyl-L-tyrosine, an L-3-(2-naphthyl)alanine, a 3-methyl-phenylalanine, an O—4-allyl-L-tyrosine, a 4-propyl-L-tyrosine, a tri-O-acetyl-GlcNAcβ-serine, an L-Dopa, a fluorinated phenylalanine, an isopropyl-L-phenylalanine, a p-azido-L-phenylalanine, a p-acyl-L-phenylalanine, a p-benzoyl-L-phenylalanine, an L-phosphoserine, a phosphonoserine, a phosphonotyrosine, a p-iodo-phenylalanine, a p-bromophenylalanine, a p-amino-L-phenylalanine, or an isopropyl-L-phenylalanine.

[0144] In some embodiments, a ncAA may comprise an unnatural analogue of a canonical amino acid. For example, a ncAA may comprise an unnatural analogue of a tyrosine amino acid, an unnatural analogue of a glutamine amino acid, an unnatural analogue of a phenylalanine amino acid, an unnatural analogue of a serine amino acid, an unnatural analogue of a threonine amino acid. In some embodiments, a ncAA may comprise an alkyl, aryl, acyl, azido, cyano, halo, hydrazine, hydrazide, hydroxyl, alkenyl, alkynl, ether, thiol, sulfonyl, seleno, ester, thioacid, borate, boronate, phospho, phosphono, phosphine, heterocyclic, enone, imine, aldehyde, hydroxylamine, keto, or amino substituted amino acid, or any combination thereof.

[0145] In some embodiments, a ncAA may comprise an amino acid with a photoactivatable cross-linker, a spin-labeled amino acid, a fluorescent amino acid, an amino acid with a novel functional group, an amino acid that covalently or noncovalently interacts with another molecule, a metal binding amino acid, a metal-containing amino acid, a radioactive amino acid, a photocaged amino acid, a photoisomerizable amino acid, a biotin or biotin-analogue containing amino acid, a glycosylated or carbohydrate modified amino acid, a keto containing amino acid, an amino acid comprising polyethylene glycol, an amino acid comprising polyether, a heavy atom substituted amino acid, a chemically cleavable or photocleavable amino acid, an amino acid with an elongated side chain, an amino acid containing a toxic group, or a sugar substituted amino acid. In some embodiments, a sugar substituted amino acid may comprise a sugar substituted serine. In some embodiments, a ncAA may comprise a carbon-linked sugar-containing amino acid, a redox-active amino acid, an α-hydroxy containing amino acid, an amino thio acid containing amino acid, an α,α disubstituted amino acid, a β-amino acid, or a cyclic amino acid other than proline.

[0146] In some embodiments, a ncAA may comprise p-azidophenylalanine or 2-aminoisobutyric acid (also known as α-aminoisobutyric acid, AIB, α-methylalanine, or 2-methylalanine).

### Orthogonal Translation System

[0147] The ribosome uses tRNA adaptors, aminoacylated with their cognate amino acids by specific aminoacyl-tRNA synthetases (aaRSs), to progressively decode the triplet codons in a coding sequence and polymerize the corresponding sequence of amino acids into a protein. 64 triplet codons are used to encode the 20 canonical amino acids, and the initiation and termination of protein synthesis. In some aspects, codon rewriting and replacement methods described herein may allow reassigning those rewritten codons to encode a new amino acid (referred to as orthogonal codons). In some embodiments, orthogonal codons can be assigned to ncAAs. In some embodiments, each new orthogonal codon must be decoded by an additional aminoacyl-tRNA synthetase (aaRS)/tRNA pair. In some embodiments, these aaRS/tRNA pairs may uniquely decode distinct codons and recognize distinct ncAAs.

[0148] In some aspects, methods described herein may require an orthogonal aaRS/tRNA pairs. In some embodiments, each orthogonal aaRS may aminoacylate its cognate orthogonal tRNA, and/or minimally aminoacylate the other tRNAs in an organism. In some embodiments, the orthogonal tRNA may be aminoacylated by its cognate synthetase and/or minimally be aminoacylated by the aaRSs of the organism. In some embodiments, the orthogonal tRNA may be engineered to recognize an orthogonal codon that is not assigned to a canonical amino acid (i.e., rewritten/replaced codons), while maintaining selective aminoacylation by the orthogonal synthetase. In some embodiments, an active site of the orthogonal synthetase may be engineered.

[0149] In some aspects, provided herein are methods for reassigning a codon to encode an amino acid that the codon does not naturally encode. For example, a codon may be reassigned to a ncAA, i.e., the codon encodes a ncAA instead of an amino acid naturally encoded by the codon. Over 100 ncAAs with diverse chemistries may be synthesized and co-translationally incorporated into polypeptides and proteins using evolved orthogonal aminoacyl-tRNA synthetase (aaRSs)/tRNA pairs. Various aaRS/tRNA pairs can be used for methods described herein. In some embodiments, an ncAA may be designed based on tyrosine or pyrrolysine. In some embodiments, an aaRS/tRNA pair may be provided on a plasmid or into the genome of a cell or an organism comprising one or more reassigned codons. In some embodiments, an orthogonal aaRS/tRNA pair can be used to bioorthogonally incorporate ncAAs into polypeptides or proteins.

[0150] In some embodiments, vector-based over-expression systems may be used. In some embodiments, vector-based over-expression systems may outcompete natural codon function with its reassigned function. In some embodiments where natural aaRS and/or tRNAs for the rewritten codon are completely abolished or removed, lower amount of aaRS/tRNA for the newly assigned ncAA may be sufficient to achieve efficient ncAA incorporation. In some embodiments, genome-based aaRS/tRNA pairs (i.e., aaRS/tRNA pairs incorporated into the genome of the cell or organism) may be used to reduce the mis-incorporation of canonical amino acids in the absence of available ncAAs. In some embodiments, ncAA incorporation into polypeptides or proteins may involve supplementing the growth media with the ncAA described herein and an inducer for the aaRS expression. Alternatively, the aaRS may be expressed constitutively.

[0151] In some embodiments, aaRS/tRNA pairs may be imported from evolutionarily divergent organisms, wherein the sequence has diverged from that of the aaRS/tRNA pairs in the host organism or cell of interest (e.g., archaeal and eukaryotic pairs in an E. coli host). In some embodiments, derivatives of the Methanocaldococcus janaschii tyrosyl-tRNA synthetase (MjTyrRS)/MjtRNA^{Tyr} pair may be used to incorporate a wide variety of ncAAs into polypeptides or proteins. In some embodiments, derivatives of the E. coli leucyl-tRNA synthetase (EcLeuRS)/EctRNA^{Leu}, E. coli tryptophanyl-tRNA synthetase (EcTrpRS)/EctRNA^{Trp}, or EcTyrRS/EctRNA^{Tyr} pairs may be used to incorporate one or more ncAAs into polypeptides or proteins. In some embodiments, EcTyrRS/EctRNA^{Tyr} pair or EcTrpRS/EctRNA^{Trp}pair may be directly evolved for a new ncAA specificity. In some embodiments, endogenous copies of aaRS/tRNA pairs maybe replaced with pairs that are orthogonal in another host organism.

[0152] In some embodiments, evolved derivatives of a Methanococcus maripaludis phosphoseryl-tRNA synthetase (MmpSepRS)/MjtRNA^{Sep} pair may be used to incorporate phosphoserine, its non-hydrolysable analogue, or phosphothreonine. In some embodiments, Methanosarcina mazei pyrrolysyl-tRNA synthetase (MmPylRS)/MmtRNA^{Pyl}CUA pair, Methanosarcina barkeri PylRS (MbPylRS)/MbtRNA^{PYl}_{CUA} pair, or derivatives thereof, may be used to incorporate one or more ncAAs. In some embodiments, Archaeoglobus fulgidus (Af)TyrRS/AffRNA^{Tyr}CUA may be used to incorporate one or more ncAAs. In some embodiments, engineered aaRS/tRNA pairs may be used to incorporate one or more ncAAs.

[0153] An organism or a host organism described herein can be an animal. In some embodiments, the animal may be a mammal. In some embodiments, the mammal comprises a human, non-human primate, rodent, caprine, bovine, ovine, equine, canine, feline, mouse, rat, rabbit, horse or goat. In some embodiments, an organism or a host organism may comprise E. coli, Salmonella enterica subsp. enterica serovar Typhimurium, Saccharomyces cerevisiae, cultured mammalian cells, Arabidopsis thaliana, Caenorhabditis elegans, Drosophila melanogaster or Mus musculus.

[0154] A cell or a host cell described herein can be a bacterial cell, a yeast cell, a fungal cell, an insect cell, or a mammalian cell. In some embodiments, a cell may comprise a mammalian cell. Mammalian cells can be derived or isolated from a tissue of a mammal. In some embodiments, mammalian cells may comprise COS cells, BHK cells, 293 cells, 3T3 cells, NSO hybridoma cells, baby hamster kidney (BHK) cells, PER.C6™ human cells, HEK293 cells or Cricetulus griseus (CHO) cells. In some embodiments, a mammalian cell may comprise a human cell, a rodent cell, or a mouse cell. Examples of mammalian cells can also include but are not limited to cells from humans, non-human primates such as chimpanzees, and other apes and monkey species; farm animals such as cattle, horses, sheep, goats, swine; domestic animals such as rabbits, dogs, and cats; laboratory animals including rodents, such as rats, mice and guinea pigs, and the like. In some embodiments, a mammalian cell is a human cell. In some embodiments, a mammalian cell is a mouse cell. In some embodiments, a mammalian cell comprises an embryonic stem cell (ESC), a pluripotent stem cell (PSC), or an induced pluripotent stem cell (iPSC). In some embodiments, a cell or a host cell may comprise an eukaryotic cell or a prokaryotic cell. In some embodiments, the prokaryotic cell comprises an archaebacteria cell, a bacterial cell, or a combination thereof. In some embodiments, the eukaryotic cell comprises an yeast cell, a fungal cell, a plant cell, an animal cell, an insect cell, a mammalian cell, or a combination thereof. In some embodiments, the mammalian cell comprises a rodent cell, a mouse cell, or a human cell, or a combination thereof.

[0155] Methods for incorporating non-canonical amino acids in yeast are described in, for example, Stieglitz J. T., Van Deventer J. A. (2022) Incorporating, Quantifying, and Leveraging Noncanonical Amino Acids in Yeast. In: Rasooly A., Baker H., Ossandon M. R. (eds) Biomedical Engineering Technologies. Methods in Molecular Biology, vol 2394. Humana, New York, NY (doi.org/10.1007/978-1-0716-1811-0_21), which is incorporated by reference herein in its entirety.

[0156] Applications of proteins with non-canonical amino acids are described in, for example, Jeremiah A Johnson, Ying Y Lu, James A Van Deventer, David A Tirrell, Residue-specific incorporation of non-canonical amino acids into proteins: recent developments and applications,

Current Opinion in Chemical Biology, Volume 14, Issue 6, 2010, Pages 774-780, ISSN 1367-5931, doi.org/10.1016/j.cbpa.2010.09.013 (www.sciencedirect.com/science/article/pii/S1367593110001390), which is incorporated by reference herein in its entirety.

[0157] Examples of orthogonal translation in E. coli with a genome rewritten to exclude a subset of sense codons are described in, for example, Robertson W E, Funke LFH, de la Torre D, Fredens J, Elliott T S, Spinck M, Christova Y, Cervettini D, Böge FL, Liu K C, Buse S, Maslen S, Salmond GPC, Chin JW. Sense codon reassignment enables viral resistance and encoded polymer synthesis. Science. 2021 Jun. 4; 372(6546):1057-1062. doi: 10.1126/science.abg3029. PMID: 34083482; PMCID: PMC7611380, which is incorporated by reference herein in its entirety.

[0158] Additional examples of orthogonal translation are described in, for example, de la Torre, D., Chin, J. W. Reprogramming the genetic code. Nat Rev Genet 22, 169-184 (2021) (doi.org/10.1038/s41576-020-00307-7), which is incorporated by reference herein in its entirety.

Quantitative Reporter Platform to Evaluate ncAA Incorporation

[0159] In some embodiments, a precise plate-based assay using flow cytometry-based endpoint readouts can be used to measure efficiency and fidelity of an orthogonal translation system (as shown in FIG. 5). In some embodiments, a high throughput assay can be used for ncAA incorporation with additional mass spectrometry assays. In some embodiments, a dual reporter system is used for surface display. In some embodiments, a dual reporter system using two fluorescent tags can be employed to evaluate orthogonal evaluation. Details of assays provided herein are described in, for example, Stieglitz, et al. ACS Synth Biol. 2018 Sep. 21; 7(9): 2256-2269 A robust and quantitative report system to evaluate noncanonical amino acid incorporation in yeast, which is incorporated by reference herein in its entirety.

### Other Embodiments

[0160] In some aspects, provided herein, is a method comprising: a) analyzing at least a portion of a genome of an organism to identify a first plurality of codons based on at least in part on a first local context of a codon-of-interest in the genome of the organism to be rewritten; b) rewriting the first plurality of codons in the genome of the organism to a second codon, wherein the first plurality of codons and the second codon encode a first amino acid, and wherein the rewriting of the first plurality of codons modulates an occurrence of the first plurality of codons; and c) synthesizing a nucleic acid construct comprising the portion of the genome, wherein the first plurality of codons is rewritten to the second codon.

[0161] In some embodiments, the method further comprises introducing the nucleic acid construct into a cell of the organism to replace the portion of the genome of the organism. In some embodiments, the modulating of the occurrence of the first plurality of codons comprises eliminating the occurrence of the first plurality of codons. In some embodiments, the analyzing comprises identifying one or more synonymous codons with a least number of occurrences in the genome of the organism. In some embodiments, the first plurality of codons comprises the one or more synonymous codons with the least number of occurrences.

[0162] In some embodiments, the first local context of the codon-of-interest comprises C₍ₙ₋₁₎ Cₙ−C₍ₙ₊₁₎, wherein C₍ₙ₋₁₎ denotes a codon downstream of the codon-of-interest; Cₙ denotes the codon-of-interest; and C₍ₙ₊₁₎ denotes a codon upstream of the codon-of-interest. In some embodiments, the analyzing further comprises determining a number of occurrences of the first local context of the codon-of-interest. In some embodiments, the analyzing further comprises determining a relative synonymous codon usage (RSCU) of the codon-of-interest.

[0163] In some embodiments, the analyzing further comprises identifying the first plurality of codons based at least in part on a second local context of the codon-of-interest in the genome of the organism. In some embodiments, the second local context of the codon-of-interest comprises C₍ₙ₋₁₎−AAₙ−C₍ₙ₊₁₎, wherein C₍ₙ₋₁₎ denotes a codon downstream of the codon-of-interest; AAₙ denotes an amino acid encoded by the codon-of-interest; and C₍ₙ₊₁₎ denotes a codon upstream of the codon-of-interest. In some embodiments, the analyzing further comprises determining a number of occurrences of the second local context of the codon-of-interest. In some embodiments, the analyzing further comprises determining an expected number of occurrences of the first local context of the codon-of-interest. In some embodiments, the expected number of occurrences of the first local context of the codon-of-interest is determined as a product of: a number of occurrences of the second local context of the codon-of-interest, and the determined RCSU of the codon-of-interest.

[0164] In some embodiments, the analyzing comprises processing the at least the portion of the genome of the organism using a machine learning-based computer system. In some embodiments, the machine learning-based computer system comprises one or more storage units comprising, respectively, one or more storage devices included within respective storage arrays controlled by a respective one or more storage controllers; and one or more computer processing units, wherein the one or more computer processing units communicate with the one or more storage units over a communication interface.

[0165] In some embodiments, the analyzing further comprises identifying one or more statistically significant evolutionary signals. In some embodiments, the one or more statistically significant evolutionary signals comprise a negative evolutionary selection signal, a positive evolutionary selection signal, or a combination thereof. In some embodiments, the negative selection signal comprises a frameshift, a ribosome stall, or a secondary RNA structure interfering with transcription or translation. In some embodiments, the positive selection signal comprises a regulatory element within an open reading frame (ORF).

[0166] In some embodiments, the method further comprises reassigning the first plurality of codons to a second amino acid. In some embodiments, the first amino acid or the second amino acid comprises alanine, cysteine, aspartic acid, glutamic acid, phenylalanine, glycine, histidine, isoleucine, lysine, leucine, methionine, asparagine, proline, glutamine, arginine, serine, threonine, valine, tryptophan, or tyrosine. In some embodiments, the first amino acid comprises arginine, leucine, or serine. In some embodiments, the first plurality of codons comprises CGT, CGC, CGA, CGG, AGA, AGG, or a combination thereof. In some embodiments, the first plurality of codons comprises CGA, CGG, or a combination thereof. In some embodiments, the first plurality of codons comprises TTA, TTG, CTT, CTC, CTA, CTG, or a combination thereof. In some embodiments, the first plurality of codons comprises CTA, CTG, or a combination thereof. In some embodiments, the first plurality of codons comprises TCT, TCC, TCA, TCG, AGT, AGC, or a combination thereof. In some embodiments, the first plurality of codons comprises AGT, AGC, TCG, TCA, or a combination thereof.

[0167] In some embodiments, the rewriting further comprises removing a plurality of tRNA molecules with anticodons that recognize the first plurality of codons. In some embodiments, the removing comprises deleting one or more genes that encode the plurality of tRNA molecules that recognize the first plurality of codons. In some embodiments, the method further comprises providing additional tRNA molecules that recognize the first plurality of codons and aminoacyl-tRNA synthetases (aaRSs) for charging the additional tRNA molecules with the second amino acid. In some embodiments, the method further comprises providing a tRNA pre-charged with the second amino acid.

[0168] In some embodiments, the second amino acid comprises a non-canonical amino acid. In some embodiments, the non-canonical amino acid comprises p-azidophenylalanine, 2-aminoisobutyric acid (Aib), or a combination thereof.

[0169] In some embodiments, the rewriting of the first plurality of codons comprises modulating one or more codons in the first plurality of codons, wherein the one or more codons are within 4 codons of each other. In some embodiments, the rewriting of the first plurality of codons comprises modulating a codon fragment of one or more codons in the first plurality of codons. In some embodiments, the codon fragment comprises a trimer, a hexamer, a 9 mer, or a combination thereof.

[0170] In some aspects, provided herein, is a method of producing a polypeptide comprising a non-canonical amino acid (ncAA) or a population of polypeptide molecules comprising the ncAA in an organism, the method comprising: rewriting a first codon encoding a first amino acid to a second codon encoding the first amino acid in a genome of the organism, wherein the rewriting comprises identifying the first codon based at least in part on a first local context of a codon-of-interest in the genome of the organism; reassigning the first codon to encode the ncAA in the genome of the organism; and introducing into the organism an aminoacyl-tRNA synthetase (aaRS)/tRNA pair engineered to recognize the first codon and incorporate the ncAA into an amino acid sequence of the polypeptide or the population of the polypeptide molecules.

[0171] In some embodiments, the first codon has a least number of occurrences for the first amino acid in the genome of the organism. In some embodiments, the first local context of the codon-of-interest comprises C₍ₙ₋₁₎−Cₙ−C₍ₙ₊₁₎, wherein C₍ₙ₋₁₎ denotes a codon downstream of the codon-of-interest; Cₙ denotes the codon-of-interest; and C₍ₙ₊₁₎ denotes a codon upstream of the codon-of-interest. In some embodiments, the rewriting comprises determining a number of occurrences of the first local context of the codon-of-interest. In some embodiments, the rewriting further comprises determining a relative synonymous codon usage (RSCU) of the codon-of-interest.

[0172] In some embodiments, the rewriting further comprises identifying the first codon based at least in part on a second local context of the codon-of-interest in the genome of the organism. In some embodiments, the second local context of the codon-of-interest comprises C₍ₙ₋₁₎−AAₙ−C₍ₙ₊₁₎, wherein C₍ₙ₋₁₎ denotes a codon downstream of the codon-of-interest; AAₙ denotes an amino acid encoded by the codon-of-interest; and C₍ₙ₊₁₎ denotes a codon upstream of the codon-of-interest. In some embodiments, the rewriting further comprises determining a number of occurrences of the second local context of the codon-of-interest. In some embodiments, the rewriting further comprises determining an expected number of occurrences of the first local context of the codon-of-interest. In some embodiments, the expected number of occurrences of the first local context of the codon-of-interest is determined as a product of: a number of occurrences of the second local context of the codon-of-interest, and the determined RCSU of the codon-of-interest.

[0173] In some embodiments, the rewriting comprises analyzing at least a portion of the genome of the organism using a machine learning-based computer system. In some embodiments, the machine learning-based computer system comprises one or more storage units comprising, respectively, one or more storage devices included within respective storage arrays controlled by a respective one or more storage controllers; and one or more computer processing units, wherein the one or more computer processing units communicate with the one or more storage units over a communication interface.

[0174] In some embodiments, the method further comprises identifying one or more statistically significant evolutionary signals. In some embodiments, the one or more statistically significant evolutionary signals comprises a negative evolutionary selection signal, a positive evolutionary selection signal, or a combination thereof. In some embodiments, the negative selection signal comprises a frameshift, a ribosome stall, or a secondary RNA structure interfering with transcription or translation. In some embodiments, the positive selection signal comprises a regulatory element within an open reading frame (ORF).

[0175] In some embodiments, the first amino acid comprises alanine, cysteine, aspartic acid, glutamic acid, phenylalanine, glycine, histidine, isoleucine, lysine, leucine, methionine, asparagine, proline, glutamine, arginine, serine, threonine, valine, tryptophan, or tyrosine. In some embodiments, the first amino acid comprises arginine, leucine, or serine. In some embodiments, the first codon or the second codon comprises CGT, CGC, CGA, CGG, AGA, AGG, or a combination thereof. In some embodiments, the first codon comprises CGA, CGG, or a combination thereof. In some embodiments, the first codon or the second codon comprises TTA, TTG, CTT, CTC, CTA, CTG, or a combination thereof. In some embodiments, the first codon comprises CTA, CTG, or a combination thereof. In some embodiments, the first codon or the second codon comprises TCT, TCC, TCA, TCG, AGT, AGC, or a combination thereof. In some embodiments, the first codon comprises AGT, AGC, TCG, TCA, or a combination thereof.

[0176] In some embodiments, the first codon comprises a plurality of codons. In some embodiments, the rewriting further comprises removing a plurality of tRNA molecules that recognize the first codon. In some embodiments, the removing comprises deleting one or more genes that encode the plurality of tRNA molecules that recognize the first codon. In some embodiments, the introducing further comprises providing a tRNA pre-charged with the ncAA. In some embodiments, the ncAA comprises p-azidophenylalanine, 2-aminoisobutyric acid (Aib), or a combination thereof.

[0177] In some aspects, provided herein, is a method of producing a peptide, the method comprising editing a genome of an organism, wherein the editing comprises revising a codon of the genome to encode a non-canonical amino acid, wherein the peptide comprises the non-canonical amino acid.

[0178] In some aspects, provided herein, is a cell or a population of cells comprising a genome, wherein a first plurality of codons in the genome of the organism is rewritten to a second codon, wherein the first plurality of codons and the second codon encode a first amino acid, and wherein an occurrence of the first plurality of codons is modulated responsive to being rewritten to the second codon.

[0179] In some embodiments, the occurrence of the first plurality of codons is eliminated. In some embodiments, the first plurality of codons is reassigned to a second amino acid. In some embodiments, the first plurality of codons is identified based on a first plurality of codons based on at least in part on a first local context of a codon-of-interest.

[0180] In some embodiments, the first local context of the codon-of-interest comprises C₍ₙ₋₁₎ Cₙ−C₍ₙ₊₁₎, wherein C₍ₙ₋₁₎ denotes a codon downstream of the codon-of-interest; Cₙ denotes the codon-of-interest; and C₍ₙ₊₁₎ denotes a codon upstream of the codon-of-interest. In some embodiments, the identifying comprises determining a number of occurrences of the first local context of the codon-of-interest. In some embodiments, the identifying further comprises determining a relative synonymous codon usage (RSCU) of the codon-of-interest.

[0181] In some embodiments, the first plurality of codons is further identified based at least in part on a second local context of the codon-of-interest in the genome of the organism. In some embodiments, the second local context of the codon-of-interest comprises C₍ₙ₋₁₎−AAₙ C₍ₙ₊₁₎, wherein C₍ₙ₋₁₎ denotes a codon downstream of the codon-of-interest; AAₙ denotes an amino acid encoded by the codon-of-interest; and C₍ₙ₊₁₎ denotes a codon upstream of the codon-of-interest.

[0182] In some embodiments, the identifying further comprises determining a number of occurrences of the second local context of the codon-of-interest. In some embodiments, the identifying further comprises determining an expected number of occurrences of the first local context of the codon-of-interest. In some embodiments, the expected number of occurrences of the first local context of the codon-of-interest is determined as a product of: a number of occurrences of the second local context of the codon-of-interest, and the determined RCSU of the codon-of-interest.

[0183] In some embodiments, the identifying comprises analyzing at least a portion of the genome of the organism using a machine learning-based computer system. In some embodiments, the machine learning-based computer system comprises one or more storage units comprising, respectively, one or more storage devices included within respective storage arrays controlled by a respective one or more storage controllers; and one or more computer processing units, wherein the one or more computer processing units communicate with the one or more storage units over a communication interface.

[0184] In some embodiments, the identifying further comprises identifying one or more statistically significant evolutionary signals. In some embodiments, the one or more statistically significant evolutionary signals comprises a negative evolutionary selection signal, a positive evolutionary selection signal, or a combination thereof. In some embodiments, the negative selection signal comprises a frameshift, a ribosome stall, or a secondary RNA structure interfering with transcription or translation. In some embodiments, the positive selection signal comprises a regulatory element within an open reading frame (ORF). In some embodiments, the cell or the population of cells comprises an eukaryotic cell or a prokaryotic cell. In some embodiments, the prokaryotic cell comprises an archaebacteria cell, a bacterial cell, or a combination thereof. In some embodiments, the eukaryotic cell comprises an yeast cell, a fungal cell, a plant cell, an animal cell, an insect cell, a mammalian cell, or a combination thereof. In some embodiments, the mammalian cell comprises a rodent cell, a mouse cell, or a human cell, or a combination thereof.

[0185] In some embodiments, the first amino acid comprises alanine, cysteine, aspartic acid, glutamic acid, phenylalanine, glycine, histidine, isoleucine, lysine, leucine, methionine, asparagine, proline, glutamine, arginine, serine, threonine, valine, tryptophan, or tyrosine. In some embodiments, the first amino acid comprises arginine, leucine, or serine. In some embodiments, the first plurality of codons comprises CGT, CGC, CGA, CGG, AGA, AGG, or a combination thereof. In some embodiments, the first plurality of codons comprises CGA, CGG, or a combination thereof. In some embodiments, the first plurality of codons comprises TTA, TTG, CTT, CTC, CTA, CTG, or a combination thereof. In some embodiments, the first plurality of codons comprises CTA, CTG, or a combination thereof. In some embodiments, the first plurality of codons comprises TCT, TCC, TCA, TCG, AGT, AGC, or a combination thereof. In some embodiments, the first plurality of codons comprises AGT, AGC, TCG, TCA, or a combination thereof.

[0186] In some embodiments, the second amino acid comprises alanine, cysteine, aspartic acid, glutamic acid, phenylalanine, glycine, histidine, isoleucine, lysine, leucine, methionine, asparagine, proline, glutamine, arginine, serine, threonine, valine, tryptophan, or tyrosine. In some embodiments, the second amino acid comprises a non-canonical amino acid (ncAA). In some embodiments, the ncAA comprises p-azidophenylalanine, 2-aminoisobutyric acid (Aib), or a combination thereof.

[0187] In some aspects, provided herein, is an organism comprising the cell or the population of cells described herein.

[0188] In some aspects, provided herein, is a computer system for editing a genome of an organism, comprising: a database that is configured to store at least a portion of the genome of the organism; and one or more computer processors operatively coupled to said database, wherein said one or more computer processors are individually or collectively programmed to: a) analyze the at least the portion of the genome of the organism to identify a first plurality of codons in the genome of the organism to be rewritten; and b) rewrite the first plurality of codons in the genome of the organism to a second codon, wherein the first plurality of codons and the second codon encode a first amino acid, and wherein the rewriting of the first plurality of codons modulates an occurrence of the first plurality of codons, thereby editing the genome of the organism.

[0189] In some aspects, provided herein, is a non-transitory computer-readable storage medium comprising machine-executable code that, upon execution by one or more computer processors, implements a method for editing a genome of an organism, the method comprising: a) analyzing at least a portion of the genome of the organism to identify a first plurality of codons in the genome of the organism to be rewritten; and b) rewriting the first plurality of codons in the genome of the organism to a second codon, wherein the first plurality of codons and the second codon encode a first amino acid, and wherein the rewriting of the first plurality of codons modulates an occurrence of the first plurality of codons, thereby editing the genome of the organism.

### Examples

[0190] These examples are provided for illustrative purposes only and not to limit the scope of the claims provided herein.

### Example 1: Codon Selection for Rewriting/Replacement

[0191] For maximum flexibility in selecting replacement codons, amino acids encoded by 6 different codons are used for this example using Saccharomyces cerevisiae as the model organism. As this example focuses on DNA genes, DNA nomenclature, e.g., A, C, G, or T, is used.

[0192] Leucine: Leucine may be encoded by a set of 6 codons, which include CTT, CTC, CTG, CTA, TTG, and TTA. The choices are to rewrite CTG/CTA (1.42% of all Leucine codons) or TTG/TTA (5.2% of all Leucine codons). To reduce the number of rewritten codons, CTG/CTA is chosen to be rewritten. It's noteworthy that the Candida genus of yeast has lineages in which CTG has been reassigned from leucine (the ancestral state) to serine.

[0193] This demonstrates the ability to reassign this codon. The leucine anticodons for the 4-block are GAG (1 copy) and TAG (3 copies). It is most likely the TAG anticodon that decodes CTG. The GAG anticodon may decode CTC and CTT. Deleting the GAG anticodon tRNA (YNCG0028 W) causes no fitness defect, which means that the 3-copy TAG anticodon supplies it. Candida species have additional tRNAs with the AAG anticodon for the 4-block. If the TAG tRNAs are deleted, then these additional tRNAs may have to be supplied.

[0194] Leucine design summary: rewrite CTG/CTA codons, or possibly just the CTG codons. Delete the tL(TAG) genes, 3 copies. Possibly supplement with tL(AAG) tRNA genes from a related yeast species.

[0195] Serine: Serine may be encoded by a set of 6 codons, which include TCT, TCC, TCG, TCA, AGT, and AGC. The candidates for rewriting are TCG/TCA (2.78% of all serine codons) or AGT/AGC (2.47% of all serine codons). For the TCG/TCA choice, the anticodons are tS(CGA) 1 copy and tS(TGA) 3 copies. For the AGT/AGC choice, the anticodons are tS(GCT) 4 copies. Although in some embodiments it is favored to rewrite codons ending in G, in this case it may be reasonable to rewrite the AGT/AGC pair, because the GCT anticodon may not give cross-talk outside of the AGT/AGC 2-block.

[0196] Serine design summary, design 1: rewrite TCG/TCA codons, delete tS(CGA) 1 copy, tS(TGA) 3 copies. Increase copy numbers of other tS tRNA genes.

[0197] Serine design summary, design 2: rewrite AGT, AGC codons, delete tS(GCT) 4 copies. Increase copy numbers of other tS tRNA genes.

[0198] Arginine: Arginine may be encoded by a set of 6 codons, which include CGT, CGC, CGG, CGA, AGG, and AGA. The choices are to rewrite CGG/CGA (0.56% of all arginine codons) or AGG/AGA (3.110% of all arginine codons). To reduce the number of rewritten codons, CGG/CGA is chosen to be rewritten. The anticodons in the 4-block are ACG (6 copies) and CCG (1 copy). The single-copy CCG anticodon tRNA is TRR4. It is an essential tRNA gene, suggesting that no other tRNA recognizes CGG. Rewriting CGG and deleting TRR4 may permit use of CGG for orthogonal translation. In this case it may not be necessary to rewrite CGA because it is decoded by the ACG tRNA that may not recognize CGG.

[0199] Arginine design summary: rewrite CGG/CGA codons, delete tR(CCG) single-copy tRNA. Possibly increase copy number of remaining Arg tRNA genes to account for rewritten codons.

### Codon Removal Strategy

[0200] Leu CTG/CTA rewrite: 69K codons, 3 tRNAs.

[0201] Arg CGG/CGA rewrite: 14K codons, 1 tRNA.

[0202] Ser AGT/AGC rewrite: 70K codons, 4 tRNAs.

[0203] Ser TCG/TCA rewrite: 78K codons, 4 tRNAs.

[0204] Total over 6 codons: ˜160K codons to rewrite.

### Designs

[0205] 5 regions of 20 kb each, 7 designs per region, 700 kb total.

[0206] ‘Individual’ designs: 2 codons removed: Leu, Arg, Ser.

[0207] ‘Paired’ designs: 3 codons removed: Leu/Arg, Leu/Ser, Arg/Ser.

[0208] ‘All’ design: 6 codons removed: Leu/Arg/Ser.

### Example 2: Codon Replacement-Other Methods

[0209] A simple method for rewriting a codon is to change a nucleotide in the wobble position (third position of a codon) in a way that retains GC content. For example, a codon that ends with G or A in a 4-codon block (4 codons encoding a same amino acid) may be to change C or T, respectively. Alternatively, a codon may be changed to another codon having the highest frequency for that specific amino acid.

### Example 3: Codon Replacement-Goldilocks Design

[0210] The Goldilocks method for codon replacement can start with examining the local context of a codon. First, the frequency of each single codon is determined, and the relative synonymous codon usage (RSCU) may be determined (e.g., as the frequency of a codon divided by the frequency of all codons encoding the same amino acid). Second, the context of a codon is determined considering the preceding codon, the codon under consideration, and the subsequent codon. A protein-coding gene of a host species is examined, and the number of times each codon-codon-codon 9 mer occurs is determined. For example, in yeast, there are 4\hat{ }9 (=262,144) different 9 mers and approximately 3 million different codons. On average, each 9 mer occurs 11 times. The observed number of occurrences of the 9 mer may be defined as O(9 mer). The 9 mer contexts are then converted to patterns of codon-amino acid (aa)-codon, wherein aa is the amino acid encoded by the central codon. There are 4\hat{ }3×20×4\hat{ }3( =8,190) different patterns.

[0211] Next, the number of times that the central codon is expected to be observed under the null hypothesis is the number of times that the codon-aa-codon pattern occurs times the RCSU for the central codon. This is denoted as E(9 mer) for the expected number of occurrences of the 9 mer.

[0212] The p-value is then determined for a two-sided Poisson test for enrichment or depletion of the 9 mer relative to the null distribution. Standard significance at the 0.05 level, corrected for 262,144 9 mer tests, requires a single-test p-value of 1.9E-7 for significance.

[0213] The 9 mers that are over-represented or under-represented suggest selective pressure. Over-represented 9 mers may include regulatory motifs. Under-represented 9 mers may have undesired functions, such as frameshifts. The Goldilocks approach may have a goal to avoid creating 9 mers that have a significant deviation from the null.

[0214] One implementation is to use a simple codon replacement (maintaining GC content as described in Example 3) unless the result creates a 9 mer that deviates from the null, in which case an alternative is selected. An alternative implementation is to choose the new codon as the 9 mer whose observed frequency is closest to the expected frequency, excluding 9 mers whose central codon is in the set to be replaced. For repeated occurrences of codons that are to be replaced, the Goldilocks method may be applied in overlapping 9 mer windows across the region.

### Example 4: Using the Goldilocks Method to Rewrite Yeast Protein-Coding Genes

[0215] This example uses the Goldilocks method to rewrite yeast protein-coding genes. This example uses computer files with the following directory structure (Table 5).

TABLE 5
Directory Structure

| | |
|---|---|
| goldilocks/ | top-level directory |
| ../data/ | external data directory |
| ../../ncbi_translation_table_01.txt | NCBI translation table 1 (the standard genetic code) |
| ../../aa_info.txt | Amino acids, 3-letter codes, 1-letter codes |
| ../../orf_coding.fasta | SGD CDS from ATG through Ter, including verified, |
| | uncharacterized, transposable, excluding dubious |
| | and pseudogenes |
| ../../orf_trans.fasta | SGD translated ORFs, including verified, |
| | uncharacterized, transposable, excluding dubious |
| | and pseudogenes |
| ../src/ | source codes and scripts for running |
| ../../run_goldilocks.sh | script to run |
| ../../goldilocks.py | program implementing Goldilocks design |
| ../results/ | results directory |

### Input Data

[0216] Translation tables were retrieved from NCBI from:

www.ncbi.nlm.nih.gov/Taxonomy/Utils/wprintgc.cgi

[0217] Yeast ORFs were retrieved from NCBI from: sgd-archive.yeastgenome.org/?prefix=sequence/S288C_reference/

[0218] This release is Genome Release 64-3-1.

[0219] The ORF files have the following counts:

| | |
|---|---|
| Total records: | 6034 |
| . . . excluding mitochondrial genes | 6015 (excludes 19 mitochondrial) |
| . . . excluding transposable_element_gene | 5924 (excludes 91 transposable elements) |
| . . . excluding pseudogenes | 5912 (excludes 12 pseudogenes) |
| . . . excluding blocked_reading_frames | 5906 (excludes 6 blocked reading frames) |

[0220] Mitochondrial genes are excluded because the application is to the nuclear genome, not the mitochondrial genome. Codon usage in the nuclear and mitochondrial genome are different, and in some organisms the genetic codes are different.

[0221] The transposable element genes are excluded for two reasons. First, transposable elements are parasitic DNA that may be better to be removed. Therefore, they may not be retained in a rewritten genome. Second, transposable elements have very similar DNA sequences because of recent common ancestors. Their codon usage does not necessarily match the codon usage of the rest of the yeast genome. This can create a spurious statistical signal.

[0222] Pseudogenes are excluded because mutations are free to occur in non-functional DNA.

[0223] Codon counts, amino acids counts, and relative synonymous codon usage (RSCU)

[0224] The codon count for each codon, including stop codons is then determined. For simplicity, when writing “for each amino acid”, the stop symbols and their codons UAA, UAG, and UGA are included as among the amino acids. The translation table for the organism is used—see Tables 6A and 6B (translation table 1 for yeast or the standard table from the website provided above)-to map codons to amino acids. The number of codons for each amino acid is determined. Then for each codon, the RSCU is determined (e.g., as the number of counts for the codon divided by the number of counts for all codons for the same amino acid).

[0225] Results for yeast are based on 2,832,327 codons and are in the Table 6C (amino acid counts), Table 6D (codon counts and RSCU for the original yeast genome), and Table 6E (codon counts and RSCU for the yeast genome after rewriting).

TABLE 6A
The Standard Code-format 1 (transl_table = 1)

| | | |
|---|---|---|
| AAs | = | FFLLSSSSYY**CC*WLLLLPPPPHHQQRRRRIIIMTTTTNNKKSSRRVVVVAAAADDEEGGGG |
| Starts | = | ---M------**--*----M---------------M---------------------------- |
| Base1 | = | TTTTTTTTTTTTTTTTCCCCCCCCCCCCCCCCAAAAAAAAAAAAAAAAGGGGGGGGGGGGGGGG |
| Base2 | = | TTTTCCCCAAAAGGGGTTTTCCCCAAAAGGGGTTTTCCCCAAAAGGGGTTTTCCCCAAAAGGGG |
| Base3 | = | TCAGTCAGTCAGTCAGTCAGTCAGTCAGTCAGTCAGTCAGTCAGTCAGTCAGTCAGTCAGTCAG |

TABLE 6B
The Standard Code - format 2 (transl_table = 1)
Codon/Amino Acid (1 letter code)/Amino Acid (3 letter code)

| | | | |
|---|---|---|---|
| TTT F Phe | TCT S Ser | TAT Y Tyr | TGT C Cys |
| TTC F Phe | TCC S Ser | TAC Y Tyr | TGC C Cys |
| TTA L Leu | TCA S Ser | TAA * Ter | TGA * Ter |
| TTG L Leu i | TCG S Ser | TAG * Ter | TGG W Trp |
| CTT L Leu | CCT P Pro | CAT H His | CGT R Arg |
| CTC L Leu | CCC P Pro | CAC H His | CGC R Arg |
| CTA L Leu | CCA P Pro | CAA Q Gln | CGA R Arg |
| CTG L Leu i | CCG P Pro | CAG Q Gln | CGG R Arg |
| ATT I Ile | ACT T Thr | AAT N Asn | AGT S Ser |
| ATC I Ile | ACC T Thr | AAC N Asn | AGC S Ser |
| ATA I Ile | ACA T Thr | AAA K Lys | AGA R Arg |
| ATG M Met i | ACG T Thr | AAG K Lys | AGG R Arg |
| GTT V Val | GCT A Ala | GAT D Asp | GGT G Gly |
| GTC V Val | GCC A Ala | GAC D Asp | GGC G Gly |
| GTA V Val | GCA A Ala | GAA E Glu | GGA G Gly |
| GTG V Val | GCG A Ala | GAG E Glu | GGG G Gly |

i: initiation,
* and ter: termination

TABLE 6C
Results (Amino Acid Count)

| | Amino acid | Amino acid |
|---|---|---|
| Amino acid (aa) | count (aa_cnt) | frequency (aa_freq) |
| * | 5906 | 0.0020852112061919403 |
| A | 156235 | 0.055161356721875686 |
| C | 36213 | 0.012785599967800328 |
| D | 165319 | 0.05836861351108117 |
| E | 186296 | 0.06577489110544087 |
| F | 126645 | 0.044714116696271296 |
| G | 141776 | 0.05005636707908374 |
| H | 60133 | 0.021230952499481873 |
| I | 184781 | 0.06523999524066254 |
| K | 207688 | 0.07332769132942629 |
| L | 270338 | 0.09544731240425276 |
| M | 58747 | 0.020741602223189624 |
| N | 172355 | 0.060852789949748035 |
| P | 121763 | 0.04299044566534867 |
| Q | 110962 | 0.03917697356272775 |
| R | 126042 | 0.044501217550092204 |
| S | 253263 | 0.0894187005949525 |
| T | 165332 | 0.05837320337658752 |
| V | 158480 | 0.05595399118816436 |
| W | 29606 | 0.010452889090842972 |
| Y | 94447 | 0.03334607903677789 |

TABLE 6D
Codon counts and RSCU for the original yeast genome

| Amino acid (aa) | Codon | Count (cnt) | RSCU |
|---|---|---|---|
| * | TAA | 2831 | 0.47934304097527936 |
| * | TAG | 1337 | 0.22637995259058585 |
| * | TGA | 1738 | 0.2942770064341348 |
| A | GCA | 46042 | 0.2946970909207284 |
| A | GCC | 34904 | 0.22340704707651934 |
| A | GCG | 17863 | 0.11433417608090377 |
| A | GCT | 57426 | 0.3675616859218485 |
| C | TGC | 13632 | 0.37643940021539224 |
| C | TGT | 22581 | 0.6235605997846078 |
| D | GAC | 57173 | 0.3458344170966435 |
| D | GAT | 108146 | 0.6541655829033566 |
| E | GAA | 130199 | 0.6988824236698588 |
| E | GAG | 56097 | 0.3011175763301413 |
| F | TTC | 51434 | 0.4061273638911919 |
| F | TTT | 75211 | 0.5938726361088081 |
| G | GGA | 31715 | 0.2236979460557499 |
| G | GGC | 28033 | 0.1977274009705451 |
| G | GGG | 17610 | 0.12421002144227514 |
| G | GGT | 64418 | 0.45436463153142986 |
| H | CAC | 21452 | 0.35674255400528826 |
| H | CAT | 38681 | 0.6432574459947117 |
| I | ATA | 51494 | 0.2786758378837651 |
| I | ATC | 47709 | 0.25819213014325065 |
| I | ATT | 85578 | 0.46313203197298425 |
| K | AAA | 120304 | 0.5792534956280575 |
| K | AAG | 87384 | 0.42074650437194255 |
| L | CTA | 38282 | 0.14160791305698792 |
| L | CTC | 15611 | 0.057746228795063956 |
| L | CTG | 30580 | 0.11311765271622931 |
| L | CTT | 34723 | 0.12844291220620113 |
| L | TTA | 74606 | 0.27597304115588633 |
| L | TTG | 76536 | 0.28311225206963136 |
| M | ATG | 58747 | 1.0 |
| N | AAC | 69568 | 0.40363203852513707 |
| N | AAT | 102787 | 0.5963679614748629 |
| P | CCA | 49607 | 0.40740619071474915 |
| P | CCC | 19542 | 0.1604921035125613 |
| P | CCG | 14967 | 0.12291911335955914 |
| P | CCT | 37647 | 0.30918259241313045 |
| Q | CAA | 75790 | 0.6830266217263568 |
| Q | CAG | 35172 | 0.31697337827364325 |
| R | AGA | 59762 | 0.4741435394551023 |
| R | AGG | 27339 | 0.21690388917979722 |
| R | CGA | 8607 | 0.06828676155567191 |
| R | CGC | 7460 | 0.05918662033290491 |
| R | CGG | 5261 | 0.041740054902334144 |
| R | CGT | 17613 | 0.13973913457418954 |
| S | AGC | 28536 | 0.11267338695348314 |
| S | AGT | 41333 | 0.16320188894548354 |
| S | TCA | 52989 | 0.209225192783786 |
| S | TCC | 39767 | 0.15701859331998752 |
| S | TCG | 24681 | 0.09745205576811457 |
| S | TCT | 65957 | 0.2604288822291452 |
| T | ACA | 50246 | 0.3039097089492657 |
| T | ACC | 35028 | 0.21186461181138558 |
| T | ACG | 23190 | 0.1402632279292575 |
| T | ACT | 56868 | 0.34396245131009123 |
| V | GTA | 34101 | 0.21517541645633517 |
| V | GTC | 31930 | 0.20147652700656235 |
| V | GTG | 31087 | 0.1961572438162544 |
| V | GTT | 61362 | 0.38719081272084804 |
| W | TGG | 29606 | 1.0 |
| Y | TAC | 41031 | 0.4344341270765615 |
| Y | TAT | 53416 | 0.5655658729234385 |

TABLE 6E
Codon counts and RSCU for the yeast genome after rewriting
(0 indicates that the codon has been eliminated)

| Amino acid (aa) | Codon | Count (cnt) | RSCU |
|---|---|---|---|
| * | TAA | 0 | 0.0 |
| * | TAG | 0 | 0.0 |
| * | TGA | 5906 | 1.0 |
| A | GCA | 46042 | 0.2946970909207284 |
| A | GCC | 34904 | 0.22340704707651934 |
| A | GCG | 17863 | 0.11433417608090377 |
| A | GCT | 57426 | 0.3675616859218485 |
| C | TGC | 13632 | 0.37643940021539224 |
| C | TGT | 22581 | 0.6235605997846078 |
| D | GAC | 57173 | 0.3458344170966435 |
| D | GAT | 108146 | 0.6541655829033566 |
| E | GAA | 130199 | 0.6988824236698588 |
| E | GAG | 56097 | 0.3011175763301413 |
| F | TTC | 51434 | 0.4061273638911919 |
| F | TTT | 75211 | 0.5938726361088081 |
| G | GGA | 31715 | 0.2236979460557499 |
| G | GGC | 28033 | 0.1977274009705451 |
| G | GGG | 17610 | 0.12421002144227514 |
| G | GGT | 64418 | 0.45436463153142986 |
| H | CAC | 21452 | 0.35674255400528826 |
| H | CAT | 38681 | 0.6432574459947117 |
| I | ATA | 51494 | 0.2786758378837651 |
| I | ATC | 47709 | 0.25819213014325065 |
| I | ATT | 85578 | 0.46313203197298425 |
| K | AAA | 120304 | 0.5792534956280575 |
| K | AAG | 87384 | 0.42074650437194255 |
| L | CTA | 0 | 0.0 |
| L | CTC | 15718 | 0.058142029607380394 |
| L | CTG | 0 | 0.0 |
| L | CTT | 37985 | 0.1405092883723339 |
| L | TTA | 104383 | 0.38612033824323627 |
| L | TTG | 112252 | 0.4152283437770495 |
| M | ATG | 58747 | 1.0 |
| N | AAC | 69568 | 0.40363203852513707 |
| N | AAT | 102787 | 0.5963679614748629 |
| P | CCA | 49607 | 0.40740619071474915 |
| P | CCC | 19542 | 0.1604921035125613 |
| P | CCG | 14967 | 0.12291911335955914 |
| P | CCT | 37647 | 0.30918259241313045 |
| Q | CAA | 75790 | 0.6830266217263568 |
| Q | CAG | 35172 | 0.31697337827364325 |
| R | AGA | 71852 | 0.5700639469383222 |
| R | AGG | 28218 | 0.22387775503403629 |
| R | CGA | 0 | 0.0 |
| R | CGC | 7545 | 0.05986099871471414 |
| R | CGG | 0 | 0.0 |
| R | CGT | 18427 | 0.14619729931292744 |
| S | AGC | 30587 | 0.12077168792914875 |
| S | AGT | 51674 | 0.20403296178281075 |
| S | TCA | 0 | 0.0 |
| S | TCC | 50208 | 0.19824451262126722 |
| S | TCG | 0 | 0.0 |
| S | TCT | 120794 | 0.47695083766677326 |
| T | ACA | 50246 | 0.3039097089492657 |
| T | ACC | 35028 | 0.21186461181138558 |
| T | ACG | 23190 | 0.1402632279292575 |
| T | ACT | 56868 | 0.34396245131009123 |
| V | GTA | 34101 | 0.21517541645633517 |
| V | GTC | 31930 | 0.20147652700656235 |
| V | GTG | 31087 | 0.1961572438162544 |
| V | GTT | 61362 | 0.38719081272084804 |
| W | TGG | 29606 | 1.0 |
| Y | TAC | 41031 | 0.4344341270765615 |
| Y | TAT | 53416 | 0.5655658729234385 |

### Ninemers (9Mers) and Codon-Aa-Codon Contexts

[0226] Next, the frequency of 9 mers in coding domains is determined. The 9 mers are in-frame sliding windows across the coding sequence (CDS). A CDS with n amino acids (including the stop codon) may have (n−2) different 9 mers. The total number of 9 mers determined is 2,820,515 and the number of unique 9 mers is 215,766. The maximum number of unique 9 mers is not 64*64*64=262,144, but rather 61*61*64=238,144, because stop codons can only occur in the third position. The actual number observed is smaller because some codon patterns are too rare to be observed.

[0227] Codon-codon-codon patterns are then converted to contexts, which may be determined as a codon-aa-codon patterns. There are 61*20*64=78,080 possible contexts, of which 75,918 are observed in the yeast genome.

[0228] Next for each context, a test of the null hypothesis is performed that the frequency of the central codon, conditioned on the context of the surrounding codons, follows the same distribution as the RSCU. This is performed as a single statistical test for all the possible central codons given the central amino acid.

[0229] The test is motivated by considering a likelihood ratio test with test statistic

$$Q = 2 ln [ Pr ( D \vert ML ) / Pr ( D \vert null ) ] ,$$

where Pr(D|null) is the probability of central codon counts under the null distribution given by the genome-wide RSCU, and Pr(D|ML) is the probability of the central codon counts under an alternative distribution in which the codon usage depends on the context defined by the outer codons, using the maximum likelihood estimator for the model parameters. Under the null, Q follows a chi-square distribution with a number of degrees of freedom (df) equal to the number of possible codons minus 1. Thus, for amino acids with a single amino acid, the test has 0 df (only a single choice), amino acids with 2 codons have 1 df, amino acids with 4 codons have 3 df, and amino acids with 6 codons have 5 df. The stop signal has 3 codons and 2 df.

[0230] For a given context, let c be one of the possible codons, r(c) be the RSCU for that codon, and n(c) be the number of times that codon occurs in the central position of that context. Under the null,

$$Pr ( D \vert null ) = Product\_c {r ( c )}^{∧} n ( c )$$

$$ln Pr ( D \vert null ) = Sum\_c n ( c ) ln r ( c )$$

[0231] For the ML distribution, the standard result is that the maximum likelihood probabilities are the observed probabilities. Let N=sum_c n(c) be the number of examples of the context. The maximum likelihood estimate for the frequency of codon c is determined as:

$$r ’ ( c ) = n ( c ) / N , and ln Pr ( D \vert ML ) = Sum\_c n ( c ) ln [ n ( c ) / N ] .$$

[0232] Putting this together,

$$Q = 2 Sum\_c n ( c ) ln [ n ( c ) / N r ( c ) ] .$$

[0233] Note that the argument of the logarithm is the ratio of the number of codons observed to the number expected under the null.

[0234] In the case that a particular codon is not observed,

$$n ( c ) ln [ n ( c ) ] = 0.$$

There are no problems with divergences. Other statistical tests are possible, including using pseudocounts to smooth out the distributions.

[0235] The single-tailed p-value is then determined for the chi-square values to identify contexts whose codon usage differs from the null. For a stringent family-wise error of 0.05, an individual test p-value is required to be smaller than 0.05/78,080=6.4E-7.

[0236] The likelihood ratio test is asymptotic to a chi-square distribution, but for small values of observations there are standard corrections. Therefore, a chisquare test is also performed as implemented by scipy.stats.chisquare, which takes as arguments the same lists of observed and expected counts, including the zero counts. The test statistics and p-values may be very similar.

[0237] A small p-value can result from many observations with a small difference between observed and expected counts, or from fewer observations with a larger difference between observed and effected counts. The difference is quantified as a weighted geometric mean of the observed-to-expected ratio magnitudes as follows.

[0238] Let n(c) be the number of occurrences of codon c as before, and N r(c) be the null expectation as before. The weighted log-ratio w is determined as:

$$w = ( 1 / N ) Sum\_c n ( c ) \vert ln [ n ( c ) / N r ( c ) ] \vert$$

where the vertical bars indicate absolute value. The absolute value is taken to count both enrichment, n(c) higher than expected, and depletion, n(c) lower than expected, as contributing their magnitudes rather than cancelling each other out.

[0239] The ratio magnitude R is then determined as:

$$R = exp ( w ) .$$

[0240] For a context with a small p-value and large ratio magnitude, it is instructive to examine the under-represented codon choices and over-represented codon-choices. For a codon c, the regularized log-ratio is determined as:

$$LR ( c ) = ln [ max ( n ( c ) , 0.5 ) / N r ( c ) ] ,$$

which is just the log ratio, but with n(c) changed from 0 to 0.5 for codons that are never observed. Then, within each context, the 9 mer patterns with the most negative LR and the most positive LR are provided.

[0241] Contexts, their observed and null hypothesis counts of central codons, p-values, and ratios are provided in Table 6F (context_cnt.txt as tab-delimited text). Amino acids with a single codon are included in the results. For these amino acids, observed and expected counts are identical, and all p-values are set to 1.

[0242] The number of contexts with p-value below 6.4E-7 is 584. The rows of the context_cnt.txt belonging to this subset are provided in Table 9. A few of the patterns observed are discussed.

### Depletion of Ribosomal Frameshifting Slippery Sites

[0243] One pattern of depleted codon use is to avoid creating codon patterns that are slippery sites for ribosomal frameshifting. An exemplary pattern for a slippery site is:

nnX XXY YYZ

where spaces indicate codon boundaries, X and Y may be A or T, YYZ may be AAC or TTA, and the small n's at the beginning of the pattern may be any nucleotides. This site promotes a −1 frameshift in which the new codon boundaries are:

nn XXX YYY X.

[0244] Note that in both the original reading frame and in the −1 frameshift, the first two codon position are XX in the second codon and YY in the third codon. The only changes in base pairing are to the wobble position codon.

[0245] See, for example, these references:
[0246] T Jacks, HD Madhani, FR Masiars, HE Varmus 1988 Cell 55: 447, which is incorporated by reference herein in its entirety.
[0247] M Chamorro, N Parkin, HE Varmus 1992 PNAS 89: 713, which is incorporated by reference herein in its entirety.
[0248] JN Dinman 1995 Yeast 11: 1115, which is incorporated by reference herein in its entirety

[0249] An example is the context GAA_K_AAA encoding the three amino acids E_K_K. There are two possible choices for the lysine codon, AAA (195 observed, 312 expected) and AAG (343 observed, 226 expected). The 1.5-fold change from the expected distribution is highly significant, p=2.eE-24.

[0250] A second example is the context GGT_G_GGT encoding the three amino acids G_G_G. The most depleted central codon is GGG (5 observed, 28 expected), and the most enriched is GGT (172 observed, 102 expected). The mean ratio magnitude is 1.8, p=1.8E-19.

[0251] A third example is the context CTC_P_TTG encoding the three amino acids L_P_L. The most depleted central codon is CCT (0 observed, 3 expected). This creates a possible slippery site with a −1 frameshift:

CTC CCT TTG−>CT CCC TTT C

[0252] The most enriched is CCC (22 observed, 4 expected), which eliminates the slippery site.

TABLE 6F
Contexts, their observed and null hypothesis counts of central codons,
p-values, and ratios

| | con- | | | codon_ | | | | | | | | | | |
|---|---|---|---|---|---|---|---|---|---|---|---|---|---|---|
| | text_ | | codon_ | cnt_ | | | | | | context_ | | most_ | most_ | codon_ |
| context | aa | cnt | cnt | null | df | q | spq | pval | sppval | cnt | ratio | depleted | | order |
| GAA_ | E | A | 1 | 31 | 1 | 102. | 103.7 | 4.893 | 2.288 | 53 | 1.544 | 1.6 | 1.5 | AA |
| K_ | K̅ | A | 9 | 1. | | 2501 | 55590 | 48489 | 78321 | 8 | 80286 | :GA | :GA | G |
| AAA | K̅ | A | 5 | 63 | | 6669 | 75673 | 08515 | 97377 | | 32158 | AAA | AAA | AA |
| | | A | 3 | 8 | | 5166 | 644 | 474e- | 122e- | | 135 | AAA | GAA | A |
| | | A | 4 | 22 | | 8 | | 24 | 24 | | | A | A | |
| | | G | 3 | 6. | | | | | | | | | | |
| | | | | 36 | | | | | | | | | | |
| | | | | 2 | | | | | | | | | | |
| GG | G | G | 2 | 50 | 3 | 98.0 | 90.42 | 4.027 | 1.776 | 22 | 1.781 | 5.6 | 1.7 | GG |
| T_ | G̅ | G | 1 | .3 | | 7647 | 34499 | 62466 | 65687 | 5 | 49997 | :GG | :GG | T |
| G_ | G̅ | A | 2 | 32 | | 4297 | 99975 | 99139 | 96921 | | 38840 | TGG | TGG | GG |
| GG | | G | 7 | 44 | | 3268 | 99 | 65e- | 948e- | | 842 | GGG | TGG | C |
| T | | G | 5 | .3 | | | | 21 | 19 | | | T | T | GG |
| | | C | 1 | 89 | | | | | | | | | | A |
| | | G | 7 | 27 | | | | | | | | | | GG |
| | | G | 2 | .9 | | | | | | | | | | G |
| | | G | | 47 | | | | | | | | | | |
| | | G | | 10 | | | | | | | | | | |
| | | G | | 2. | | | | | | | | | | |
| | | T | | 23 | | | | | | | | | | |
| | | | | 2 | | | | | | | | | | |
| TT | L | C | 5 | 27 | 3 | 34.0 | 32.74 | 1.890 | 3.647 | 67 | 1.913 | 5.4 | 1.8 | CC |
| A_ | P̅ | C | 0 | .3 | | 9657 | 36822 | 33174 | 59611 | | 51802 | :TT | :TT | A |
| P_ | R̅ | A | 2 | 96 | | 1086 | 53844 | 73552 | 90134 | | 95466 | ACC | ACC | CC |
| AG | | C | 4 | 10 | | 0602 | 6 | 026e- | 545e- | | 208 | CAG | AAG | T |
| A | | C | 1 | .7 | | 5 | | -7 | 07 | | | A | A | CC |
| | | C | 1 | 53 | | | | | | | | | | G |
| | | C | | 8. | | | | | | | | | | CC |
| | | C | | 23 | | | | | | | | | | C |
| | | G | | 6 | | | | | | | | | | |
| | | C | | 20 | | | | | | | | | | |
| | | C | | .7 | | | | | | | | | | |
| | | T | | 15 | | | | | | | | | | |

### Regulatory Signals

[0253] Some patterns of context-dependent codon usage match regulatory signal sequences. An example is the ACCCA sequence recognized by the Raplp binding protein:
[0254] D Shore 1994 Trends in Genetics 10: 408, which is incorporated by reference herein in its entirety.

[0255] This sequence can cause transcriptional silences, and inadvertent creation of a Raplp binding site created a fitness defect in Sc2.0 synthetic chromosome synX:
[0256] Y Wu et al 2017 Science 355: 1048, which is incorporated by reference herein in its entirety.

[0257] The context TTA_P_AGA, with amino acids L_P_R, has a depleted central codon CCC (2 observed, 11 expected) that creates the ACCCA Rap1p binding motif. The most enriched central codon is CCA (50 observed, 27 expected), with a mean ratio magnitude 1.9 and p=3.7E-7.

### Implementation

[0258] The inspiration for Goldilocks is codon usage that is not too hot, not too cold, but just right for the context. Given a set of codons to avoid throughout the genome, the codon is mapped to the amino acid, and then a replacement codon is determined based at least in part on statistical analysis of a local context of the replacement codon.

[0259] A one-pass Goldilocks algorithm is performed as follows, processing each CDS in turn:
[0260] 1. Identify the positions of codons to eliminate.
[0261] 2. Consider each codon in turn, replacing the codon with the most frequently used codon as the central codon in a 3-codon context.
[0262] 3. The first codon is a special case because there is no preceding context. The first codon is always ATG, however, in standard genetic codes.
[0263] 4. The last codon (stop codon) is a special case because there is no following context. If stop codons are rewritten, however, an example design is to change TAA and TAG to TGA, which has only a single choice. Alternatively, a 6nt context or 9nt context with the stop codon as the final 3nt may be used.

[0264] An implementation of a one-pass Goldilocks algorithm is provided, along with sample input and output for the entire yeast genome. The codons removed are as follows (Table 7):

TABLE 7
Codons for removal

| Amino acid | Codon |
|---|---|
| * | TAA |
| * | TAG |
| R | CGA |
| R | CGG |
| L | CTA |
| L | CTG |
| S | TCA |
| S | TCG |

[0265] The method rewrites 164,568 out of 2,832,327 codons=5.8% of the total codons.

[0266] The output CDS records are validated to lack any instances of the codons, and the translation of the CDS is validated to be identical to the original translation.

### Dynamic Programming Approach for Evaluation of Codons to Rewrite

[0267] The one-pass method described above is appropriate for separated instances of codons to rewrite. If adjacent codons are in the rewrite set, however, then rewriting one changes the context for the other. There are many instances of this in the yeast genome. For each CDS, the maximum run length of codons to rewrite was determined. These are the rewrite lengths and numbers of genes (Table 8):

TABLE 8
Rewrite Length and number of genes

| | maxrunlen count |
|---|---|
| 0 | 13 |
| 1 | 1914 |
| 2 | 3176 |
| 3 | 707 |
| 4 | 68 |
| 5 | 16 |
| 6 | 5 |
| 7 | 3 |
| 8 | 1 |
| 9 | 2 |
| 13 | 1 |

[0268] The gene with the longest run length of 13 codons in a row is YGR130C SGDID:S000003362, Chr VII from 753844-751394, Genome Release 64-3-1, reverse complement, Verified ORF, “Component of the eisosome with unknown function; GFP-fusion protein localizes to the cytoplasm; specifically phosphorylated in vitro by mammalian diphosphoinositol pentakisphosphate (IP7)”, which is incorporated by reference herein in its entirety.

[0269] This is the protein sequence with a run of 16 serine residues highlighted in bold, with many encoded by TCA and TCG codons in the set to be rewritten.

>YGR130C
(SEQ ID NO: 11,814)
MLFNINRQEDDPFTQLINQSSANTQNQQAHQQESPYQFLQKVVSNEPK
GKEEWVSPFRQDALANRQNNRAYGEDAKNRKFPTVSATSAYSKQQPKD
LGYKNIPKNAKRAKDIRFPTYLTQNEERQYQLLTELELKEKHLKYLKK
CQKITDLTKDEKDDTDTTTSSSTSTSSSSSSSSSSSSSSSSDEGDVTS
TTTSEATEATADTATTTTTTTSTSTTSTSTTNAVENSADEATSVEEEH
EDKVSESTSIGKGTADSAQINVAEPISSENGVLEPRTTDQSGGSKSGV
VPTDEQKEEKSDVKKVNPPSGEEKKEVEAEGDAEEETEQSSAEESAER
TSTPETSEPESEEDESPIDPSKAPKVPFQEPSRKERTGIFALWKSPTS
SSTQKSKTAAPSNPVATPENPELIVKTKEHGYLSKAVYDKINYDEKIH
QAWLADLRAKEKDKYDAKNKEYKEKLQDLQNQIDEIENSMKAMREETS
EKIEVSKNRLVKKIIDVNAEHNNKKLMILKDTENMKNQKLQEKNEVLD
KQTNVKSEIDDLNNEKTNVQKEFNDWTTNLSNLSQQLDAQIFKINQIN
LKQGKVQNEIDNLEKKKEDLVTQTEENKKLHEKNVQVLESVENKEYLP
QINDIDNQISSLLNEVTIIKQENANEKTQLSAITKRLEDERRAHEEQL
KLEAEERKRKEENLLEKQRQELEEQAHQAQLDHEQQITQVKQTYNDQL
TELQDKLATEEKELEAVKRERTRLQAEKAIEEQTRQKNADEALKQEIL
SRQHKQAEGIHAAENHKIPNDRSQKNTSVLPKDDSLYEYHTEEDVMYA*

[0270] A dynamic programming optimization proceeds as follows. Suppose a sequence of n codons, numbered 1 through n, must be rewritten. Denote c(1) as a permitted codon for position 1, which means that it encodes the same amino acid as the original codon and it is not in the set of codons to remove. Similarly c(2) is a permitted codon for position 2, and so on. Codons c0 and c(ₙ₊₁) are fixed by the pre-existing codons, which by definition are outside the set to be removed. As described above, the boundary case that c(1) is the start codon should not occur because ATG is the only start codon. The boundary case that c(n) is the stop codon is a special case in which our favored design uses only a single stop codon, TGA.

[0271] Denote the score for a codon as a value that increases monotonically with our preference for the context with that codon in the middle. Scores should be additive. A suitable value for the score of a codon given its context is In [n(c)], the number of times the codon is observed to occur in that context.

[0272] Denote Context[x, y, z] as this type of additive score for the choice of codon y given the amino acid required and the flanking codons x and z.

[0273] Denote S[c(1), c(2)] as the best score for codons through position 1 that have position 1 set to c(1) and position 2 set to c(2). This can be determined by enumeration.

[0274] Then S[c(2), c(3)]=max_c(1) S[c(1), c(2)]+Context[c(1), c(2), c(3)], which is the best score for having position c(2) and c(3) as specified.

[0275] This process continues,

[0276] S[c(n), c(ₙ₊₁)]max_c(ₙ₋1) S[c(ₙ₋1), c(n)]+Context[c(ₙ₋1), c(n), c(ₙ₊₁)], which is the best score for having position c(n) and c(ₙ₊₁) as specified.

[0277] The search ends here because the codon c(ₙ₊₁) is not in the set to be removed. The traceback of the maximum values leading to this last step provides the codons that together optimize an objective function corresponding to context-dependent codon usage.

### Other Extensions

[0278] Alternatively or in combination, one or more of the following algorithm choices may be used:

[0279] Use dynamical programming for a more sophisticated treatment of neighboring codons.

[0280] Use a different codon selection strategy, for example maintaining GC content, codon adaptation index, or translational efficiency, as the main codon replacement rule, but if this may result in the creation of a pattern that is depleted with statistical significance or other relevant criterion, use the Goldilocks-selected codon instead.

[0281] Use the Goldilocks codon with the greatest fold-enrichment over the null hypothesis, rather than the Goldilocks codon that is most often used in the context.

[0282] Use a random codon selected using the Goldilocks context-dependent probabilities as the probability distribution.

[0283] The final codon is a stop codon and a special case. Some designs may be a single choice for the stop codon, TGA, or a pair of choices, TGA and TAAₙ For the stop codon, a 9 mer pattern or 6 mer pattern ending with the stop codon may be used instead of the 9 mer pattern with the codon of interest in the middle position.

[0284] Avoid significantly enriched codons as possible regulatory signals, choosing a codons whose usage matches the overall RSCU and is not too hot, not too cold, but just right.

[0285] These and other methods that determine context-dependent codon usage values and use them as the basis for codon selection may be used.

[0286] The sequences of original yeast ORFs (Saccharomyces cerevisiae S288C strain) and rewritten yeast ORFs using methods described herein are shown as SEQ ID NOs: 1-11,812.

### Example 5: Orthogonal Translation System

[0287] This example shows site-specific incorporation of ncAAs in proteins in Yeast using generic orthogonal translation system with both displayed and intracellular proteins in the yeast display strain RJY100. ncAA incorporation systems comprise a protein construct containing a TAG codon, an orthogonal translation system, and a ncAA added during expression of the protein construct. This method can be adapted for use in other yeast strains, and plasmids encoding the protein of interest and plasmids encoding the orthogonal translation systems need to contain unique selection markers that must be compatible with the genotype of the yeast strain.

### Materials

[0288] 1. One or more yeast display vectors containing a protein of interest (POI) with and without a TAG stop codon at a permissible site under a galactose-inducible promoter are prepared. The vectors can be named pPOIVector-POI-TAG (with a TAG stop codon) and pPOIVector-POI (without a TAG stop codon), respectively. The vectors also contain an autotrophic marker, e.g., tryptophan marker, for use in yeast and an antibiotic marker, e.g., ampicillin marker, for propagation in E. coli.

[0289] 2. One or more galactose-inducible vectors for a dual-fluorescent protein construct consisting of a fluorescent protein, e.g., blue fluorescent protein and superfolder green fluorescent protein connected by a linker sequence, with or without a TAG codon (BXG and BYG, respectively) are prepared. These vectors can be named pPOIVector-BXG and pPOIVector-BYG, respectively. The vectors also contain an autotrophic marker, e.g., tryptophan marker, for use in yeast and an antibiotic marker, e.g., ampicillin marker, for propagation in E. coli.

[0290] 3. One or more galactose-inducible vector for a single-fluorescent protein construct consisting of a fluorescent protein, e.g., superfolder green fluorescent protein containing a TAG codon in place of tyrosine at position 151 are prepared. These vectors can be named pPOIVector-GFP-TAG and pPOIVector-GFP, respectively. The vectors also contain an autotrophic marker, e.g., tryptophan marker, for use in yeast and an antibiotic marker, e.g., ampicillin marker, for propagation in E. coli.

[0291] 4. One or more constitutive expression vector for orthogonal translation system comprised of an aminoacyl-tRNA synthetase and cognate tRNA is prepared (pOTSVector-OTS). The vectors also contain an autotrophic marker, e.g., leucine marker, for use in yeast and an antibiotic marker, e.g., ampicillin marker, for propagation in E. coli.

[0292] 5. Saccharomyces cerevisiae yeast display strain RJY100 is prepared for use with conventional yeast display and intracellular fluorescent protein expression.

[0293] 6. Media preparation:

### Media Preparation

[0294] A) SD-SCAA-TRP-LEU-URA and SD-SCAA-TRP-URA media, pH 4.5: Dissolve 20 g glucose, 6.7 g yeast nitrogen base without amino acids, 2 g synthetic casamino acids (-TRP-LEU-URA or -TRP-URA), and citrate buffer salts (10.4 g sodium citrate, 7.4 g citric acid monohydrate) in 1 L ddH2O. Filter sterilize using a 0.2 m filter and store at room temperature.

[0295] B) SD-SCAA-TRP-LEU-URA and SD-SCAA-TRP-URA plates, pH 6.0: Mix phosphate buffer salts (5.4 g sodium phosphate dibasic, anhydrous, and 8.56 g sodium phosphate monobasic monohydrate), 15 g agar, and 182 g sorbitol in a final volume of 900 mL with ddH2O in a 1 L bottle with a magnetic stir bar. Autoclave the mixture and cool with stirring at room temperature. At the same time, dissolve 20 g glucose, 6.7 g yeast nitrogen base without amino acids, and 2 g synthetic casamino acids (-TRP-LEU-URA or -TRP-URA) in a final volume of 100 mL using vigorous stirring. Once the autoclaved solution has cooled to approximately 60° C., filter sterilize the glucose/yeast nitrogen base/synthetic casamino acid mixture directly into the autoclaved solution, mix briefly, and pour plates. This recipe is expected to produce approximately 80-100, 100 mm plates. Store at room temperature or at 4° C.

[0296] C) SG-SCAA-TRP-LEU-URA and SG-SCAA-TRP-URA media, pH 6.0: Dissolve 20 g galactose, 2 g glucose, 6.7 g yeast nitrogen base without amino acids, 2 g synthetic casamino acids (-TRP-LEU-URA or -TRP-URA), and phosphate buffer salts (5.4 g sodium phosphate dibasic, anhydrous, and 8.56 g sodium phosphate monobasic monohydrate) in 1 L ddH2O. Filter sterilize using a 0.2 m filter and store at room temperature.

[0297] D) Yeast Extract-Peptone-Dextrose (YPD) media: Mix 20 g peptone and 10 g yeast extract in 900 mL ddH2O. Separately, prepare a solution of 100 mL 20% glucose (20 g glucose in 100 mL ddH2O). Autoclave both solutions, let them cool, and combine the two to make the final product (see Note 11). Store at room temperature.

[0298] E) Yeast Extract Peptone-Glycerol (YPG) media: Mix 20 g peptone and 10 g yeast extract in 900 mL ddH2O. Separately, prepare a solution of 100 mL 20% galactose (20 g galactose in 100 mL ddH2O). Autoclave both solutions, let them cool, and combine the two to make the final product. Store at room temperature.

[0299] F) YPD plates: Mix 10 g peptone, 5 g yeast extract, and 7.5 g agar in 450 mL ddH2O in a 1 L bottle with a magnetic stir bar. Separately, make a solution of 50 mL 20% glucose (10 g in 50 mL). Autoclave both solutions, cool both solutions to 55° C. with stirring, mix them together, and pour plates. This recipe is expected to produce approximately 40-50, 100 mm plates. The 20% glucose solution can be made ahead of time. Store at room temperature or at 4° C.

[0300] 7. Other reagents to be prepared:

[0301] A) Penicillin-streptomycin: 10,000 IU/mL and 10,000 μg/mL, respectively, in 100×solution

[0302] B) 50 mM noncanonical amino acid (ncAA): Prepare a 50 mM liquid stock of the L-isomer of the ncAAs by dissolving the ncAA in 90% of the final volume ddH2O and vortexing thoroughly. The addition of NaOH may be required to fully dissolve the ncAA. Add ddH2O to a final volume and sterile filter using a 0.2 m filter before use. Use immediately or store at 4° C.

[0303] 8. Kits, containers and instruments needed:

[0304] A) Zymo Research Frozen-EZ Yeast Transformation II Kit (Zymo Research).

[0305] B) Cryoprotectant isopropanol containers to slow-freeze competent yeast cells. An example of a suitable isopropanol container is the Thermo Scientific™ Mr. Frosty™ (Thermo Fisher catalog number 5100-0001).

[0306] C) Sterile 1.7 mL microcentrifuge tubes.

[0307] D) Sterile polyethylene culture tubes.

[0308] E) Sterile 15 mL polypropylene conical tubes.

[0309] F) Benchtop vortexer.

[0310] G) Benchtop centrifuge for spinning culture tubes.

[0311] H) Stationary incubator at 30° C. (for yeast plate incubation).

[0312] I) Shaking incubator at 30° C., 300 rpm (for yeast liquid culture growth).

[0313] J) Shaking incubator at 20° C., 300 rpm (for induction of liquid cultures).

[0314] K) NanoDrop or other spectrophotometer for measuring yeast culture density.

[0315] 9. Flow Cytometry system for Flow Cytometry- and Microplate Reader-based evaluation of ncAA Incorporation events.

[0316] A) Refrigerated benchtop centrifuge for spinning microcentrifuge tubes.

[0317] B) Rotary wheel at room temperature.

[0318] C) Flow cytometer.

[0319] D) Flow cytometry data analysis software.

[0320] E) Spectrophotometric microplate reader.

[0321] F) Flow cytometry tubes compatible with available flow cytometer.

[0322] G) 96-well microplates compatible with available flow cytometer for large-scale experiments (provided that the flow cytometer has an autosampler).

[0323] H) Adhesive foil for covering 96-well microplates.

[0324] I) Primary antibodies: Chicken anti-c-Myc (Gallus Immunotech) and Mouse anti-HA antibody (BioLegend).

[0325] J) Secondary antibodies: Goat anti-chicken Alexa Fluor 647 (Invitrogen); Goat anti-chicken Alexa Fluor 488 (Invitrogen); Goat anti-mouse Alexa Fluor 488 (Invitrogen).

[0326] K) 96-well clear bottom black-walled microplates.

[0327] 10. Bioorthogonal Reactions with ncAAs on the yeast surface.

[0328] A) Rotary wheel at 4° C.

[0329] B) 1×PBS, pH 7.4: Mix 8 g sodium chloride, 0.2 g potassium chloride, 1.44 g sodium phosphate dibasic (anhydrous), and 0.24 g potassium phosphate monobasic (anhydrous) in 1 L ddH2O. Use hydrochloric acid or sodium hydroxide to adjust the pH to 7.4. Sterile filter using a 0.2 m filter and store at room temperature.

[0330] C) Sterile PBS+0.1% bovine serum albumin (BSA), pH 7.4 (PBSA): Add 1 g BSA to 1 L1×PBS, pH 7.4, dissolve, and sterile filter using a 0.2 m filter. Store at room temperature.

[0331] D) 20 mM copper sulfide (CuSO4): Dissolve 0.0050 g of CuSO4 powder (MW 249.68 g/mol) in 1 mL ddH2O by vortexing. Store at 4° C.

[0332] E) 50 mM Tris(benzyltriazolylmethyl)amine (THPTA): Dissolve 0.0217 g THPTA powder (MW 434.50 g/mol) in 1 mL ddH2O by vortexing. Store at 4° C.

[0333] F) 1:2 solution of 20 mM CuSO4: 50 mM THPTA: Combine 20 mM CuSO4 and 50 mM THPTA at a 1:2 volume ratio. Prepare immediately prior to use.

[0334] G) 20 mM biotin-(PEG)4-alkyne or biotin-(PEG)4-azide: Dissolve biotin-(PEG)4-alkyne or biotin-(PEG)4-azide in dimethyl sulfoxide (DMSO). Store at −20° C. in a desiccant jar.

[0335] H) 200 mM cargo-alkyne or cargo-azide: Dissolve the cargo-alkyne or cargo-azide in ddH2O or DMSO for long-term storage at −20° C.

[0336] I) 100 mM aminoguanidine: Dissolve 0.011 g aminoguanidine HCl (MW 110.55 g/mol) in 1 mL ddH2O immediately prior to use.

[0337] J) 100 mM sodium ascorbate: Dissolve 0.020 g sodium ascorbate (MW 198.11 g/mol) in 1 mL ddH2O immediately prior to use.

[0338] K) 20 mM dibenzocyclooctyne-amine (DBCO)-biotin: Dissolve DBCO-biotin (MW=749.91 g/mol) in DMSO and store at −20° C. Dilute to 2 mM in DMSO prior to use.

[0339] L) 200 mM dibenzocyclooctyne-amine (DBCO)-cargo: Dissolve DBCO-cargo in DMSO.

[0340] 11. Click Chemistry Analysis

[0341] A) Secondary antibody: Streptavidin, Alexa Fluor 488 conjugate (Invitrogen).

[0342] 12. Preparation of Libraries Involving the Use of Orthogonal Translation Systems

[0343] A) A yeast display vector pCTCON2 that contains tryptophan marker for use in yeast and ampicillin marker for propagation in E. coli.

[0344] B) A constitutive expression vector pRS315-LeuOmeRS for orthogonal translation system comprising an E. coli leucyl-tRNA synthetase mutant and cognate tRNA. This vector contains leucine marker for use in yeast and ampicillin marker for propagation in E. coli.

[0345] C) Restriction enzymes NcoI and NdeI for preparing libraries of OTSs in pRS315-LeuOmeRS.

[0346] D) Restriction enzymes SalI, NheI, and BamHI for preparing libraries of POIs in pCTCON2.

[0347] E) DNA polymerase and corresponding buffers for PCR.

[0348] F) 10 mM dNTPs.

[0349] G) Thin-walled PCR tubes.

[0350] H) Template DNA for library amplification.

[0351] I) Primers for template amplification with homologous recombination flanking regions. Each protein library will contain different 5′ and 3′ ends and will need to be designed to accommodate the specific library design.

[0352] J) Additional primers needed to construct the library of interest.

[0353] K) Forward and reverse pCTCON2 sequencing primers.

[0354] L) Forward and reverse pRS315 sequencing primers.

[0355] M) Molecular biology-grade agarose.

[0356] N) Tris-acetate-EDTA (TAE) buffer (50×): Dissolve 242 g Tris base in ddH2O, then add 57.1 mL glacial acetic acid and 100 mL 500 mM EDTA, pH 8.0, and add ddH2O to 1 L. Store at room temperature.

[0357] O) Nucleic acid gel stain, DNA gel loading dye (1×), DNA molecular weight size marker.

[0358] P) DNA gel electrophoresis equipment: gel mold and extraction combs, gel box, voltage box, gel imager.

[0359] Q) Heat block set to 55° C. for melting agarose containing DNA fragments.

[0360] R) Gel extraction kit (Gel extraction buffer for melting agarose gel, DNA purification columns and wash buffers).

[0361] S) NanoDrop or other spectrophotometer for measuring DNA concentrations.

[0362] T) Sterile ddH2O chilled to 4° C.

[0363] U) Pellet Paint co-precipitant (EMD Millipore).

[0364] V) 70% ethanol in ddH2O and 100% ethanol.

[0365] W) SD-SCAA-LEU-URA media, pH 4.5:

[0366] Dissolve 20 g glucose, 6.7 g yeast nitrogen base without amino acids, 2 g synthetic casamino acids [25](-LEU-URA), and citrate buffer salts (10.4 g sodium citrate, 7.4 g citric acid monohydrate) in 1 L ddH2O. Filter sterilize using a 0.2 m filter and store at room temperature.

[0367] X) 100 mM lithium acetate (sterile) and 1 M dithiothreitol (DTT)

[0368] Y) 50 mL conical tubes and 2 mm electroporation cuvettes chilled on ice prior to use in electroporations

[0369] Z) Refrigerated benchtop centrifuge for spinning 50 mL conical tubes and for pelleting large volumes (1 L or greater)

[0370] AA) Bio-Rad Gene Pulser XCell Total System (Bio-Rad) or other electroporator with square wave protocol capability.

[0371] BB) Sterile 250 mL and 2 L flasks for liquid culture growth.

[0372] CC) Autoclavable centrifuge bottles (500 mL or greater capacity).

[0373] DD) Sterile 60% glycerol: Prepare a solution of 60% v/v glycerol in ddH2O and autoclave to sterilize. Store at room temperature.

[0374] EE) 2 mL cryogenic screw-cap vials.

[0375] FF) Zymoprep Yeast Plasmid Miniprep II kit (Zymo Research).

[0376] GG) Chemically competent E. coli.

[0377] HH) SOC medium: Mix 2 g bactotryptone, 0.5 g yeast extract, 0.2 mL 5 M NaCl, and 0.2 mL 1.25 M KCl in ddH2O to approximately 97 mL and autoclave to sterilize. Under sterile conditions, add 1 mL sterile 1 M MgCl2 and 1.8 mL sterile 20% glucose. Store at room temperature.

[0378] II) Luria-Bertani (LB) medium (available as premixed powder or use the following recipe: for 1 L, mix 10 g tryptone, 5 g yeast extract, and 10 g sodium chloride in 1 L ddH2O and autoclave to sterilize). Store at room temperature.

[0379] JJ) 2000× ampicillin stock: Dissolve ampicillin in ddH2O at 100 mg/mL and sterile filter using a 0.2 m filter. Store at −20° C. for up to 1 year or at 4° C. for up to 1 month. The working concentration of ampicillin in liquid or solid media is 50 μg/mL.

[0380] KK) Luria-Bertani (LB) plates with antibiotics: Mix 5 g tryptone, 2.5 g yeast extract, 5 g sodium chloride, and 7.5 g agar in 500 mL ddH2O with a stir bar in a 1 L bottle.

[0381] Autoclave to sterilize, allow media to cool with stirring to 55° C., add ampicillin, and pour plates. This recipe is expected to produce approximately 40-50, 100 mm plates. Store at 4° C.

[0382] LL) E. coli plasmid DNA miniprep kit such as those sold by Qiagen, Epoch Life Science, or Zymo Research.

### Methods

[0383] 1. Site-specific Incorporation of ncAAs in Proteins in Yeast

[0384] (a) Prepare chemically competent yeast by first streaking out cells from a glycerol or other stock on a YPD plate. Grow at 30° C. in a stationary incubator for 1-2 days, then inoculate a single, isolated colony from the YPD plate into a 5 mL YPD culture supplemented with penicillin-streptomycin. Grow the culture at 30° C. in a shaking incubator overnight or until the culture is saturated, then dilute 500 μL into 4.5 mL YPD supplemented with penicillin-streptomycin and grow for another 4-6 h at 30° C. in a shaking incubator.

[0385] Continue to prepare cells using a kit such as the Zymo Research Frozen-EZ Yeast Transformation II Kit. Chemically competent yeast can be used immediately or frozen in a cryoprotectant container at −80° C.

[0386] (b) Using the same yeast chemical competence preparation and transformation kit, transform the plasmid DNA of interest into the cells. For yeast-displayed proteins, prepare the following separate transformations: pPOIVector-TAG and pOTSVector, pPOIVector-WT and pOTSVector, and the pPOIVector-WT only (this serves as a control for yeast display). For intracellular proteins, only the pPOIVector-TAG/pOTSVector and pPOIVector-WT/pOTSVector combinations are necessary. Plate on selective media for retention of the specific combinations of plasmids. Grow at 30° C. in a stationary incubator for 2-3 days.

[0387] (c) For each non-control plasmid combination, inoculate three single, isolated colonies from the selective media plate into three 5 mL selective media cultures supplemented with penicillin-streptomycin. For yeast-displayed protein controls, only one culture is needed. Note that separate cultures of yeast that do not contain any plasmid DNA are necessary for microplate reader-based data collection. Grow the cultures at 30° C. in a shaking incubator until the culture is saturated, then dilute each culture to OD600 of 1 in 5 mL of the identical growth media supplemented with penicillin-streptomycin until the OD600 is between 2 and 5 (this should take 4-6 h). Induce each culture at OD600 of 1 in 2 mL galactose-containing selective media supplemented with penicillin-streptomycin. For each POI, prepare a culture with no ncAA, and one tube each for the ncAAs of interest. Incubate cultures at 20° C. in a shaking incubator for 16 h.

2. Flow Cytometry- and Microplate Reader-Based Evaluation of ncAA Incorporation Events in Yeast

[0388] (a) To prepare cells with yeast-displayed POIs for flow cytometry, begin by removing two million cells to microcentrifuge tubes. Centrifuge to pellet, aspirate supernatant, and resuspend each pellet in 1 mL PBSA to wash. Repeat the wash twice more and then resuspend each sample in 50 μL PBSA with the necessary primary label(s), then incubate on a rotary wheel for 30 min at room temperature. Following this step, all steps should be performed on ice or in a refrigerated centrifuge at 4° C. to reduce label dissociation. Dilute each sample with 950 μL ice-cold PBSA, centrifuge to pellet, and aspirate supernatant. Wash twice more with ice-cold PBSA, then resuspend each sample in 50 μL PBSA with the necessary secondary label(s). Incubate on ice in the dark for 15 min. Cells can be immediately resuspended and evaluated on the flow cytometer or kept as wet pellets on ice or at 4° C. in the dark for short periods before evaluation.

[0389] (b) To prepare cells with intracellular POIs for flow cytometry, begin by removing two million cells to microcentrifuge tubes. Centrifuge to pellet, aspirate supernatant, and resuspend each pellet in 1 mL PBSA to wash. Repeat the wash twice more for a total of three washes. Cells can be immediately resuspended and evaluated on the flow cytometer or kept as wet pellets on ice or at 4° C. for short periods before evaluation.

[0390] (c) To prepare cells with intracellular POIs for microplate reader assays, begin by removing two million cells to microcentrifuge tubes. Centrifuge to pellet, aspirate supernatant, and resuspend each pellet in 1 mL PBSA to wash. Repeat the wash twice more for a total of three washes. Cells can be immediately resuspended and evaluated on the microplate reader or kept as wet pellets on ice or at 4° C. for short periods before evaluation. Samples should be resuspended and transferred to 96-well black wall microplates, taking care not to introduce any air bubbles, prior to being evaluated on the microplate reader.

### 3. Flow Cytometry Data Analysis for Relative Readthrough Efficiency (RRE) and Maximum Misincorporation Frequency (MMF)

[0391] (a) To begin isolating single cells, draw a polygon gate on the unlabeled yeast sample on a log plot of side scatter (SSC) area versus forward scatter (FSC) area. This population is now called Gate 1 and contains cells that are morphologically similar and are likely to be alive based on size and scatter.

[0392] (b) Within Gate 1, draw a polygon gate on a log plot of FSC height versus FSC width. This population is now called Gate 2 and contains single cells while excluding doublets, triplets, or other groups of cells. Further isolation of the single-cell populations may be possible on some flow cytometers (such as with SSC height versus SSC width).

[0393] (c) Within Gate 2, prepare a dot plot with axes set to the fluorescence heights corresponding to detection of the C-terminus and N-terminus. For samples with only C-terminus detection ability (e.g., GFP-only samples), the second axis should be set to another fluorescence detection channel that is not expected to have crosstalk with the C-terminus detection channel.

[0394] (d) For samples with dual-terminus detection capability, gate the population of cells with above-background levels of N-terminus detection on the Gate 2 histogram plot of N-terminus detection.

4. Bioorthogonal Reactions with ncAAs on the Yeast Surface

[0395] (a) One-step click chemistry is used as a control for reacting available azide or alkyne functional groups that have been genetically encoded in the protein of interest on the yeast surface with a probe that can be labeled and detected on a flow cytometer, such as biotin. Step 1: react the surface-displayed protein with an encoded ncAA containing an azide or alkyne functional group with an alkyne- or azide-biotin, or cyclooctyne-biotin for use with azide functional groups only (strain-promoted click chemistry).

[0396] (b) Two-step click chemistry. Step 1: react the surface-displayed protein with an encoded ncAA containing an azide or alkyne functional group with an alkyne- or azide-cargo, or cyclooctyne-cargo for use with azide functional groups only (strain-promoted click chemistry). The outcome of the first step may include a mixture of unreacted proteins and cargo-modified proteins. Step 2: react the population of yeast from the first step with an alkyne- or azide-biotin, or cyclooctyne-biotin (for use with azide functional groups only; strain-promoted click chemistry). The products of the second step are expected to be a mixture of cargo-modified proteins and biotin-modified proteins (reactions with biotin probes should be performed under conditions known to lead to complete reactions to avoid unreacted functional groups, shown in brackets).

[0397] (c) The level of chemical modification with the cargo of interest can be evaluated by determining the extent of reaction. The background-subtracted one-step biotin detection and background-subtracted two-step biotin detection are required for this calculation. CuAAC: copper-catalyzed azide-alkyne cycloaddition. SPAAC: strain-promoted azide-alkyne cycloaddition.

### 5. Click Chemistry Analysis: Flow Cytometry and Extent of Reaction Calculations

[0398] Details of click chemistry analysis are shown in for example, Stieglitz and Deventer 2022 Biomedical Engineering Technologies. Methods in Molecular Biology, vol 2394.

[0399] Humana, New York, NY.

[0400] 6. Preparation of Libraries Involving the Use of Orthogonal Translation Systems

[0401] (a) To prepare a library of OTSs, begin by performing a double restriction enzyme digest on the pRS315-LeuOmeRS plasmid. Note that other OTS expression vectors can be used with corresponding restriction enzymes specific to that vector. Evaluate on a DNA gel and extract the band corresponding to the vector with no OTS insert. Amplify the OTS library insert(s) via PCR with primers containing the desired degenerate codon(s) or mutation(s), then evaluate and extract from a DNA gel. Follow Pellet Paint manufacturing protocols to concentrate the pooled OTS and vector DNA. Separately, prepare yeast cells that only contain a ncAA incorporation reporter.

[0402] (b) To prepare a library of POIs, begin by performing a triple restriction enzyme digest on pCTCON2. Note that other yeast display vectors can be used with corresponding restriction enzymes specific to that vector. Evaluate on a DNA gel and extract the band corresponding to the vector with no POI insert. Amplify the POI library insert(s) via PCR with primers containing the desired degenerate codon(s) or mutation(s), then evaluate and extract from a DNA gel. Follow Pellet Paint manufacturing protocols to concentrate the pooled POI and vector DNA. Separately, prepare yeast cells that only contain the pOTSVector.

[0403] (c) Prepare electrocompetent cells then combine with the concentrated library and vector DNA and electroporate. Recover each electroporated sample with 2 mL YPD at 30° C. for 1 h with no shaking. Also, pre-warm one selective media plate for each sample at this time. To determine the transformation efficiency, prepare four serial dilutions of each sample and plate on quadrants of the selective media plates. Grow at 30° C. for 3-4 days and determine a number of the colonies in each quadrant to determine the approximate number of transformants. Centrifuge the remainder of the recovered samples and aspirate the YPD, then resuspend each pellet in 100 mL selective media supplemented with penicillin-streptomycin and grow at 30° C. with shaking for 1-2 days until saturated. Centrifuge the culture to pellet, decant supernatant, and resuspend in 1 L selective media supplemented with penicillin-streptomycin. At this point, remove 200 μL of the 1 L cultures and set aside for additional characterization steps. Grow at 30° C. for 1-2 days until saturated, then centrifuge and resuspend the entire pellet in 5 mL 60% glycerol. Freeze library at −80° C. Take the 200 μL removed after passaging to 1 L and propagate for flow cytometry characterization. Also, use a yeast DNA purification “miniprep” kit such as the Zymoprep Yeast Plasmid Miniprep II kit to isolate the plasmid DNA and characterize the constructed library or libraries.

### Example 6: Yeast Strain with Synthetic Genome

[0404] This example uses an assembly strategy to generate an yeast strain with synthetic genome. Yeast has 16 chromosomes (ChrI to ChrXVI). In some embodiments, an assembly strategy may comprise endogenous homologous recombination machinery to replace one or more of 30- to 60-kilobase segments of each wild-type chromosome with the corresponding synthetic sequence. A chromosome can be computationally divided into 30-60 kilobase long “megachunks,” each comprising a set of “chunks” of segments that is less than about 10 kilobase in length. These “chunks” can be assembled into “megachunks” by restriction enzyme cutting and ligation in vitro, or any other methods known in the art. The “megachunks” can be subsequently integrated into the host genome, e.g., an yeast genome, replacing the corresponding wile-type segment.

[0405] In some embodiments, “megachunks” can be introduced sequentially from left to right (i.e., from 5′ to 3′ direction) using the endogenous homologous recombination machinery and termini. In some embodiments, the termini may comprise a terminal universal telomere cap (UTC) sequences, for the first and last “megachunk” extremities. In some embodiments, the termini may comprise terminal sequences of up to 500 bp that can facilitate integration into a partially synthetic, partially native chromosome. In some embodiments, “chunks” and/or “megachunks” may comprise a selectable marker. In some embodiments, the right most “chunk” in each “megachunk” (i.e., a “chunk” in the most 3′ side of a “megachunk”) may comprise a selectable marker. For example, the selectable marker can be any auxotrophic marker. In some embodiments, an auxotrophic marker may comprise URA3, LYS2, LEU2, TRP1, HIS3, MET15, or ADE2. In some embodiments, the selectable marker may be LEU2 or URA3. In some embodiments, as each “megachunk” is introduced, the previously used marker is overwritten as a consequence of homologous recombination with the incoming “megachunk.” In some embodiments, if the first “megachunk” is tagged with LEU2, the second “megachunk” is tagged with another marker, such as URA3. In some embodiments, two markers can be alternated. For example if the first “megachunk” is tagged with LEU2, the second “megachunk” is tagged with URA3, and the third “megachunk” is tagged with LEU2.

[0406] In other embodiments, “chunks” can be provided as a series of “minichunks” that overlap with each other and can be recombined with each other. In this embodiment, the series of “minichunks” can be integrated into the genome simultaneously by using a selective marker (e.g., auxotrophic marker) switching. In some embodiments, the first (5′) “megachunk” of a synthetic chromosome may be provided with a telomere seed sequence (TeSS) within the larger UTC fragment. In some embodiments, the last (3′) “megachunk” of a synthetic chromosome may be provided with a terminal sequence homology targeting the wild type chromosome. In some embodiments, the TeSS end may be designed to grow a new telomere. In some embodiments, the TeSS may not participate in homologous recombination. In some embodiments, the last or the rightmost “megachunk” of a synthetic chromosome (i.e., the“megachunk” of the 5′ end of a synthetic chromosome) may comprise a selectable marker. In some embodiments, the last or the rightmost “megachunk” of a synthetic chromosome (i.e., the“megachunk” of the 5′ end of a synthetic chromosome) may not comprise a selectable marker. In this embodiments, the second-to-last “megachunk” may comprise a URA3 marker. In this embodiment, selection for the last “megachunk” can be provided by 5-fluoroorotic acid (5′FOA) resistance phenotype conferred by the last “megachunk” as it overwrites the URA3 marker from the second-to-last “megachunk.”

[0407] In some embodiments, integration may comprise utilizing an inducible genome rearrangement system. In some embodiments, the inducible genome arrangement system may be based on a chemically inducible Cre recombinase. In some embodiments, a palindromic recombination site loxPsym may be inserted in the genome. In some embodiments, the palindromic recombination site loxPsym may be inserted 3 bp downstream of the stop codon of an nonessential gene/ORF.

[0408] Next, the assembled synthetic chromosomes are sequenced to verify and quantify the synthetic content of the genome. A “PCRTagging” watermark system can be used by introducing slight nucleotide sequence alterations through synonymous recoding within ORFs to specify pairs of primers specific to either the wild type or synthetic version of that gene/ORFs. In addition synthetic chromosomes are validated by whole-genome sequencing. In some embodiments, “semisynthetic” strains may be sequenced at major intervals during assembly (e.g., 300 to 500 kb integrated) in order to identify major structural variants that occur at about that frequency and to eliminate them early in assembly.

[0409] In addition, the fitness of the resulting recombinant semi-synthetic yeast strains is assessed, and any substitution that proves lethal or leads to a measurable fitness defect can be corrected. The correction can be done by reverting the sequence to wild type (“debugging”). The hierarchical nature of the assembly scheme can facilitate debugging, as specific designer features for codon rewriting can be corrected and fixed once bugs are identified. In some embodiments, this can facilitate a “design-build-assemble-test-learn” cycle used in the final stage of production of synthetic chromosomes.

[0410] Once assembly of the various synthetic chromosomes is completed, an efficient meiotic strategy can be used to combine all synthetic chromosomes. In one embodiment, synthetic chromosomes can be consolidated into a single strain by mating and sporulation. In another embodiment, a conditional chromosome destabilization can used (e.g., endoreduplication intercross). In this embodiment, a centromere function of two specified native chromosomes may be simultaneously disrupted in a doubly heterozygous diploid synthetic strain (e.g., synIII/III VI/synVI). In some embodiments, this can be performed by using the GAL1 promoter in cis to generate a “2n-2” strain. In some embodiments, each chromosome can be individually lost, in diploids, yielding hemizygotes for the destabilized chromosome. In some embodiments, most such “2n−1” strains may endoreduplicate the remaining single chromosomes to regenerate a 2n state. In some embodiments, conditional chromosome destabilization can be used to backcross synthetic strains to wild type, called an “endoreduplication backcross,” to revert the sequence to wild type or to debug. Diploid strains can be sporulated to produce haploid strains. Karyotypic analysis by pulsed-field gel electrophoresis in the haploid strains can be used to visualize mobility shifts of synthetic chromosomes in resulting haploid strains to compare with wild type chromosomes.

TABLE 9

| | context_ | | codon_ | codon_ | | | | | | context_ | | most_ | most_ | codon_ |
|---|---|---|---|---|---|---|---|---|---|---|---|---|---|---|
| context | aa | cnt | cnt | cnt_null | df | q | spq | pval | sppval | cnt | ratio | depleted | enriched | order |
| AAA_E_ | K_E_H | GAA | 48 | 71.985 | 1 | 24.1099 | 26.5398216 | 9.09888239 | 2.581612945 | 103 | 1.64009178 | 1.5:AAAG | 1.8:AAAG | GAG |
| CAT | | GAG | 55 | 31.015 | | 5241714 | 25614287 | 4258296e- | 690416e-07 | | 54724906 | AACAT | AGCAT | GAA |
| | | | | | | 5713 | | 07 | | | | | | |
| AAA_F_ | K_F_K | TTC | 147 | 104.375 | 1 | 28.6276 | 29.3120062 | 8.77206294 | 6.161276024 | 257 | 1.39940978 | 1.4:AAATT | 1.4:AAATT | TTC |
| AAA | | TTT | 110 | 152.625 | | 4987340 | 28969352 | 336009e-08 | 059292e-08 | | 38973951 | TAAA | CAAA | TTT |
| | | | | | | 03 | | | | | | | | |
| AAA_F_ | K_F_K | TTC | 99 | 60.919 | 1 | 39.2560 | 40.0836699 | 3.71706546 | 2.433145213 | 150 | 1.66546229 | 1.7:AAATT | 1.6:AAATT | TTC |
| AAG | | TTT | 51 | 89.081 | | 9338219 | 30238244 | 89789557e- | 2630965e-10 | | 97232904 | TAAG | CAAG | TTT |
| | | | | | | 992 | | 10 | | | | | | |
| AAA_F_ | K_F_N | TTC | 118 | 77.570 | 1 | 34.6562 | 35.4822812 | 3.93368270 | 2.573812437 | 191 | 1.53359004 | 1.6:AAATT | 1.5:AAATT | TTC |
| AAT | | TTT | 73 | 113.430 | | 7625902 | 4451543 | 19891175e- | 876598e-09 | | 76184237 | TAAT | CAAT | TTT |
| | | | | | | 542 | | 09 | | | | | | |
| AAA_G_ | K_G_V | GGA | 10 | 24.383 | 3 | 48.3785 | 46.6134562 | 1.76893247 | 4.199972094 | 109 | 1.85991217 | 2.7:AAAG | 1.7:AAAG | GGT |
| GTT | | GGC | 8 | 21.552 | | 5225584 | 1201848 | 21373004e- | 283413e-10 | | 01214172 | GCGTT | GTGTT | GGA |
| | | GGG | 6 | 13.539 | | 942 | | 10 | | | | | | GGC |
| | | GGT | 85 | 49.526 | | | | | | | | | | GGG |
| AAA_G_ | K_G_F | GGA | 49 | 32.884 | 3 | 47.2663 | 52.6559926 | 3.05044196 | 2.170626706 | 147 | 1.74431562 | 1.9:AAAG | 2.2:AAAG | GGA |
| TTT | | GGC | 21 | 29.066 | | 9131215 | 89022305 | 5528308e- | 764458e-11 | | 65060125 | GTTTT | GGTTT | GGG |
| | | GGG | 41 | 18.259 | | 286 | | 10 | | | | | | GGT |
| | | GGT | 36 | 66.792 | | | | | | | | | | GGC |
| AAA_I_ | K_I_K | ATA | 129 | 110.913 | 2 | 32.1661 | 31.7414226 | 1.03564841 | 1.280671187 | 398 | 1.30801881 | 1.4:AAAA | 1.4:AAAA | ATC |
| AAA | | ATC | 139 | 102.760 | | 3587033 | 9036615 | 22176173e- | 5521908e-07 | | 05713606 | TTAAA | TCAAA | ATT |
| | | ATT | 130 | 184.327 | | 305 | | 07 | | | | | | ATA |
| AAA_I_ | K_I_N | ATA | 89 | 83.881 | 2 | 31.8469 | 32.6851395 | 1.21486853 | 7.989362683 | 301 | 1.33755172 | 1.5:AAAA | 1.5:AAAA | ATC |
| AAT | | ATC | 116 | 77.716 | | 1956554 | 0322449 | 36582085e- | 58876e-08 | | 64842502 | TTAAT | TCAAT | ATT |
| | | ATT | 96 | 139.403 | | 1185 | | 07 | | | | | | ATA |
| AAA_K_ | K_K_K | AAA | 198 | 277.462 | 1 | 53.1791 | 54.0877517 | 3.04468837 | 1.917327143 | 479 | 1.39718853 | 1.4:AAAA | 1.4:AAAA | AAG |
| AAA | | AAG | 281 | 201.538 | | 7981993 | 1829723 | 8386057e- | 2196194e-13 | | 13842118 | AAAAA | AGAAA | AAA |
| | | | | | | 921 | | 13 | | | | | | |
| AAA_K_ | K_K_K | AAA | 135 | 209.111 | 1 | 61.4677 | 62.4256746 | 4.50046808 | 2.766924028 | 361 | 1.51046476 | 1.5:AAAA | 1.5:AAAA | AAG |
| AAG | | AAG | 226 | 151.889 | | 8461002 | 6430538 | 5192229e- | 664213e-15 | | 28183967 | AAAAG | AGAAG | AAA |
| | | | | | | 323 | | 15 | | | | | | |
| AAA_K_ | K_K_M | AAA | 141 | 107.162 | 1 | 27.1873 | 25.3951694 | 1.84662713 | 4.670862469 | 185 | 1.41174206 | 1.8:AAAA | 1.3:AAAA | AAA |
| ATG | | AAG | 44 | 77.838 | | 5277235 | 9664933 | 16092957e- | 136582e-07 | | 35658593 | AGATG | AAATG | AAG |
| | | | | | | 0522 | | 07 | | | | | | |
| AAA_K_ | K_K_Q | AAA | 82 | 127.436 | 1 | 37.9143 | 38.5020546 | 7.39192005 | 5.469607231 | 220 | 1.51412066 | 1.6:AAAA | 1.5:AAAA | AAG |
| CAA | | AAG | 138 | 92.564 | | 5864707 | 29316895 | 8302951e- | 202917e-10 | | 37027087 | AACAA | AGCAA | AAA |
| | | | | | | 641 | | 10 | | | | | | |
| AAA_K_ | K_K_E | AAA | 176 | 235.756 | 1 | 35.3955 | 35.9982972 | 2.69099564 | 1.974900328 | 407 | 1.34486776 | 1.3:AAAA | 1.3:AAAA | AAG |
| GAA | | AAG | 231 | 171.244 | | 6041850 | 50677425 | 21538124e- | 9252396e-09 | | 50038756 | AAGAA | AGGAA | AAA |
| | | | | | | 71 | | 09 | | | | | | |
| AAA_K_ | K_K_W | AAA | 90 | 63.718 | 1 | 28.6010 | 25.7655117 | 8.89336765 | 3.855160622 | 110 | 1.54512404 | 2.3:AAAA | 1.4:AAAA | AAA |
| TGG | | AAG | 20 | 46.282 | | 5585771 | 92210464 | 8020597e- | 4489134e-07 | | 48630073 | AGTGG | AATGG | AAG |
| | | | | | | 646 | | 08 | | | | | | |
| AAA_L_ | K_L_K | CTA | 97 | 89.779 | 5 | 71.7277 | 72.9263650 | 4.47621052 | 2.518412585 | 634 | 1.29866112 | 2.0:AAACT | 1.7:AAAC | TTG |
| AAA | | CTC | 37 | 36.611 | | 0464090 | 2089923 | 62420036e- | 77527e-14 | | 86451626 | TAAA | TGAAA | TTA |
| | | CTG | 124 | 71.717 | | 058 | | 14 | | | | | | CTG |
| | | CTT | 40 | 81.433 | | | | | | | | | | CTA |
| | | TTA | 133 | 174.967 | | | | | | | | | | CTT |
| | | TTG | 203 | 179.493 | | | | | | | | | | CTC |
| AAA_L_ | K_L_Y | CTA | 44 | 28.322 | 5 | 62.7377 | 68.4375542 | 3.29891567 | 2.165854189 | 200 | 1.69101289 | 2.0:AAATT | 2.2:AAAC | CTT |
| TAT | | CTC | 14 | 11.549 | | 9136561 | 7182992 | 90336927e- | 129951e-13 | | 78555763 | GTAT | TTTAT | CTA |
| | | CTG | 25 | 22.624 | | 3695 | | 12 | | | | | | TTA |
| | | CTT | 56 | 25.689 | | | | | | | | | | TTG |
| | | TTA | 32 | 55.195 | | | | | | | | | | CTG |
| | | TTG | 29 | 56.622 | | | | | | | | | | CTC |
| AAA_L_ | K_L_S | CTA | 44 | 24.073 | 5 | 71.6024 | 79.1646955 | 4.75328871 | 1.254793964 | 170 | 1.93381903 | 2.0:AAATT | 2.2:AAAC | CTT |
| TCC | | CTC | 16 | 9.817 | | 8719991 | 8928256 | 8920618e- | 396139e-15 | | 6190981 | GTCC | TTTCC | CTA |
| | | CTG | 10 | 19.230 | | 46 | | 14 | | | | | | TTA |
| | | CTT | 49 | 21.835 | | | | | | | | | | TTG |
| | | TTA | 27 | 46.915 | | | | | | | | | | CTC |
| | | TTG | 24 | 48.129 | | | | | | | | | | CTG |
| AAA_L_ | K_L_S | CTA | 52 | 37.101 | 5 | 49.7559 | 47.2536667 | 1.55464310 | 5.043573378 | 262 | 1.38398276 | 2.2:AAATT | 1.7:AAAC | TTA |
| TCT | | CTC | 22 | 15.130 | | 5708313 | 5023515 | 37338621e- | 994853e-09 | | 82959014 | GTCT | TTTCT | CTT |
| | | CTG | 26 | 29.637 | | 0426 | | 09 | | | | | | CTA |
| | | CTT | 56 | 33.652 | | | | | | | | | | TTG |
| | | TTA | 73 | 72.305 | | | | | | | | | | CTG |
| | | TTG | 33 | 74.175 | | | | | | | | | | CTC |
| AAA_L_ | K_L_L | CTA | 73 | 47.439 | 5 | 46.6967 | 45.7297796 | 6.55037912 | 1.030836046 | 335 | 1.39347755 | 1.8:AAATT | 1.5:AAAC | TTA |
| TTA | | CTC | 12 | 19.345 | | 6479627 | 4832812 | 4659852e- | 3917905e-08 | | 1864934 | GTTA | TATTA | CTA |
| | | CTG | 29 | 37.894 | | 845 | | 09 | | | | | | CTT |
| | | CTT | 61 | 43.028 | | | | | | | | | | TTG |
| | | TTA | 106 | 92.451 | | | | | | | | | | CTG |
| | | TTG | 54 | 94.843 | | | | | | | | | | CTC |
| AAA_L_ | K_L_L | CTA | 69 | 48.288 | 5 | 57.2982 | 63.8667660 | 4.38937556 | 1.925196034 | 341 | 1.46412063 | 1.8:AAACT | 1.9:AAAC | CTT |
| TTG | | CTC | 11 | 19.691 | | 7538833 | 8224829 | 177538e-11 | 7471175e-12 | | 65451591 | CTTG | TTTTG | TTA |
| | | CTG | 37 | 38.573 | | 7096 | | | | | | | | CTA |
| | | CTT | 84 | 43.799 | | | | | | | | | | TTG |
| | | TTA | 75 | 94.107 | | | | | | | | | | CTG |
| | | TTG | 65 | 96.541 | | | | | | | | | | CTC |
| AAA_R_ | K_R_K | AGA | 218 | 213.365 | 5 | 40.8801 | 39.8500024 | 9.92050700 | 1.601069743 | 450 | 1.23613893 | 1.8:AAAC | 1.5:AAAA | AGA |
| AAA | | AGG | 142 | 97.607 | | 8285596 | 70568754 | 4552373e- | 608348e-07 | | 61892405 | GTAAA | GGAAA | AGG |
| | | CGA | 23 | 30.729 | | 159 | | 08 | | | | | | CGT |
| | | CGC | 15 | 26.634 | | | | | | | | | | CGA |
| | | CGG | 17 | 18.783 | | | | | | | | | | CGG |
| | | CGT | 35 | 62.883 | | | | | | | | | | CGC |
| AAA_R_ | K_R_S | AGA | 24 | 32.716 | 5 | 49.1250 | 97.7784824 | 2.09240917 | 1.552785481 | 69 | 2.04215371 | 4.7:AAAC | 6.6:AAAC | AGA |
| TCG | | AGG | 16 | 14.966 | | 4927067 | 6844405 | 89529815e- | 6557929e-19 | | 3169908 | GATCG | GGTCG | CGG |
| | | CGA | 1 | 4.712 | | 867 | | 09 | | | | | | AGG |
| | | CGC | 4 | 4.084 | | | | | | | | | | CGT |
| | | CGG | 19 | 2.880 | | | | | | | | | | CGC |
| | | CGT | 5 | 9.642 | | | | | | | | | | CGA |
| AAA_S_ | K_S_D | AGC | 13 | 18.366 | 5 | 56.1105 | 57.3949013 | 7.71168255 | 4.192574029 | 163 | 1.59936744 | 4.3:AAATC | 2.1:AAAA | AGT |
| GAC | | AGT | 57 | 26.602 | | 1018113 | 5966844 | 5190532e- | 1932686e-11 | | 53277928 | CGAC | GTGAC | TCA |
| | | TCA | 42 | 34.104 | | 1204 | | 11 | | | | | | TCT |
| | | TCC | 6 | 25.594 | | | | | | | | | | TCG |
| | | TCG | 16 | 15.885 | | | | | | | | | | AGC |
| | | TCT | 29 | 42.450 | | | | | | | | | | TCC |
| AAA_V_ | K_V_S | GTA | 35 | 15.277 | 3 | 26.8593 | 32.6236085 | 6.30095857 | 3.866584480 | 71 | 1.87412893 | 1.8:AAAG | 2.3:AAAG | GTA |
| TCG | | GTC | 8 | 14.305 | | 3740594 | 3139053 | 4118555e- | 582239e-07 | | 21688612 | TCTCG | TATCG | GTT |
| | | GTG | 10 | 13.927 | | 439 | | 06 | | | | | | GTG |
| | | GTT | 18 | 27.491 | | | | | | | | | | GTC |
| AAC_E_ | N_E_L | GAA | 12 | 27.256 | 1 | 25.2674 | 28.3596018 | 4.99065335 | 1.007458670 | 39 | 2.29055011 | 2.3:AACG | 2.3:AACG | GAG |
| CTC | | GAG | 27 | 11.744 | | 2959736 | 06212172 | 5512901e- | 1243565e-07 | | 518358 | AACTC | AGCTC | GAA |
| | | | | | | 574 | | 07 | | | | | | |
| AAC_I_ | N_I_N | ATA | 40 | 37.900 | 2 | 28.3270 | 29.3153013 | 7.06078509 | 4.307875910 | 136 | 1.49226160 | 1.7:AACAT | 1.7:AACA | ATC |
| AAC | | ATC | 60 | 35.114 | | 7880451 | 93202116 | 5838089e- | 1191305e-07 | | 7992085 | TAAC | TCAAC | ATA |
| | | ATT | 36 | 62.986 | | 8614 | | 07 | | | | | | ATT |
| AAC_L_ | N_L_D | CTA | 21 | 28.038 | 5 | 39.9333 | 47.9939578 | 1.54028852 | 3.562024212 | 198 | 1.52629138 | 1.5:AACTT | 2.1:AACCT | CTT |
| GAT | | CTC | 20 | 11.434 | | 7056443 | 10554946 | 7229374e- | 229175e-09 | | 8410202 | AGAT | TGAT | TTG |
| | | CTG | 18 | 22.397 | | 664 | | 07 | | | | | | TTA |
| | | CTT | 54 | 25.432 | | | | | | | | | | CTA |
| | | TTA | 37 | 54.643 | | | | | | | | | | CTC |
| | | TTG | 48 | 56.056 | | | | | | | | | | CTG |
| AAC_N_ | N_N_N | AAC | 272 | 180.827 | 1 | 75.1647 | 77.0820189 | 4.33035805 | 1.640036839 | 448 | 1.50961647 | 1.5:AACA | 1.5:AACA | AAC |
| AAC | | AAT | 176 | 267.173 | | 2180471 | 4417269 | 8874999e- | 5057556e-18 | | 48918668 | ATAAC | ACAAC | AAT |
| | | | | | | 928 | | 18 | | | | | | |
| AAC_S_ | N_S_N | AGC | 69 | 32.337 | 5 | 96.8687 | 100.701442 | 2.41371629 | 3.760145627 | 287 | 1.73275796 | 2.3:AACTC | 2.1:AACA | TCC |
| AAC | | AGT | 64 | 46.839 | | 7638631 | 15739441 | 6834796e- | 0588833e-20 | | 31481 | TAAC | GCAAC | AGC |
| | | TCA | 33 | 60.048 | | 486 | | 19 | | | | | | AGT |
| | | TCC | 70 | 45.064 | | | | | | | | | | TCT |
| | | TCG | 18 | 27.969 | | | | | | | | | | TCA |
| | | TCT | 33 | 74.743 | | | | | | | | | | TCG |
| AAC_S_ | N_S_N | AGC | 91 | 40.788 | 5 | 96.6011 | 110.340910 | 2.74814486 | 3.470985636 | 362 | 1.64075225 | 1.8:AACTC | 2.2:AACA | AGT |
| AAT | | AGT | 92 | 59.079 | | 2872740 | 20471736 | 907625e-19 | 0757543e-22 | | 27464475 | TAAT | GCAAT | AGC |
| | | TCA | 52 | 75.740 | | 838 | | | | | | | | TCA |
| | | TCC | 48 | 56.841 | | | | | | | | | | TCT |
| | | TCG | 28 | 35.278 | | | | | | | | | | TCC |
| | | TCT | 51 | 94.275 | | | | | | | | | | TCG |
| AAC_S_ | N_S_S | AGC | 36 | 22.985 | 5 | 152.648 | 185.428995 | 3.64457549 | 3.704228326 | 204 | 2.31146482 | 3.3:AACTC | 3.0:AACTC | TCC |
| AGC | | AGT | 27 | 33.293 | | 5795373 | 21088634 | 4890808e- | 554208e-38 | | 562041 | TAGC | CAGC | AGC |
| | | TCA | 20 | 42.682 | | 5782 | | 31 | | | | | | AGT |
| | | TCC | 97 | 32.032 | | | | | | | | | | TCA |
| | | TCG | 8 | 19.880 | | | | | | | | | | TCT |
| | | TCT | 16 | 53.127 | | | | | | | | | | TCG |
| AAC_S_ | N_S_S | AGC | 39 | 18.366 | 5 | 55.3667 | 58.1325289 | 1.09716972 | 2.953540758 | 163 | 1.67758333 | 3.2:AACTC | 2.1:AACA | AGT |
| AGT | | AGT | 46 | 26.602 | | 2127933 | 5082524 | 30289936e- | 048283e-11 | | 00398977 | GAGT | GCAGT | AGC |
| | | TCA | 25 | 34.104 | | 188 | | 10 | | | | | | TCC |
| | | TCC | 27 | 25.594 | | | | | | | | | | TCA |
| | | TCG | 5 | 15.885 | | | | | | | | | | TCT |
| | | TCT | 21 | 42.450 | | | | | | | | | | TCG |
| AAC_S_ | N_S_D | AGC | 32 | 23.774 | 5 | 42.7806 | 40.8151210 | 4.09324678 | 1.022524545 | 211 | 1.43280703 | 2.8:AACTC | 1.7:AACA | AGT |
| GAT | | AGT | 59 | 34.436 | | 8251433 | 1630292 | 5897924e- | 1154318e-07 | | 99829893 | CGAT | GTGAT | TCA |
| | | TCA | 51 | 44.147 | | 714 | | 08 | | | | | | TCT |
| | | TCC | 12 | 33.131 | | | | | | | | | | AGC |
| | | TCG | 11 | 20.562 | | | | | | | | | | TCC |
| | | TCT | 46 | 54.950 | | | | | | | | | | TCG |
| AAC_V_ | N_V_N | GTA | 13 | 20.226 | 3 | 31.2258 | 38.3688038 | 7.61868764 | 2.361324374 | 94 | 1.79338785 | 1.6:AACGT | 2.3:AACG | GTC |
| AAC | | GTC | 43 | 18.939 | | 6991263 | 50243985 | 1115787e- | 739755e-08 | | 35491918 | AAAC | TCAAC | GTT |
| | | GTG | 12 | 18.439 | | 798 | | 07 | | | | | | GTA |
| | | GTT | 26 | 36.396 | | | | | | | | | | GTG |
| AAC_V_ | N_V_R | GTA | 6 | 21.733 | 3 | 179.729 | 241.640935 | 1.00915779 | 4.203868260 | 101 | 4.14034303 | 5.0:AACGT | 4.1:AACG | GTC |
| AGG | | GTC | 83 | 20.349 | | 1395128 | 58932362 | 17773843e- | 79788e-52 | | 7836222 | GAGG | TCAGG | GTT |
| | | GTG | 4 | 19.812 | | 5776 | | 38 | | | | | | GTA |
| | | GTT | 8 | 39.106 | | | | | | | | | | GTG |
| AAG_D_ | K_D_R | GAC | 23 | 10.029 | 1 | 24.3660 | 25.6436447 | 7.96621213 | 4.106456522 | 29 | 2.45085755 | 3.2:AAGG | 2.3:AAGG | GAC |
| CGA | | GAT | 6 | 18.971 | | 0508243 | 92995147 | 6234996e- | 4077895e-07 | | 38828326 | ATCGA | ACCGA | GAT |
| | | | | | | 7987 | | 07 | | | | | | |
| AAG_G_ | K_G_Q | GGA | 14 | 13.646 | 3 | 30.7075 | 36.2415115 | 9.79517155 | 6.657660303 | 61 | 1.92768701 | 2.5:AAGG | 2.5:AAGG | GGC |
| CAG | | GGC | 30 | 12.061 | | 4937623 | 245682 | 2486418e- | 837117e-08 | | 2664023 | GGCAG | GCCAG | GGT |
| | | GGG | 3 | 7.577 | | 7427 | | 07 | | | | | | GGA |
| | | GGT | 14 | 27.716 | | | | | | | | | | GGG |
| AAG_G_ | K_G_C | GGA | 9 | 13.646 | 3 | 62.7018 | 81.7268075 | 1.55530805 | 1.307950391 | 61 | 2.88158660 | 3.8:AAGG | 3.3:AAGG | GGC |
| TGT | | GGC | 40 | 12.061 | | 4000983 | 5441239 | 03723135e- | 4922733e-17 | | 9671602 | GGTGT | GCTGT | GGT |
| | | GGG | 2 | 7.577 | | 122 | | 13 | | | | | | GGA |
| | | GGT | 10 | 27.716 | | | | | | | | | | GGG |
| AAG_K_ | K_K_K | AAA | 265 | 341.180 | 1 | 39.7701 | 40.4278815 | 2.85671402 | 2.040089321 | 589 | 1.29839777 | 1.3:AAGA | 1.3:AAGA | AAG |
| AAG | | AAG | 324 | 247.820 | | 9517633 | 2948292 | 20205875e- | 2701188e-10 | | 80215326 | AAAAG | AGAAG | AAA |
| | | | | | | 735 | | 10 | | | | | | |
| AAG_K_ | K_K_E | AAA | 190 | 253.134 | 1 | 36.7991 | 37.4242353 | 1.30948508 | 9.503385179 | 437 | 1.33853716 | 1.3:AAGA | 1.3:AAGA | AAG |
| GAA | | AAG | 247 | 183.866 | | 3245132 | 1303803 | 4926872e- | 2649e-10 | | 60529113 | AAGAA | AGGAA | AAA |
| | | | | | | 5406 | | 09 | | | | | | |
| AAG_L_ | K_L_N | CTA | 40 | 37.809 | 5 | 58.7240 | 69.9500687 | 2.22985205 | 1.049605014 | 267 | 1.53777811 | 1.7:AAGCT | 2.3:AAGC | TTG |
| AAT | | CTC | 35 | 15.418 | | 1709631 | 604593 | 36983545e- | 3700203e-13 | | 86848625 | TAAT | TCAAT | CTG |
| | | CTG | 60 | 30.202 | | 444 | | 11 | | | | | | TTA |
| | | CTT | 20 | 34.294 | | | | | | | | | | CTA |
| | | TTA | 52 | 73.685 | | | | | | | | | | CTC |
| | | TTG | 60 | 75.591 | | | | | | | | | | CTT |
| AAG_L_ | K_L_L | CTA | 18 | 16.851 | 5 | 35.5465 | 44.0275815 | 1.17026379 | 2.286553729 | 119 | 1.64658458 | 1.7:AAGCT | 2.5:AAGC | CTT |
| CTT | | CTC | 4 | 6.872 | | 9578337 | 6630434 | 65352895e- | 1411365e-08 | | 16122573 | CCTT | TTCTT | TTA |
| | | CTG | 16 | 13.461 | | 9196 | | 06 | | | | | | TTG |
| | | CTT | 38 | 15.285 | | | | | | | | | | CTA |
| | | TTA | 23 | 32.841 | | | | | | | | | | CTG |
| | | TTG | 20 | 33.690 | | | | | | | | | | CTC |
| AAG_L_ | K_L_Y | CTA | 26 | 22.940 | 5 | 35.4853 | 41.8188151 | 1.20370954 | 6.409199244 | 162 | 1.51666329 | 1.7:AAGTT | 2.2:AAGC | CTT |
| TAT | | CTC | 8 | 9.355 | | 4698258 | 2542987 | 31984842e- | 415855e-08 | | 39821239 | GTAT | TTTAT | TTA |
| | | CTG | 21 | 18.325 | | 467 | | 06 | | | | | | TTG |
| | | CTT | 46 | 20.808 | | | | | | | | | | CTA |
| | | TTA | 34 | 44.708 | | | | | | | | | | CTG |
| | | TTG | 27 | 45.864 | | | | | | | | | | CTC |
| AAG_R_ | K_R_K | AGA | 111 | 125.648 | 5 | 32.6465 | 41.3480501 | 4.42321811 | 7.979941975 | 265 | 1.33703672 | 1.5:AAGC | 2.6:AAGC | AGA |
| AAA | | AGG | 74 | 57.480 | | 2483053 | 9812926 | 87449936e- | 512946e-08 | | 85586775 | GAAAA | GGAAA | AGG |
| | | CGA | 12 | 18.096 | | 877 | | 06 | | | | | | CGG |
| | | CGC | 13 | 15.684 | | | | | | | | | | CGT |
| | | CGG | 29 | 11.061 | | | | | | | | | | CGC |
| | | CGT | 26 | 37.031 | | | | | | | | | | CGA |
| AAG_T_ | K_T_L | ACA | 12 | 21.881 | 3 | 32.0574 | 42.7103379 | 5.08960496 | 2.835356495 | 72 | 1.87223062 | 1.8:AAGA | 2.9:AAGA | ACG |
| CTT | | ACC | 9 | 15.254 | | 3791264 | 81897965 | 7488929e- | 7541917e-09 | | 25029537 | CACTT | CGCTT | ACT |
| | | ACG | 29 | 10.099 | | 941 | | 07 | | | | | | ACA |
| | | ACT | 22 | 24.765 | | | | | | | | | | ACC |
| AAG_T_ | K_T_E | ACA | 46 | 31.911 | 3 | 31.7478 | 31.7462016 | 5.91446681 | 5.919314406 | 105 | 1.66846267 | 2.3:AAGA | 1.9:AAGA | ACA |
| GAG | | ACC | 15 | 22.246 | | 9036182 | 81660303 | 8320419e- | 19068e-07 | | 03521799 | CTGAG | CGGAG | ACG |
| | | ACG | 28 | 14.728 | | 9832 | | 07 | | | | | | ACT |
| | | ACT | 16 | 36.116 | | | | | | | | | | ACC |
| AAG_V_ | K_V_K | GTA | 17 | 32.707 | 3 | 30.1050 | 33.5503764 | 1.31158147 | 2.465057221 | 152 | 1.47455620 | 1.9:AAGG | 1.9:AAGG | GTC |
| AAG | | GTC | 58 | 30.624 | | 6620041 | 74424574 | 83957287e- | 5609197e-07 | | 00132517 | TAAAG | TCAAG | GTT |
| | | GTG | 26 | 29.816 | | 734 | | 06 | | | | | | GTG |
| | | GTT | 51 | 58.853 | | | | | | | | | | GTA |
| AAT_A_ | N_A_T | GCA | 33 | 76.327 | 3 | 43.3385 | 37.9353018 | 2.08560045 | 2.917038933 | 259 | 1.34627335 | 2.3:AATGC | 1.5:AATG | GCT |
| ACT | | GCC | 62 | 57.862 | | 2508124 | 8383374 | 26447976e- | 036e-08 | | 13408847 | AACT | CGACT | GCC |
| | | GCG | 43 | 29.613 | | 553 | | 09 | | | | | | GCG |
| | | GCT | 121 | 95.198 | | | | | | | | | | GCA |
| AAT_F_ | N_F_K | TTC | 117 | 80.413 | 1 | 27.3670 | 28.0302949 | 1.68272872 | 1.194310395 | 198 | 1.45363540 | 1.5:AATTT | 1.5:AATTT | TTC |
| AAA | | TTT | 81 | 117.587 | | 6510599 | 0488739 | 96116312e- | 6670442e-07 | | 46598348 | TAAA | CAAA | TTT |
| | | | | | | 7185 | | 07 | | | | | | |
| AAT_F_ | N_F_K | TTC | 101 | 64.168 | 1 | 34.8063 | 35.5987736 | 3.64186707 | 2.424401144 | 158 | 1.59965853 | 1.6:AATTT | 1.6:AATTT | TTC |
| AAG | | TTT | 57 | 93.832 | | 3390196 | 9669815 | 71177216e- | 032614e-09 | | 9423031 | TAAG | CAAG | TTT |
| | | | | | | 2255 | | 09 | | | | | | |
| AAT_F_ | N_F_N | TTC | 99 | 65.793 | 1 | 27.5603 | 28.2226833 | 1.52264471 | 1.081299109 | 162 | 1.51338926 | 1.5:AATTT | 1.5:AATTT | TTC |
| AAT | | TTT | 63 | 96.207 | | 9958168 | 83133337 | 9763884e- | 1735175e-07 | | 16042002 | TAAT | CAAT | TTT |
| | | | | | | 5992 | | 07 | | | | | | |
| AAT_G_ | N_G_L | GGA | 20 | 17.225 | 3 | 28.8505 | 32.7462968 | 2.40729331 | 3.642967937 | 77 | 1.66942416 | 2.2:AATG | 2.5:AATG | GGG |
| CTA | | GGC | 17 | 15.225 | | 9535538 | 94423274 | 35890936e- | 5444093e-07 | | 24050934 | GTCTA | GGCTA | GGA |
| | | GGG | 24 | 9.564 | | 1035 | | 06 | | | | | | GGC |
| | | GGT | 16 | 34.986 | | | | | | | | | | GGT |
| AAT_G_ | N_G_F | GGA | 55 | 36.015 | 3 | 59.6480 | 67.0465901 | 6.98922074 | 1.830142016 | 161 | 1.82749000 | 1.9:AATG | 2.4:AATG | GGA |
| TTT | | GGC | 21 | 31.834 | | 7832695 | 1481192 | 267279e-13 | 4242133e-14 | | 50289415 | GTTTT | GGTTT | GGG |
| | | GGG | 47 | 19.998 | | 4376 | | | | | | | | GGT |
| | | GGT | 38 | 73.153 | | | | | | | | | | GGC |
| AAT_I_ | N_I_K | ATA | 53 | 52.948 | 2 | 43.2681 | 45.7537837 | 4.02192203 | 1.160625439 | 190 | 1.50888026 | 1.8:AATAT | 1.8:AATAT | ATC |
| AAG | | ATC | 87 | 49.057 | | 8204909 | 9709355 | 04350116e- | 0283679e-10 | | 64623646 | TAAG | CAAG | ATA |
| | | ATT | 50 | 87.995 | | 483 | | 10 | | | | | | ATT |
| AAT_L_ | N_L_K | CTA | 39 | 58.342 | 5 | 69.9296 | 68.1488268 | 1.05992793 | 2.486857338 | 412 | 1.40124735 | 2.6:AATCT | 1.6:AATTT | TTG |
| AAA | | CTC | 28 | 23.791 | | 4330235 | 073247 | 70547842e- | 657898e-13 | | 50677285 | TAAA | GAAA | TTA |
| | | CTG | 46 | 46.604 | | 566 | | 13 | | | | | | CTG |
| | | CTT | 20 | 52.918 | | | | | | | | | | CTA |
| | | TTA | 96 | 113.701 | | | | | | | | | | CTC |
| | | TTG | 183 | 116.642 | | | | | | | | | | CTT |
| AAT_L_ | N_L_L | CTA | 29 | 37.951 | 5 | 41.0912 | 45.8368942 | 8.99284628 | 9.803677621 | 268 | 1.44323809 | 1.5:AATCT | 1.9:AATCT | TTA |
| TTA | | CTC | 11 | 15.476 | | 4682727 | 5280767 | 9250306e- | 41165e-09 | | 04792665 | GTTA | TTTA | CTT |
| | | CTG | 20 | 30.316 | | 4674 | | 08 | | | | | | TTG |
| | | CTT | 66 | 34.423 | | | | | | | | | | CTA |
| | | TTA | 89 | 73.961 | | | | | | | | | | CTG |
| | | TTG | 53 | 75.874 | | | | | | | | | | CTC |
| AAT_S_ | N_S_N | AGC | 71 | 39.323 | 5 | 49.6893 | 50.8110442 | 1.60418672 | 9.454936193 | 349 | 1.34996866 | 1.9:AATTC | 1.8:AATA | TCA |
| AAC | | AGT | 70 | 56.957 | | 5506568 | 80036946 | 71308293e- | 051422e-10 | | 48024654 | TAAC | GCAAC | AGC |
| | | TCA | 81 | 73.020 | | 9256 | | 09 | | | | | | AGT |
| | | TCC | 44 | 54.799 | | | | | | | | | | TCT |
| | | TCG | 34 | 34.011 | | | | | | | | | | TCC |
| | | TCT | 49 | 90.890 | | | | | | | | | | TCG |
| AAT_S_ | N_S_N | AGC | 101 | 62.083 | 5 | 59.5046 | 62.0048558 | 1.53840370 | 4.678560388 | 551 | 1.32783576 | 1.6:AATTC | 1.6:AATA | AGT |
| AAT | | AGT | 127 | 89.924 | | 9962126 | 2723733 | 92040555e- | 174597e-12 | | 5620404 | TAAT | GCAAT | TCA |
| | | TCA | 110 | 115.283 | | 79 | | 11 | | | | | | AGC |
| | | TCC | 75 | 86.517 | | | | | | | | | | TCT |
| | | TCG | 48 | 53.696 | | | | | | | | | | TCC |
| | | TCT | 90 | 143.496 | | | | | | | | | | TCG |
| AAT_S_ | N_S_R | AGC | 17 | 22.535 | 5 | 40.6015 | 46.3343745 | 1.12925900 | 7.764196636 | 200 | 1.51730967 | 1.7:AATTC | 1.9:AATTC | TCA |
| AGA | | AGT | 29 | 32.640 | | 6172397 | 3894892 | 49092499e- | 632157e-09 | | 18438794 | TAGA | AAGA | TCT |
| | | TCA | 80 | 41.845 | | 5706 | | 07 | | | | | | AGT |
| | | TCC | 27 | 31.404 | | | | | | | | | | TCC |
| | | TCG | 16 | 19.490 | | | | | | | | | | AGC |
| | | TCT | 31 | 52.086 | | | | | | | | | | TCG |
| AAT_S_ | N_S_S | AGC | 52 | 27.718 | 5 | 41.4273 | 42.4759048 | 7.69061995 | 4.718511863 | 246 | 1.35596341 | 2.0:AATTC | 1.9:AATA | AGT |
| AGT | | AGT | 53 | 40.148 | | 8983964 | 8005072 | 756558e-08 | 8997255e-08 | | 41429218 | TAGT | GCAGT | AGC |
| | | TCA | 51 | 51.469 | | 321 | | | | | | | | TCA |
| | | TCC | 39 | 38.627 | | | | | | | | | | TCC |
| | | TCG | 19 | 23.973 | | | | | | | | | | TCT |
| | | TCT | 32 | 64.066 | | | | | | | | | | TCG |
| AAT_T_ | N_T_N | ACA | 63 | 46.194 | 3 | 38.7053 | 33.0212603 | 2.00388222 | 3.187586829 | 152 | 1.46283312 | 2.8:AATAC | 1.4:AATA | ACA |
| AAC | | ACC | 45 | 32.203 | | 8896307 | 808999 | 57781667e- | 9917215e-07 | | 01773737 | TAAC | CCAAC | ACC |
| | | ACG | 25 | 21.320 | | 939 | | 08 | | | | | | ACG |
| | | ACT | 19 | 52.282 | | | | | | | | | | ACT |
| ACA_A_ | T_A_N | GCA | 59 | 27.702 | 3 | 45.5733 | 50.7296829 | 6.98895124 | 5.585750375 | 94 | 2.02723490 | 2.2:ACAG | 2.1:ACAG | GCA |
| AAT | | GCC | 14 | 21.000 | | 0466628 | 8426413 | 9461336e- | 4320096e-11 | | 73272697 | CTAAT | CAAAT | GCT |
| | | GCG | 5 | 10.747 | | 635 | | 10 | | | | | | GCC |
| | | GCT | 16 | 34.551 | | | | | | | | | | GCG |
| ACA_E_ | T_E_R | GAA | 2 | 15.375 | 1 | 36.0392 | 38.6412811 | 1.93379568 | 5.093025713 | 22 | 3.28680194 | 7.7:ACAG | 3.0:ACAG | GAG |
| CGG | | GAG | 20 | 6.625 | | 8160486 | 58339915 | 43386035e- | 173779e-10 | | 6453628 | AACGG | AGCGG | GAA |
| | | | | | | 363 | | 09 | | | | | | |
| ACA_G_ | T_G_R | GGA | 30 | 4.250 | 3 | 35.9315 | 55.7704975 | 7.74211271 | 4.702409280 | 19 | 4.01227547 | 7.5:ACAG | 5.5:ACAG | GGG |
| CGA | | GGC | 13 | 3.757 | | 4964858 | 8315956 | 4309382e- | 752227e-12 | | 0041511 | GCCGA | GGCGA | GGT |
| | | GGG | 3 | 2.360 | | 126 | | 08 | | | | | | GGA |
| | | GGT | | 8.633 | | | | | | | | | | GGC |
| ACA_R_ | T_R_M | AGA | 30 | 35.561 | 5 | 54.4982 | 101.081877 | 1.65549006 | 3.126096085 | 75 | 1.96272521 | 5.1:ACAC | 6.4:ACAC | AGA |
| ATG | | AGG | 18 | 16.268 | | 5903132 | 84950827 | 84403214e- | 2353453e-20 | | 00912302 | GAATG | GGATG | CGG |
| | | CGA | 1 | 5.122 | | 8 | | 10 | | | | | | AGG |
| | | CGC | 3 | 4.439 | | | | | | | | | | CGT |
| | | CGG | 20 | 3.131 | | | | | | | | | | CGC |
| | | CGT | 3 | 10.480 | | | | | | | | | | CGA |
| ACA_S_ | T_S_E | AGC | 8 | 8.901 | 5 | 34.2844 | 39.2770716 | 2.08983888 | 2.088578751 | 79 | 1.74772689 | 3.8:ACATC | 2.5:ACAA | AGT |
| GAG | | AGT | 32 | 12.893 | | 4640813 | 04700815 | 36705515e- | 957347e-07 | | 41853585 | GGAG | GTGAG | TCA |
| | | TCA | 18 | 16.529 | | 731 | | 06 | | | | | | TCT |
| | | TCC | 5 | 12.404 | | | | | | | | | | AGC |
| | | TCG | 2 | 7.699 | | | | | | | | | | TCC |
| | | TCT | 14 | 20.574 | | | | | | | | | | TCG |
| ACA_T_ | T_T_E | ACA | 61 | 36.469 | 3 | 36.7180 | 36.4955978 | 5.27868019 | 5.882843950 | 120 | 1.70715658 | 2.0:ACAA | 1.7:ACAA | ACA |
| GAA | | ACC | 13 | 25.424 | | 9668494 | 2599087 | 0782374e- | 9600935e-08 | | 88248719 | CTGAA | CAGAA | ACG |
| | | ACG | 25 | 16.832 | | 225 | | 08 | | | | | | ACT |
| | | ACT | 21 | 41.275 | | | | | | | | | | ACC |
| ACC_D_ | T_D_S | GAC | 34 | 16.946 | 1 | 24.5695 | 26.2365253 | 7.16755110 | 3.020550574 | 49 | 2.04548175 | 2.1:ACCG | 2.0:ACCG | GAC |
| TCC | | GAT | 15 | 32.054 | | 4809405 | 41693493 | 4214243e- | 8253525e-07 | | 98652464 | ATTCC | ACTCC | GAT |
| | | | | | | 0493 | | 07 | | | | | | |
| ACC_F_ | T_F_K | TTC | 30 | 15.027 | 1 | 25.4672 | 25.1233204 | 4.49960411 | 5.377854680 | 37 | 2.17490588 | 3.1:ACCTT | 2.0:ACCTT | TTC |
| AAG | | TTT | 7 | 21.973 | | 3291451 | 63304932 | 78521907e- | 767835e-07 | | 68706332 | TAAG | CAAG | TTT |
| | | | | | | 3108 | | 07 | | | | | | |
| ACC_G_ | T_G_T | GGA | 3 | 12.527 | 3 | 44.4054 | 37.5265490 | 1.23765950 | 3.560123656 | 56 | 1.99688310 | 13.9:ACCG | 1.9:ACCG | GGT |
| ACC | | GGC | 5 | 11.073 | | 7570490 | 7479136 | 3956639e- | 383707e-08 | | 22349933 | GGACC | GTACC | GGC |
| | | GGG | 0 | 6.956 | | 31 | | 09 | | | | | | GGA |
| | | GGT | 48 | 25.444 | | | | | | | | | | GGG |
| ACC_I_ | T_I_R | ATA | 26 | 11.147 | 2 | 26.4252 | 28.7841630 | 1.82734409 | 5.618215641 | 40 | 2.16124380 | 3.1:ACCAT | 2.3:ACCAT | ATA |
| AGG | | ATC | 8 | 10.328 | | 9391897 | 78027397 | 50116063e- | 307599e-07 | | 6580611 | TAGG | AAGG | ATC |
| | | ATT | 6 | 18.525 | | 7584 | | 06 | | | | | | ATT |
| ACC_K | T_K_T | AAA | 15 | 34.176 | 1 | 25.6650 | 25.5724812 | 4.06125050 | 4.260727395 | 59 | 1.88931572 | 2.3:ACCA | 1.8:ACCA | AAG |
| ACT | | AAG | 44 | 24.824 | | 0622015 | 3371452 | 34925973e- | 3064813e-07 | | 12916105 | AAACT | AGACT | AAA |
| | | | | | | 4947 | | 07 | | | | | | |
| ACC_L_ | T_L_L | CTA | 5 | 10.479 | 5 | 41.7555 | 51.0195815 | 6.60084709 | 8.569210657 | 74 | 1.80792506 | 8.4:ACCCT | 3.1:ACCCT | CTT |
| TTG | | CTC | 2 | 4.273 | | 5832776 | 51116474 | 0689098e- | 883697e-10 | | 46409788 | GTTG | TTTG | TTG |
| | | CTG | 1 | 8.371 | | 3765 | | 08 | | | | | | TTA |
| | | CTT | 29 | 9.505 | | | | | | | | | | CTA |
| | | TTA | 18 | 20.422 | | | | | | | | | | CTC |
| | | TTG | 19 | 20.950 | | | | | | | | | | CTG |
| ACC_N_ | T_N_V | AAC | 45 | 22.603 | 1 | 37.5383 | 37.2114378 | 8.96346134 | 1.059902865 | 56 | 2.16291013 | 3.0:ACCA | 2.0:ACCA | AAC |
| GTC | | AAT | 11 | 33.397 | | 1896121 | 6201459 | 0184517e- | 8385972e-09 | | 161724 | ATGTC | ACGTC | AAT |
| | | | | | | 581 | | 10 | | | | | | |
| ACC_N_ | T_N_S | AAC | 129 | 62.563 | 1 | 120.740 | 118.301115 | 4.35552271 | 1.489664016 | 155 | 2.25922855 | 3.6:ACCA | 2.1:ACCA | AAC |
| TCC | | AAT | 26 | 92.437 | | 4156005 | 10856642 | 6773161e- | 1954955e-27 | | 5146455 | ATTCC | ACTCC | AAT |
| | | | | | | 7512 | | 28 | | | | | | |
| ACC_S_ | T_S_S | AGC | 33 | 18.253 | 5 | 43.4374 | 43.8320571 | 3.01247917 | 2.505349754 | 162 | 1.63193954 | 3.2:ACCTC | 1.8:ACCA | TCT |
| TCT | | AGT | 16 | 26.439 | | 7151241 | 5978319 | 42189885e- | 3710104e-08 | | 72964637 | GTCT | GCTCT | AGC |
| | | TCA | 25 | 33.894 | | 478 | | 08 | | | | | | TCA |
| | | TCC | 16 | 25.437 | | | | | | | | | | TCC |
| | | TCG | 5 | 15.787 | | | | | | | | | | AGT |
| | | TCT | 67 | 42.189 | | | | | | | | | | TCG |
| ACC_T_ | T_T_T | ACA | 22 | 44.675 | 3 | 44.6563 | 48.5835088 | 1.09471637 | 1.599881426 | 147 | 1.58083273 | 2.0:ACCAC | 2.0:ACCA | ACC |
| ACT | | ACC | 63 | 31.144 | | 2503271 | 0044422 | 0326009e- | 7851008e-10 | | 6356557 | AACT | CCACT | ACT |
| | | ACG | 11 | 20.619 | | 298 | | 09 | | | | | | ACA |
| | | ACT | 51 | 50.562 | | | | | | | | | | ACG |
| ACC_T_ | T_T_E | ACA | 53 | 79.928 | 3 | 41.3690 | 42.5467029 | 5.46053849 | 3.071451177 | 263 | 1.45556312 | 1.8:ACCAC | 1.5:ACCA | ACT |
| GAA | | ACC | 50 | 55.720 | | 9117484 | 6813991 | 50283775e- | 215228e-09 | | 2342773 | GGAA | CTGAA | ACA |
| | | ACG | 21 | 36.889 | | 197 | | 09 | | | | | | ACC |
| | | ACT | 139 | 90.462 | | | | | | | | | | ACG |
| ACC_T_ | T_T_A | ACA | 17 | 36.165 | 3 | 104.922 | 106.531332 | 1.35787538 | 6.119482458 | 119 | 2.39315540 | 8.3:ACCAC | 2.3:ACCA | ACT |
| GCC | | ACC | 6 | 25.212 | | 3356851 | 01322677 | 32695867e- | 516558e-23 | | 9988261 | GGCC | CTGCC | ACA |
| | | ACG | 2 | 16.691 | | 0586 | | 22 | | | | | | ACC |
| | | ACT | 94 | 40.932 | | | | | | | | | | ACG |
| ACC_T_ | T_T_A | ACA | 17 | 34.342 | 3 | 44.3410 | 41.0569061 | 1.27728670 | 6.359972751 | 113 | 1.64238470 | 5.3:ACCAC | 1.7:ACCA | ACT |
| GCT | | ACC | 25 | 23.941 | | 5333280 | 6632813 | 74627807e- | 636909e-09 | | 50125624 | GGCT | CTGCT | ACC |
| | | ACG | 3 | 15.850 | | 036 | | 09 | | | | | | ACA |
| | | ACT | 68 | 38.868 | | | | | | | | | | ACG |
| ACC_V_ | T_V_T | GTA | 2 | 9.037 | 3 | 58.2536 | 76.0273323 | 1.38754458 | 2.182243290 | 42 | 3.39800821 | 4.5:ACCGT | 3.7:ACCGT | GTC |
| ACC | | GTC | 31 | 8.462 | | 8476198 | 6410411 | 94641212e- | 7069344e-16 | | 33133886 | AACC | CACC | GTG |
| | | GTG | 5 | 8.239 | | 709 | | 12 | | | | | | GTT |
| | | GTT | 4 | 16.262 | | | | | | | | | | GTA |
| ACG_E_ | T_E_V | GAA | 4 | 19.569 | 1 | 37.5118 | 41.1345625 | 9.08577575 | 1.421011781 | 28 | 3.07549460 | 4.9:ACGG | 2.8:ACGG | GAG |
| GTC | | GAG | 24 | 8.431 | | 8286533 | 3343488 | 922209e-10 | 693655e-10 | | 20006058 | AAGTC | AGGTC | GAA |
| | | | | | | 327 | | | | | | | | |
| ACG_G_ | T_G_L | GGA | 26 | 8.724 | 3 | 34.8563 | 44.0899704 | 1.30639649 | 1.444207379 | 39 | 2.74317087 | 2.6:ACGG | 3.0:ACGG | GGA |
| CTG | | GGC | 3 | 7.711 | | 9095502 | 9289287 | 37279983e- | 8357619e-09 | | 5231673 | GCCTG | GACTG | GGT |
| | | GGG | 2 | 4.844 | | 211 | | 07 | | | | | | GGC |
| | | GGT | 8 | 17.720 | | | | | | | | | | GGG |
| ACG_R_ | T_R_K | AGA | 16 | 27.026 | 5 | 35.8569 | 58.7869632 | 1.01448900 | 2.164123441 | 57 | 2.12628601 | 2.0:ACGC | 4.6:ACGC | CGA |
| AAA | | AGG | 15 | 12.364 | | 4542756 | 86128604 | 66489718e- | 4580158e-11 | | 5265877 | GTAAA | GAAAA | AGA |
| | | CGA | 18 | 3.892 | | 3595 | | 06 | | | | | | AGG |
| | | CGC | 2 | 3.374 | | | | | | | | | | CGT |
| | | CGG | 2 | 2.379 | | | | | | | | | | CGG |
| | | CGT | 4 | 7.965 | | | | | | | | | | CGC |
| ACG_R_ | T_R_V | AGA | 6 | 13.750 | 5 | 32.4128 | 38.7786759 | 4.92129826 | 2.631307727 | 29 | 2.81977659 | 4.0:ACGC | 3.2:ACGA | AGG |
| GTA | | AGG | 20 | 6.290 | | 4572261 | 8015095 | 4876971e- | 7969864e-07 | | 09681274 | GAGTA | GGGTA | AGA |
| | | CGA | 0 | 1.980 | | 707 | | 06 | | | | | | CGT |
| | | CGC | 1 | 1.716 | | | | | | | | | | CGC |
| | | CGG | 0 | 1.210 | | | | | | | | | | CGG |
| | | CGT | 2 | 4.052 | | | | | | | | | | CGA |
| ACG_S_ | T_S_A | AGC | 21 | 6.535 | 5 | 27.9760 | 38.7223650 | 3.67925693 | 2.700848814 | 58 | 1.93696602 | 1.9:ACGTC | 3.2:ACGA | AGC |
| GCT | | AGT | 11 | 9.466 | | 9132117 | 3526328 | 40171934e- | 860369e-07 | | 36471191 | TGCT | GCGCT | AGT |
| | | TCA | 9 | 12.135 | | 1886 | | 05 | | | | | | TCA |
| | | TCC | 6 | 9.107 | | | | | | | | | | TCT |
| | | TCG | 3 | 5.652 | | | | | | | | | | TCC |
| | | TCT | 8 | 15.105 | | | | | | | | | | TCG |
| ACT_A_ | T_A_S | GCA | 16 | 45.678 | 3 | 107.082 | 116.607074 | 4.65822960 | 4.150263919 | 155 | 2.04134200 | 8.9:ACTGC | 2.5:ACTGC | GCC |
| AGC | | GCC | 88 | 34.628 | | 0786840 | 2811993 | 4714081e- | 883996e-25 | | 43364225 | GAGC | CAGC | GCT |
| | | GCG | 2 | 17.722 | | 884 | | 23 | | | | | | GCA |
| | | GCT | 49 | 56.972 | | | | | | | | | | GCG |
| ACT_E_ | T_E_S | GAA | 115 | 88.758 | 1 | 31.7574 | 25.7660397 | 1.74676074 | 3.854106191 | 127 | 1.41066036 | 3.2:ACTGA | 1.3:ACTG | GAA |
| AGT | | GAG | 12 | 38.242 | | 7067003 | 47334972 | 58692434e- | 010979e-07 | | 81331351 | GAGT | AAAGT | GAG |
| | | | | | | 7176 | | 08 | | | | | | |
| ACT_F_ | T_F_K | TTC | 63 | 38.582 | 1 | 25.4923 | 26.0218077 | 4.44129885 | 3.375824898 | 95 | 1.67562048 | 1.8:ACTTT | 1.6:ACTTT | TTC |
| AAG | | TTT | 32 | 56.418 | | 9601191 | 94633816 | 9283826e- | 791731e-07 | | 18609424 | TAAG | CAAG | TTT |
| | | | | | | 0337 | | 07 | | | | | | |
| ACT_F_ | T_F_T | TTC | 59 | 34.927 | 1 | 27.4441 | 27.9388225 | 1.61693528 | 1.252121581 | 86 | 1.75032197 | 1.9:ACTTT | 1.7:ACTTT | TTC |
| ACT | | TTT | 27 | 51.073 | | 9458637 | 09731494 | 06023055e- | 0923775e-07 | | 19808407 | TACT | CACT | TTT |
| | | | | | | 053 | | 07 | | | | | | |
| ACT_L_ | T_L_K | CTA | 26 | 44.748 | 5 | 108.734 | 102.691226 | 7.58523602 | 1.430957878 | 316 | 1.55548735 | 5.8:ACTCT | 1.8:ACTTT | TTG |
| AAA | | CTC | 12 | 18.248 | | 1699529 | 2614471 | 7145656e- | 8863083e-20 | | 62397284 | TAAA | GAAA | TTA |
| | | CTG | 21 | 35.745 | | 485 | | 22 | | | | | | CTA |
| | | CTT | 7 | 40.588 | | | | | | | | | | CTG |
| | | TTA | 88 | 87.207 | | | | | | | | | | CTC |
| | | TTG | 162 | 89.463 | | | | | | | | | | CTT |
| ACT_L_ | T_L_K | CTA | 18 | 29.738 | 5 | 57.6088 | 51.2946709 | 3.78752473 | 7.526183676 | 210 | 1.46137415 | 5.4:ACTCT | 1.6:ACTTT | TTG |
| AAG | | CTC | 11 | 12.127 | | 8864535 | 14760246 | 80966353e- | 212241e-10 | | 3610331 | TAAG | GAAG | TTA |
| | | CTG | 15 | 23.755 | | 207 | | 11 | | | | | | CTA |
| | | CTT | 5 | 26.973 | | | | | | | | | | CTG |
| | | TTA | 63 | 57.954 | | | | | | | | | | CTC |
| | | TTG | 98 | 59.454 | | | | | | | | | | CTT |
| ACT_L_ | T_L_I | CTA | 6 | 22.799 | 5 | 51.6543 | 46.2980862 | 6.35124745 | 7.897462281 | 161 | 1.58630770 | 3.8:ACTCT | 1.6:ACTTT | TTG |
| ATT | | CTC | 6 | 9.297 | | 0696764 | 8799013 | 2696689e- | 259745e-09 | | 4252867 | AATT | GATT | TTA |
| | | CTG | 10 | 18.212 | | 513 | | 10 | | | | | | CTG |
| | | CTT | 8 | 20.679 | | | | | | | | | | CTT |
| | | TTA | 57 | 44.432 | | | | | | | | | | CTC |
| | | TTG | 74 | 45.581 | | | | | | | | | | CTA |
| ACT_L_ | T_L_E | CTA | 27 | 43.615 | 5 | 41.4136 | 39.9400423 | 7.73978660 | 1.535524806 | 308 | 1.39182234 | 1.8:ACTCT | 1.4:ACTTT | TTG |
| GAA | | CTC | 10 | 17.786 | | 9949735 | 87993934 | 0835489e- | 6391574e-07 | | 94693511 | TGAA | GGAA | TTA |
| | | CTG | 24 | 34.840 | | 466 | | 08 | | | | | | CTA |
| | | CTT | 22 | 39.560 | | | | | | | | | | CTG |
| | | TTA | 100 | 85.000 | | | | | | | | | | CTT |
| | | TTG | 125 | 87.199 | | | | | | | | | | CTC |
| ACT_N_ | T_N_A | AAC | 20 | 48.032 | 1 | 30.8673 | 27.4326561 | 2.76276313 | 1.626611395 | 119 | 1.52836050 | 2.4:ACTAA | 1.4:ACTA | AAT |
| GCT | | AAT | 99 | 70.968 | | 8302368 | 16099004 | 99577274e- | 0537263e-07 | | 44550574 | CGCT | ATGCT | AAC |
| | | | | | | 093 | | 08 | | | | | | |
| ACT_R_ | T_R_N | AGA | 26 | 32.716 | 5 | 48.9532 | 106.757385 | 2.26856973 | 1.983763944 | 69 | 2.15695556 | 2.0:ACTCG | 6.9:ACTCG | AGA |
| AAT | | AGG | 10 | 14.966 | | 9451547 | 42473353 | 9250614e- | 749101e-21 | | 71693394 | CAAT | GAAT | CGG |
| | | CGA | 3 | 4.712 | | 632 | | 09 | | | | | | AGG |
| | | CGC | 2 | 4.084 | | | | | | | | | | CGT |
| | | CGG | 20 | 2.880 | | | | | | | | | | CGA |
| | | CGT | 8 | 9.642 | | | | | | | | | | CGC |
| ACT_S_ | T_S_A | AGC | 0 | 8.112 | 5 | 93.9551 | 122.968532 | 9.90597922 | 7.375367258 | 72 | 2.97835643 | 16.2:ACTA | 3.9:ACTA | AGT |
| GCG | | AGT | 46 | 11.751 | | 1435784 | 96712145 | 9137595e- | 327657e-25 | | 80803966 | GCGCG | GTGCG | TCT |
| | | TCA | 3 | 15.064 | | 631 | | 19 | | | | | | TCC |
| | | TCC | 7 | 11.305 | | | | | | | | | | TCG |
| | | TCG | 4 | 7.017 | | | | | | | | | | TCA |
| | | TCT | 12 | 18.751 | | | | | | | | | | AGC |
| ACT_S_ | T_S_A | AGC | 8 | 23.211 | 5 | 164.410 | 216.773672 | 1.13560294 | 7.294912415 | 206 | 2.37946323 | 2.9:ACTTC | 3.3:ACTA | AGT |
| GCT | | AGT | 110 | 33.620 | | 9706466 | 43512785 | 5545834e- | 516473e-45 | | 43943394 | CGCT | GTGCT | TCT |
| | | TCA | 21 | 43.100 | | 447 | | 33 | | | | | | TCA |
| | | TCC | 11 | 32.346 | | | | | | | | | | TCC |
| | | TCG | 8 | 20.075 | | | | | | | | | | TCG |
| | | TCT | 48 | 53.648 | | | | | | | | | | AGC |
| ACT_T_ | T_T_T | ACA | 20 | 32.822 | 3 | 58.7895 | 72.9361421 | 1.06611012 | 1.003150265 | 108 | 2.14415398 | 2.5:ACTAC | 2.6:ACTAC | ACC |
| ACC | | ACC | 59 | 22.881 | | 8223555 | 0534403 | 53367532e- | 8222284e-15 | | 35199386 | GACC | CACC | ACT |
| | | ACG | 6 | 15.148 | | 0824 | | 12 | | | | | | ACA |
| | | ACT | 23 | 37.148 | | | | | | | | | | ACG |
| ACT_T_ | T_T_T | ACA | 46 | 106.064 | 3 | 288.975 | 368.152882 | 2.41881210 | 1.748824690 | 349 | 2.61343393 | 3.1:ACTAC | 3.0:ACTAC | ACC |
| ACT | | ACC | 220 | 73.941 | | 6435470 | 931379 | 9969673e- | 766946e-79 | | 3015399 | GACT | CACT | ACT |
| | | ACG | 16 | 48.952 | | 89 | | 62 | | | | | | ACA |
| | | ACT | 67 | 120.043 | | | | | | | | | | ACG |
| AGA_A_ | R_A_K | GCA | 28 | 37.132 | 3 | 30.4064 | 35.6694054 | 1.13340336 | 8.795803043 | 126 | 1.63353050 | 1.5:AGAG | 2.0:AGAG | GCC |
| AAG | | GCC | 56 | 28.149 | | 4367822 | 7188571 | 01032045e- | 386687e-08 | | 50178277 | CTAAG | CCAAG | GCT |
| | | GCG | 11 | 14.406 | | 574 | | 06 | | | | | | GCA |
| | | GCT | 31 | 46.313 | | | | | | | | | | GCG |
| AGA_F_ | R_F_K | TTC | 51 | 28.023 | 1 | 31.4631 | 31.7241504 | 2.03258434 | 1.776987036 | 69 | 1.92938208 | 2.3:AGATT | 1.8:AGATT | TTC |
| AAG | | TTT | 18 | 40.977 | | 7795519 | 49054836 | 59487828e- | 0762586e-08 | | 6641928 | TAAG | CAAG | TTT |
| | | | | | | 2805 | | 08 | | | | | | |
| AGA_G_ | R_G_G | GGA | 12 | 29.081 | 3 | 36.7116 | 33.0094909 | 5.29525457 | 3.205860485 | 130 | 1.52215527 | 3.2:AGAG | 1.5:AGAG | GGT |
| GGT | | GGC | 24 | 25.705 | | 6032068 | 7882536 | 2487711e- | 6748036e-07 | | 8487091 | GGGGT | GTGGT | GGC |
| | | GGG | 5 | 16.147 | | 3265 | | 08 | | | | | | GGA |
| | | GGT | 89 | 59.067 | | | | | | | | | | GGG |
| AGA_K_ | R_K_K | AAA | 99 | 143.076 | 1 | 31.7362 | 32.2708643 | 1.76596152 | 1.341092567 | 247 | 1.43253053 | 1.4:AGAA | 1.4:AGAA | AAG |
| AAA | | AAG | 148 | 103.924 | | 3828661 | 2938946 | 17612218e- | 2773355e-08 | | 258474 | AAAAA | AGAAA | AAA |
| | | | | | | 0742 | | 08 | | | | | | |
| AGA_K_ | R_K_K | AAA | 77 | 111.217 | 1 | 24.6052 | 25.0198731 | 7.03609705 | 5.674244103 | 192 | 1.43187098 | 1.4:AGAA | 1.4:AGAA | AAG |
| AAG | | AAG | 115 | 80.783 | | 1752278 | 53291087 | 0934571e- | 339412e-07 | | 75653788 | AAAAG | AGAAG | AAA |
| | | | | | | 7186 | | 07 | | | | | | |
| AGA_L_ | R_L_A | CTA | 12 | 17.701 | 5 | 43.2193 | 48.0506981 | 3.33550752 | 3.468280445 | 125 | 1.80591468 | 2.4:AGACT | 2.0:AGATT | TTG |
| GCT | | CTC | 3 | 7.218 | | 2455154 | 64129095 | 3901354e- | 400312e-09 | | 44518095 | CGCT | GGCT | TTA |
| | | CTG | 7 | 14.140 | | | | 08 | | | | | | CTA |
| | | CTT | 9 | 16.055 | | | | | | | | | | CTT |
| | | TTA | 24 | 34.497 | | | | | | | | | | CTG |
| | | TTG | 70 | 35.389 | | | | | | | | | | CTC |
| AGA_R_ | R_R_R | AGA | 156 | 100.518 | 5 | 68.4317 | 62.3242974 | 2.17190492 | 4.017797113 | 212 | 1.62488603 | 4.4:AGAC | 1.6:AGAA | AGA |
| AGA | | AGG | 33 | 45.984 | | 2655711 | 97701934 | 04353275e- | 754561e-12 | | 6688506 | GGAGA | GAAGA | AGG |
| | | CGA | 4 | 14.477 | | 712 | | 13 | | | | | | CGT |
| | | CGC | 4 | 12.548 | | | | | | | | | | CGC |
| | | CGG | 2 | 8.849 | | | | | | | | | | CGA |
| | | CGT | 13 | 29.625 | | | | | | | | | | CGG |
| AGA_V_ | R_V_T | GTA | 21 | 6.670 | 3 | 30.5622 | 39.2942031 | 1.05096892 | 1.503608890 | 31 | 2.88879412 | 3.0:AGAG | 3.1:AGAG | GTA |
| ACG | | GTC | 3 | 6.246 | | 7398709 | 6931282 | 97751764e- | 8464834e-08 | | 81736196 | TGACG | TAACG | GTT |
| | | GTG | 2 | 6.081 | | 9214 | | 06 | | | | | | GTC |
| | | GTT | 5 | 12.003 | | | | | | | | | | GTG |
| AGC_I_ | S_I_N | ATA | 11 | 26.753 | 2 | 85.0129 | 101.576585 | 3.46481099 | 8.768488151 | 96 | 2.68301102 | 2.6:AGCAT | 2.7:AGCA | ATC |
| AAC | | ATC | 68 | 24.786 | | 1736558 | 47208345 | 44310744e- | 082336e-23 | | 55275206 | TAAC | TCAAC | ATT |
| | | ATT | 17 | 44.461 | | 898 | | 19 | | | | | | ATA |
| AGC_R_ | S_R_H | AGA | 6 | 18.017 | 5 | 35.3668 | 41.1190537 | 1.27113629 | 8.877256546 | 38 | 2.53490808 | 3.2:AGCC | 2.9:AGCA | AGG |
| CAT | | AGG | 24 | 8.242 | | 5590204 | 614329 | 47708582e- | 113084e-08 | | 088771 | GGCAT | GGCAT | AGA |
| | | CGA | 2 | 2.595 | | 5934 | | 06 | | | | | | CGT |
| | | CGC | 3 | 2.249 | | | | | | | | | | CGC |
| | | CGG | 0 | 1.586 | | | | | | | | | | CGA |
| | | CGT | 3 | 5.310 | | | | | | | | | | CGG |
| AGC_R_ | S_R_C | AGA | 2 | 6.638 | 5 | 38.5890 | 92.0439628 | 2.87291970 | 2.499169785 | 14 | 7.21013990 | 3.3:AGCA | 10.5:AGCC | CGA |
| TGC | | AGG | 1 | 3.037 | | 1094258 | 2321252 | 24764107e- | 132985e-18 | | 6059033 | GATGC | GATGC | AGA |
| | | CGA | 10 | 0.956 | | 019 | | 07 | | | | | | CGT |
| | | CGC | 0 | 0.829 | | | | | | | | | | AGG |
| | | CGG | 0 | 0.584 | | | | | | | | | | CGG |
| | | CGT | 1 | 1.956 | | | | | | | | | | CGC |
| AGC_S_ | S_S_N | AGC | 36 | 19.042 | 5 | 35.4108 | 39.0091548 | 1.24569595 | 2.364781652 | 169 | 1.56052741 | 1.6:AGCTC | 1.9:AGCA | AGT |
| AAT | | AGT | 46 | 27.581 | | 1159083 | 5236385 | 26226377e- | 7335897e-07 | | 7375245 | TAAT | GCAAT | AGC |
| | | TCA | 31 | 35.359 | | 713 | | 06 | | | | | | TCA |
| | | TCC | 17 | 26.536 | | | | | | | | | | TCT |
| | | TCG | 11 | 16.469 | | | | | | | | | | TCC |
| | | TCT | 28 | 44.012 | | | | | | | | | | TCG |
| AGC_S_ | S_S_S | AGC | 38 | 13.521 | 5 | 51.3944 | 63.5505465 | 7.17985569 | 2.238760081 | 120 | 1.87771977 | 2.2:AGCTC | 2.8:AGCA | AGC |
| AGC | | AGT | 29 | 19.584 | | 9879936 | 4050935 | 9512534e- | 5967057e-12 | | 41991691 | TAGC | GCAGC | AGT |
| | | TCA | 19 | 25.107 | | 663 | | 10 | | | | | | TCA |
| | | TCC | 13 | 18.842 | | | | | | | | | | TCT |
| | | TCG | 7 | 11.694 | | | | | | | | | | TCC |
| | | TCT | 14 | 31.251 | | | | | | | | | | TCG |
| AGC_S_ | S_S_S | AGC | 22 | 13.295 | 5 | 34.7052 | 37.7464435 | 1.72279152 | 4.242637609 | 118 | 1.66059679 | 2.2:AGCTC | 2.0:AGCA | AGT |
| AGT | | AGT | 39 | 19.258 | | 7143808 | 0257922 | 5419458e- | 4830547e-07 | | 24106848 | TAGT | GTAGT | AGC |
| | | TCA | 18 | 24.689 | | 663 | | 06 | | | | | | TCA |
| | | TCC | 16 | 18.528 | | | | | | | | | | TCC |
| | | TCG | 9 | 11.499 | | | | | | | | | | TCT |
| | | TCT | 14 | 30.731 | | | | | | | | | | TCG |
| AGC_S_ | S_S_D | AGC | 6 | 8.000 | 5 | 41.7011 | 56.7789451 | 6.77026470 | 5.616253365 | 71 | 2.21709083 | 1.9:AGCTC | 3.0:AGCA | AGT |
| GAC | | AGT | 35 | 11.587 | | 4468338 | 53780725 | 425616e-08 | 4040063e-11 | | 14616153 | AGAC | GTGAC | TCT |
| | | TCA | 8 | 14.855 | | 04 | | | | | | | | TCA |
| | | TCC | 7 | 11.148 | | | | | | | | | | TCC |
| | | TCG | 4 | 6.919 | | | | | | | | | | AGC |
| | | TCT | 11 | 18.490 | | | | | | | | | | TCG |
| AGC_S_ | S_S_D | AGC | 21 | 14.760 | 5 | 38.7391 | 44.9504811 | 2.67995579 | 1.484900730 | 131 | 1.69963983 | 2.1:AGCTC | 2.2:AGCA | AGT |
| GAT | | AGT | 47 | 21.379 | | 2999189 | 58048774 | 6856398e- | 200249e-08 | | 0894411 | CGAT | GTGAT | TCT |
| | | TCA | 19 | 27.409 | | 459 | | 07 | | | | | | AGC |
| | | TCC | 10 | 20.569 | | | | | | | | | | TCA |
| | | TCG | 10 | 12.766 | | | | | | | | | | TCG |
| | | TCT | 24 | 34.116 | | | | | | | | | | TCC |
| AGC_S_ | S_S_G | AGC | 19 | 7.436 | 5 | 43.9882 | 48.5845635 | 2.32896054 | 2.698318805 | 66 | 2.20231532 | 4.6:AGCTC | 2.6:AGCA | AGT |
| GGT | | AGT | 24 | 10.771 | | 6786352 | 2734624 | 96707673e- | 7796217e-09 | | 14900293 | AGGT | GCGGT | AGC |
| | | TCA | 3 | 13.809 | | 262 | | 08 | | | | | | TCT |
| | | TCC | 6 | 10.363 | | | | | | | | | | TCC |
| | | TCG | 3 | 6.432 | | | | | | | | | | TCG |
| | | TCT | 11 | 17.188 | | | | | | | | | | TCA |
| AGC_T_ | S_T_N | ACA | 13 | 34.342 | 3 | 106.875 | 138.304132 | 5.16021834 | 8.772101174 | 113 | 2.83745301 | 2.6:AGCA | 3.1:AGCA | ACC |
| AAC | | ACC | 75 | 23.941 | | 4958864 | 48352178 | 67441914e- | 04915e-30 | | 3406579 | CAAAC | CCAAC | ACT |
| | | ACG | 7 | 15.850 | | 5629 | | 23 | | | | | | ACA |
| | | ACT | 18 | 38.868 | | | | | | | | | | ACG |
| AGC_T_ | S_T_N | ACA | 28 | 55.919 | 3 | 82.9865 | 88.8092756 | 7.01919529 | 3.947209671 | 184 | 1.97584980 | 2.2:AGCA | 2.0:AGCA | ACT |
| AAT | | ACC | 20 | 38.983 | | 4098347 | 7685285 | 8200426e- | 651049e-19 | | 00426776 | CGAAT | CTAAT | ACA |
| | | ACG | 12 | 25.808 | | 772 | | 18 | | | | | | ACC |
| | | ACT | 124 | 63.289 | | | | | | | | | | ACG |
| AGC_V_ | S_V_K | GTA | 37 | 16.353 | 3 | 27.7697 | 33.5240639 | 4.05951321 | 2.496776584 | 76 | 1.84467687 | 1.9:AGCGT | 2.3:AGCG | GTA |
| AAA | | GTC | 10 | 15.312 | | 4010847 | 3580913 | 00829975e- | 293233e-07 | | 39783992 | GAAA | TAAAA | GTT |
| | | GTG | 8 | 14.908 | | 936 | | 06 | | | | | | GTC |
| | | GTT | 21 | 29.427 | | | | | | | | | | GTG |
| AGG_I_ | R_I_A | ATA | 27 | 11.704 | 2 | 27.8978 | 29.3414688 | 8.75094931 | 4.251879847 | 42 | 2.10134322 | 5.4:AGGA | 2.3:AGGA | ATA |
| GCT | | ATC | 2 | 10.844 | | 6692758 | 9750594 | 0965376e- | 515117e-07 | | 0033768 | TCGCT | TAGCT | ATT |
| | | ATT | 13 | 19.452 | | 389 | | 07 | | | | | | ATC |
| AGG_P_ | R_P_R | CCA | 0 | 7.741 | 3 | 47.0388 | 66.0614117 | 3.41012292 | 2.973662177 | 19 | 4.73028204 | 15.5:AGGC | 5.2:AGGC | CCC |
| CGA | | CCC | 16 | 3.049 | | 3436744 | 9365878 | 84205885e- | 267539e-14 | | 7984273 | CACGA | CCCGA | CCT |
| | | CCG | 1 | 2.335 | | 266 | | 10 | | | | | | CCG |
| | | CCT | 2 | 5.874 | | | | | | | | | | CCA |
| AGG_R_ | R_R_Q | AGA | 4 | 9.009 | 5 | 26.9359 | 43.1425772 | 5.87034804 | 3.457179068 | 19 | 2.85963485 | 5.3:AGGC | 7.6:AGGC | AGG |
| CAG | | AGG | 7 | 4.121 | | 7874662 | 22928395 | 3455035e- | 4076195e-08 | | 06372733 | GTCAG | GGCAG | CGG |
| | | CGA | 2 | 1.297 | | 9655 | | 05 | | | | | | AGA |
| | | CGC | 0 | 1.125 | | | | | | | | | | CGA |
| | | CGG | 6 | 0.793 | | | | | | | | | | CGT |
| | | CGT | 0 | 2.655 | | | | | | | | | | CGC |
| AGG_S_ | R_S_R | AGC | 26 | 9.465 | 5 | 39.6330 | 46.7619806 | 1.77066708 | 6.352960082 | 84 | 1.94581759 | 2.3:AGGA | 2.7:AGGA | TCA |
| AGA | | AGT | 6 | 13.709 | | 5931340 | 0109398 | 11790053e- | 998853e-09 | | 760475 | GTAGA | GCAGA | AGC |
| | | TCA | 27 | 17.575 | | 3635 | | 07 | | | | | | TCT |
| | | TCC | 7 | 13.190 | | | | | | | | | | TCG |
| | | TCG | 7 | 8.186 | | | | | | | | | | TCC |
| | | TCT | 11 | 21.876 | | | | | | | | | | AGT |
| AGG_S_ | R_S_L | AGC | 2 | 4.282 | 5 | 34.7106 | 48.6170712 | 1.71853941 | 2.657372753 | 38 | 2.74404873 | 3.0:AGGTC | 3.5:AGGA | AGT |
| CTT | | AGT | 22 | 6.202 | | 5302616 | 8965332 | 23053822e- | 6109394e-09 | | 99549283 | CCTT | GTCTT | TCT |
| | | TCA | 4 | 7.951 | | 634 | | 06 | | | | | | TCA |
| | | TCC | 2 | 5.967 | | | | | | | | | | TCG |
| | | TCG | 3 | 3.703 | | | | | | | | | | TCC |
| | | TCT | 5 | 9.896 | | | | | | | | | | AGC |
| AGG_T_ | R_T_N | ACA | 9 | 12.764 | 3 | 28.3326 | 33.6771469 | 3.09247357 | 2.317785465 | 42 | 2.21807514 | 5.9:AGGA | 2.7:AGGA | ACC |
| AAC | | ACC | 24 | 8.898 | | 9561587 | 5709748 | 91500324e- | 9969035e-07 | | 73714237 | CGAAC | CCAAC | ACA |
| | | ACG | 1 | 5.891 | | 192 | | 06 | | | | | | ACT |
| | | ACT | 8 | 14.446 | | | | | | | | | | ACG |
| AGG_T_ | R_T_S | ACA | 6 | 28.568 | 3 | 110.496 | 112.066617 | 8.58152242 | 3.940453576 | 94 | 2.70469668 | 13.2:AGGA | 2.5:AGGA | ACT |
| AGT | | ACC | 6 | 19.915 | | 1201380 | 14833174 | 4283024e- | 527536e-24 | | 2426026 | CGAGT | CTAGT | ACC |
| | | ACG | 1 | 13.185 | | 6117 | | 24 | | | | | | ACA |
| | | ACT | 81 | 32.332 | | | | | | | | | | ACG |
| AGG_V_ | R_V_P | GTA | 17 | 4.519 | 3 | 35.0298 | 44.2678246 | 1.20069296 | 1.323872257 | 21 | 3.71055814 | 8.1:AGGG | 3.8:AGGG | GTA |
| CCG | | GTC | 2 | 4.231 | | 3983774 | 74091436 | 74608235e- | 3372965e-09 | | 0819095 | TTCCG | TACCG | GTC |
| | | GTG | 1 | 4.119 | | 737 | | 07 | | | | | | GTT |
| | | GTT | 1 | 8.131 | | | | | | | | | | GTG |
| AGG_V_ | R_V_V | GTA | 0 | 6.670 | 3 | 48.8401 | 59.8888078 | 1.41075943 | 6.208714772 | 31 | 3.27499571 | 13.3:AGGG | 3.8:AGGG | GTG |
| GTA | | GTC | 4 | 6.246 | | 7655174 | 8642871 | 2303148e- | 206756e-13 | | 63025862 | TAGTA | TGGTA | GTT |
| | | GTG | 23 | 6.081 | | 661 | | 10 | | | | | | GTC |
| | | GTT | 4 | 12.003 | | | | | | | | | | GTA |
| AGT_A_ | S_A_K | GCA | 15 | 26.228 | 3 | 30.3272 | 34.6754584 | 1.17773605 | 1.426572665 | 89 | 1.78580954 | 1.7:AGTGC | 2.1:AGTG | GCC |
| AAG | | GCC | 42 | 19.883 | | 5461131 | 5236999 | 36485024e- | 6753824e-07 | | 21306424 | AAAG | CCAAG | GCT |
| | | GCG | 12 | 10.176 | | 6476 | | 06 | | | | | | GCA |
| | | GCT | 20 | 32.713 | | | | | | | | | | GCG |
| AGT_A_ | S_A_T | GCA | 20 | 58.645 | 3 | 94.1742 | 88.0074160 | 2.77829150 | 5.867936381 | 199 | 1.85354578 | 2.9:AGTGC | 1.7:AGTG | GCT |
| ACT | | GCC | 17 | 44.458 | | 0385183 | 013717 | 08407295e- | 43899e-19 | | 92295262 | AACT | CGACT | GCG |
| | | GCG | 39 | 22.753 | | 229 | | 20 | | | | | | GCA |
| | | GCT | 123 | 73.145 | | | | | | | | | | GCC |
| AGT_L_ | S_L_Q | CTA | 4 | 8.921 | 5 | 40.7477 | 47.5296554 | 1.05507142 | 4.430424558 | 63 | 2.11817858 | 3.6:AGTCT | 3.0:AGTCT | TTA |
| CAG | | CTC | 1 | 3.638 | | 3283072 | 26012326 | 94215785e- | 6384385e-09 | | 8453407 | CCAG | TCAG | CTT |
| | | CTG | 2 | 7.126 | | 825 | | 07 | | | | | | TTG |
| | | CTT | 24 | 8.092 | | | | | | | | | | CTA |
| | | TTA | 24 | 17.386 | | | | | | | | | | CTG |
| | | TTG | 8 | 17.836 | | | | | | | | | | CTC |
| AGT_T_ | S_T_N | ACA | 35 | 47.106 | 3 | 142.179 | 170.762801 | 1.28067622 | 8.709372706 | 155 | 2.51913242 | 4.4:AGTAC | 3.0:AGTA | ACC |
| AAC | | ACC | 98 | 32.839 | | 7597791 | 07239617 | 90891345e- | 546823e-37 | | 9155739 | TAAC | CCAAC | ACA |
| | | ACG | 10 | 21.741 | | 3196 | | 30 | | | | | | ACT |
| | | ACT | 12 | 53.314 | | | | | | | | | | ACG |
| AGT_T_ | S_T_D | ACA | 10 | 20.058 | 3 | 41.5547 | 52.4852899 | 4.98711946 | 2.360331933 | 66 | 2.30805740 | 2.0:AGTAC | 2.7AGTA | ACC |
| GAC | | ACC | 38 | 13.983 | | 4493678 | 2471594 | 8416364e- | 2586817e-11 | | 3004325 | AGAC | CCGAC | ACT |
| | | ACG | 6 | 9.257 | | 018 | | 09 | | | | | | ACA |
| | | ACT | 12 | 22.702 | | | | | | | | | | ACG |
| ATA_G_ | I_G_L | GGA | 4 | 8.053 | 3 | 57.5116 | 89.8977045 | 1.99841428 | 2.304245251 | 36 | 3.64704118 | 5.5:ATAG | 5.1:ATAG | GGG |
| CTG | | GGC | 6 | 7.118 | | 4991092 | 29137 | 1671969e- | 7434286e-19 | | 32907885 | GTCTG | GGCTG | GGC |
| | | GGG | 23 | 4.472 | | 4156 | | 12 | | | | | | GGA |
| | | GGT | 3 | 16.357 | | | | | | | | | | GGT |
| ATA_H_ | I_H_G | CAC | 18 | 6.778 | 1 | 30.1537 | 28.8827664 | 3.99105490 | 7.689402405 | 19 | 2.87777859 | 12.2:ATAC | 2.7:ATAC | CAC |
| GGG | | CAT | 1 | 12.222 | | 9478567 | 49346057 | 6322672e- | 169052e-08 | | 7270655 | ATGGG | ACGGG | CAT |
| | | | | | | 9146 | | 08 | | | | | | |
| ATA_L_ | I_L_S | CTA | 6 | 14.302 | 5 | 40.3562 | 40.9290556 | 1.26562126 | 9.697561606 | 101 | 1.73424695 | 2.6:ATATT | 2.2:ATACT | TTA |
| TCA | | CTC | 3 | 5.832 | | 5303958 | 4701175 | 94515565e- | 745253e-08 | | 47634436 | GTCA | TTCA | CTT |
| | | CTG | 15 | 11.425 | | 162 | | 07 | | | | | | CTG |
| | | CTT | 29 | 12.973 | | | | | | | | | | TTG |
| | | TTA | 37 | 27.873 | | | | | | | | | | CTA |
| | | TTG | 11 | 28.594 | | | | | | | | | | CTC |
| ATA_P_ | I_P_Q | CCA | 27 | 32.185 | 3 | 32.1169 | 44.6021183 | 4.94474353 | 1.124138391 | 79 | 1.82207226 | 1.8:ATACC | 3.0:ATACC | CCG |
| CAA | | CCC | 7 | 12.679 | | 3641812 | 98115806 | 1901096e- | 0204194e-09 | | 24802086 | CCAA | GCAA | CCA |
| | | CCG | 29 | 9.711 | | 914 | | 07 | | | | | | CCT |
| | | CCT | 16 | 24.425 | | | | | | | | | | CCC |
| ATA_R_ | I_R_K | AGA | 72 | 93.880 | 5 | 42.9888 | 44.0047604 | 3.71433345 | 2.311075727 | 198 | 1.54478026 | 2.5:ATACG | 1.7:ATAC | AGA |
| AAA | | AGG | 71 | 42.947 | | 6176081 | 5952405 | 02195066e- | 021717e-08 | | 931686 | TAAA | GAAAA | AGG |
| | | CGA | 23 | 13.521 | | 956 | | 08 | | | | | | CGA |
| | | CGC | 8 | 11.719 | | | | | | | | | | CGG |
| | | CGG | 13 | 8.265 | | | | | | | | | | CGT |
| | | CGT | 11 | 27.668 | | | | | | | | | | CGC |
| ATA_R_ | I_R_R | AGA | 6 | 5.690 | 5 | 24.0436 | 45.4596307 | 0.00021295 | 1.169922984 | 12 | 2.72323526 | 5.2:ATAA | 10.0:ATAC | AGA |
| CGG | | AGG | 0 | 2.603 | | 9462554 | 4753869 | 5224833228 | 1256966e-08 | | 56701986 | GGCGG | GGCGG | CGG |
| | | CGA | 1 | 0.819 | | 237 | | 4 | | | | | | CGA |
| | | CGC | 0 | 0.710 | | | | | | | | | | CGT |
| | | CGG | 5 | 0.501 | | | | | | | | | | CGC |
| | | CGT | 0 | 1.677 | | | | | | | | | | AGG |
| ATA_S_ | I_S_M | AGC | 10 | 12.056 | 5 | 49.8501 | 46.1301417 | 1.48717941 | 8.544545900 | 107 | 1.77695045 | 3.5:ATAA | 1.8:ATATC | TCA |
| ATG | | AGT | 5 | 17.463 | | 3655823 | 8329489 | 5974709e- | 80785e-09 | | 67192838 | GTATG | CATG | TCC |
| | | TCA | 38 | 22.387 | | 8106 | | 09 | | | | | | TCG |
| | | TCC | 31 | 16.801 | | | | | | | | | | AGC |
| | | TCG | 14 | 10.427 | | | | | | | | | | TCT |
| | | TCT | 9 | 27.866 | | | | | | | | | | AGT |
| ATA_S_ | I_S_L | AGC | 2 | 8.563 | 5 | 42.4296 | 47.2962982 | 4.82144179 | 4.943609855 | 76 | 1.64171260 | 6.2:ATAA | 3.1:ATATC | TCG |
| CTA | | AGT | 2 | 12.403 | | 2562214 | 3976672 | 08492964e- | 0027635e-09 | | 353734 | GTCTA | GCTA | TCT |
| | | TCA | 19 | 15.901 | | 601 | | 08 | | | | | | TCA |
| | | TCC | 11 | 11.933 | | | | | | | | | | TCC |
| | | TCG | 23 | 7.406 | | | | | | | | | | AGT |
| | | TCT | 19 | 19.793 | | | | | | | | | | AGC |
| ATC_E_ | I_E_P | GAA | 14 | 32.847 | 1 | 31.9976 | 35.9143672 | 1.54358239 | 2.061827396 | 47 | 2.33605161 | 2.3:ATCGA | 2.3:ATCG | GAG |
| CCA | | GAG | 33 | 14.153 | | 6204872 | 3861179 | 97502272e- | 810233e-09 | | 0416876 | ACCA | AGCCA | GAA |
| | | | | | | 7882 | | 08 | | | | | | |
| ATC_F_ | I_F_K | TTC | 41 | 21.525 | 1 | 29.6951 | 29.6711673 | 5.05611644 | 5.119057918 | 53 | 2.04787925 | 2.6:ATCTT | 1.9:ATCTT | TTC |
| AAG | | TTT | 12 | 31.475 | | 4990819 | 7088419 | 2225633e- | 19207e-08 | | 67867696 | TAAG | CAAG | TTT |
| | | | | | | 1418 | | 08 | | | | | | |
| ATC_G_ | I_G_T | GGA | 20 | 6.935 | 3 | 26.1502 | 32.2272517 | 8.87105263 | 4.686959591 | 31 | 2.57265044 | 3.1:ATCGG | 2.9:ATCG | GGA |
| ACG | | GGC | 2 | 6.130 | | 1942700 | 8650895 | 6336523e- | 8703924e-07 | | 48217726 | CACG | GAACG | GGT |
| | | GGG | 3 | 3.851 | | 8366 | | 06 | | | | | | GGG |
| | | GGT | 6 | 14.085 | | | | | | | | | | GGC |
| ATC_G_ | I_G_F | GGA | 21 | 13.646 | 3 | 41.3786 | 45.7973310 | 5.43520244 | 6.263056140 | 61 | 2.06791511 | 3.5:ATCGG | 2.9:ATCG | GGG |
| TTT | | GGC | 10 | 12.061 | | 1218973 | 82977095 | 332384e-09 | 892518e-10 | | 6350244 | TTTT | GGTTT | GGA |
| | | GGG | 22 | 7.577 | | 58 | | | | | | | | GGC |
| | | GGT | 8 | 27.716 | | | | | | | | | | GGT |
| ATC_L_ | I_L_V | CTA | 4 | 7.930 | 5 | 36.2910 | 58.8748006 | 8.30624863 | 2.075623334 | 56 | 1.98720457 | 2.6:ATCTT | 4.9:ATCCT | CTC |
| GTC | | CTC | 16 | 3.234 | | 2687605 | 45641024 | 4776105e- | 832669e-11 | | 74245408 | AGTC | CGTC | TTG |
| | | CTG | 8 | 6.335 | | 6854 | | 07 | | | | | | CTT |
| | | CTT | 8 | 7.193 | | | | | | | | | | CTG |
| | | TTA | 6 | 15.454 | | | | | | | | | | TTA |
| | | TTG | 14 | 15.854 | | | | | | | | | | CTA |
| ATC_N_ | I_N_V | AAC | 70 | 39.152 | 1 | 40.1982 | 40.7543236 | 2.29450055 | 1.726210882 | 97 | 1.88024266 | 2.1:ATCAA | 1.8:ATCA | AAC |
| GTC | | AAT | 27 | 57.848 | | 8100967 | 3789456 | 8890776e- | 716682e-10 | | 52590514 | TGTC | ACGTC | AAT |
| | | | | | | 079 | | 10 | | | | | | |
| ATC_P_ | I_P_T | CCA | 8 | 13.852 | 3 | 32.4938 | 46.4034387 | 4.11807319 | 4.654898489 | 34 | 2.85835567 | 2.6:ATCCC | 3.7:ATCCC | CCC |
| ACG | | CCC | 20 | 5.457 | | 1941814 | 74517625 | 1284136e- | 2937e-10 | | 6863594 | TACG | CACG | CCA |
| | | CCG | 2 | 4.179 | | 6025 | | 07 | | | | | | CCT |
| | | CCT | 4 | 10.512 | | | | | | | | | | CCG |
| ATC_S_ | I_S_T | AGC | 22 | 8.000 | 5 | 43.3126 | 48.9601965 | 3.19322019 | 2.261213417 | 71 | 2.10256718 | 3.9:ATCAG | 2.8:ATCA | TCC |
| ACC | | AGT | 3 | 11.587 | | 9683161 | 1808599 | 04215274e- | 533984e-09 | | 42774303 | TACC | GCACC | AGC |
| | | TCA | 11 | 14.855 | | 933 | | 08 | | | | | | TCT |
| | | TCC | 22 | 11.148 | | | | | | | | | | TCA |
| | | TCG | 2 | 6.919 | | | | | | | | | | AGT |
| | | TCT | 11 | 18.490 | | | | | | | | | | TCG |
| ATG_D_ | M_D_R | GAC | 53 | 30.433 | 1 | 23.9719 | 25.5795312 | 9.77494088 | 4.245188275 | 88 | 1.70236363 | 1.6:ATGG | 1.7:ATGG | GAC |
| AGA | | GAT | 35 | 57.567 | | 5129019 | 748482 | 2099125e- | 94111e-07 | | 77153024 | ATAGA | ACAGA | GAT |
| | | | | | | 9492 | | 07 | | | | | | |
| ATG_G_ | M_G_F | GGA | 39 | 19.685 | 3 | 31.4059 | 32.6658034 | 6.98148367 | 3.788173615 | 88 | 1.70820834 | 2.2:ATGG | 2.0:ATGG | GGA |
| TTT | | GGC | 16 | 17.400 | | 7013056 | 42851356 | 6906133e- | 9042094e-07 | | 88597917 | GTTTT | GATTT | GGT |
| | | GGG | 15 | 10.930 | | 3116 | | 07 | | | | | | GGC |
| | | GGT | 18 | 39.984 | | | | | | | | | | GGG |
| ATG_L_ | M_L_I | CTA | 18 | 14.161 | 5 | 35.4377 | 42.9611674 | 1.23035694 | 3.762650534 | 100 | 1.68954621 | 2.1:ATGTT | 2.7:ATGCT | CTG |
| ATA | | CTC | 7 | 5.775 | | 4794973 | 40359844 | 14360205e- | 0095945e-08 | | 56383148 | AATA | GATA | TTG |
| | | CTG | 30 | 11.312 | | 3435 | | 06 | | | | | | CTA |
| | | CTT | 13 | 12.844 | | | | | | | | | | TTA |
| | | TTA | 13 | 27.597 | | | | | | | | | | CTT |
| | | TTG | 19 | 28.311 | | | | | | | | | | CTC |
| ATG_L_ | M_L_R | CTA | 7 | 6.939 | 5 | 64.6006 | 105.106370 | 1.35618833 | 4.426290126 | 49 | 3.30163245 | 3.5:ATGTT | 5.1:ATGCT | CTG |
| CGA | | CTC | 1 | 2.830 | | 9355803 | 32643044 | 56616748e- | 920669e-21 | | 00679346 | GCGA | GCGA | CTA |
| | | CTG | 28 | 5.543 | | 995 | | 12 | | | | | | TTA |
| | | CTT | 3 | 6.294 | | | | | | | | | | TTG |
| | | TTA | 6 | 13.523 | | | | | | | | | | CTT |
| | | TTG | 4 | 13.873 | | | | | | | | | | CTC |
| ATG_L_ | M_L_D | CTA | 27 | 28.605 | 5 | 64.5176 | 74.5296110 | 1.41102792 | 1.166202405 | 202 | 1.69511043 | 1.9:ATGTT | 2.4:ATGCT | CTT |
| GAT | | CTC | 15 | 11.665 | | 7244618 | 9815364 | 99638154e- | 9670409e-14 | | 8348459 | AGAT | TGAT | TTG |
| | | CTG | 34 | 22.850 | | 054 | | 12 | | | | | | CTG |
| | | CTT | 61 | 25.945 | | | | | | | | | | TTA |
| | | TTA | 29 | 55.747 | | | | | | | | | | CTA |
| | | TTG | 36 | 57.189 | | | | | | | | | | CTC |
| ATG_L_ | M_L_V | CTA | 13 | 12.461 | 5 | 45.5653 | 56.7312920 | 1.11338669 | 5.744687040 | 88 | 1.94585504 | 2.4:ATGTT | 2.9:ATGCT | CTT |
| GTT | | CTC | 4 | 5.082 | | 6403557 | 9646335 | 59304876e- | 834783e-11 | | 25458956 | AGTT | TGTT | TTG |
| | | CTG | 14 | 9.954 | | 004 | | 08 | | | | | | CTG |
| | | CTT | 33 | 11.303 | | | | | | | | | | CTA |
| | | TTA | 10 | 24.286 | | | | | | | | | | TTA |
| | | TTG | 14 | 24.914 | | | | | | | | | | CTC |
| ATG_L_ | M_L_L | CTA | 28 | 21.949 | 5 | 37.3113 | 41.2048714 | 5.18744728 | 8.529774979 | 155 | 1.55406692 | 1.9:ATGTT | 2.1:ATGCT | CTT |
| TTA | | CTC | 13 | 8.951 | | 5040624 | 7606481 | 7021409e- | 18915e-08 | | 40778813 | GTTA | TTTA | TTA |
| | | CTG | 18 | 17.533 | | 663 | | 07 | | | | | | CTA |
| | | CTT | 42 | 19.909 | | | | | | | | | | TTG |
| | | TTA | 31 | 42.776 | | | | | | | | | | CTG |
| | | TTG | 23 | 43.882 | | | | | | | | | | CTC |
| ATG_L_ | M_L_L | CTA | 26 | 19.400 | 5 | 52.2818 | 61.3295142 | 4.72236991 | 6.454372249 | 137 | 1.72395076 | 2.4:ATGTT | 2.6:ATGCT | CTT |
| TTG | | CTC | 6 | 7.911 | | 4882446 | 4292614 | 1055467e- | 9726e-12 | | 03919462 | GTTG | TTTG | TTA |
| | | CTG | 16 | 15.497 | | 587 | | 10 | | | | | | CTA |
| | | CTT | 45 | 17.597 | | | | | | | | | | TTG |
| | | TTA | 28 | 37.808 | | | | | | | | | | CTG |
| | | TTG | 16 | 38.786 | | | | | | | | | | CTC |
| ATG_R_ | M_R_T | AGA | 14 | 20.388 | 5 | 37.0202 | 50.7403242 | 5.93385970 | 9.775589200 | 43 | 2.45354653 | 5.1:ATGCG | 3.7:ATGC | CGT |
| ACT | | AGG | 5 | 9.327 | | 1189873 | 2434477 | 7390055e- | 346798e-10 | | 4318094 | CACT | GTACT | AGA |
| | | CGA | 1 | 2.936 | | 795 | | 07 | | | | | | AGG |
| | | CGC | 0 | 2.545 | | | | | | | | | | CGG |
| | | CGG | 1 | 1.795 | | | | | | | | | | CGA |
| | | CGT | 22 | 6.009 | | | | | | | | | | CGC |
| ATG_R_ | M_R_V | AGA | 12 | 20.388 | 5 | 24.0442 | 39.4487303 | 0.00021290 | 1.928750586 | 43 | 1.99708617 | 1.7:ATGA | 4.4:ATGC | CGA |
| GTT | | AGG | 7 | 9.327 | | 1021134 | 6230333 | 6637773007 | 1450428e-07 | | 86968288 | GAGTT | GAGTT | AGA |
| | | CGA | 13 | 2.936 | | 523 | | 76 | | | | | | AGG |
| | | CGC | 2 | 2.545 | | | | | | | | | | CGT |
| | | CGG | 3 | 1.795 | | | | | | | | | | CGG |
| | | CGT | 6 | 6.009 | | | | | | | | | | CGC |
| ATG_T_ | M_T_T | ACA | 11 | 21.578 | 3 | 30.9445 | 37.6462284 | 8.73208356 | 3.358414686 | 71 | 1.94841906 | 2.0:ATGAC | 2.4:ATGA | ACC |
| ACC | | ACC | 36 | 15.042 | | 5290994 | 0682933 | 8435169e- | 432946e-08 | | 50635995 | AACC | CCACC | ACT |
| | | ACG | 6 | 9.959 | | 807 | | 07 | | | | | | ACA |
| | | ACT | 18 | 24.421 | | | | | | | | | | ACG |
| ATG_T_ | M_T_S | ACA | 9 | 15.195 | 3 | 23.5050 | 32.6269014 | 3.16869132 | 3.860407419 | 50 | 1.98616519 | 1.7:ATGAC | 3.0:ATGA | ACG |
| AGC | | ACC | 8 | 10.593 | | 6964781 | 34574066 | 6314747e- | 069301e-07 | | 38281764 | AAGC | CGAGC | ACT |
| | | ACG | 21 | 7.013 | | 943 | | 05 | | | | | | ACA |
| | | ACT | 12 | 17.198 | | | | | | | | | | ACC |
| ATG_V_ | M_V_K | GTA | 38 | 36.580 | 3 | 40.2571 | 45.8806636 | 9.39809745 | 6.012698753 | 170 | 1.56401791 | 1.6:ATGGT | 2.0:ATGGT | GTC |
| AAA | | GTC | 68 | 34.251 | | 7188104 | 1213508 | 1208549e- | 471637e-10 | | 03555985 | TAAA | CAAA | GTT |
| | | GTG | 23 | 33.347 | | 6446 | | 09 | | | | | | GTA |
| | | GTT | 41 | 65.822 | | | | | | | | | | GTG |
| ATG_V_ | M_V_A | GTA | 21 | 7.316 | 3 | 30.1226 | 34.6210700 | 1.30045046 | 1.464810605 | 34 | 2.36219762 | 6.9:ATGGT | 2.9:ATGGT | GTA |
| GCG | | GTC | 1 | 6.850 | | 6092553 | 7896383 | 48767009e- | 6706556e-07 | | 36157733 | CGCG | AGCG | GTT |
| | | GTG | 2 | 6.669 | | 9773 | | 06 | | | | | | GTG |
| | | GTT | 10 | 13.164 | | | | | | | | | | GTC |
| ATT_A_ | I_A_K | GCA | 48 | 62.181 | 3 | 33.5394 | 38.1018573 | 2.47822574 | 2.689552236 | 211 | 1.46302634 | 1.4:ATTGC | 1.8:ATTGC | GCC |
| AAG | | GCC | 84 | 47.139 | | 1182946 | 388055 | 70998066e- | 449402e-08 | | 5416694 | TAAG | CAAG | GCT |
| | | GCG | 23 | 24.125 | | 071 | | 07 | | | | | | GCA |
| | | GCT | 56 | 77.556 | | | | | | | | | | GCG |
| ATT_A_ | I_A_I | GCA | 17 | 31.827 | 3 | 34.0681 | 38.4689326 | 1.91661677 | 2.248803468 | 108 | 1.67691274 | 2.1:ATTGC | 2.1:ATTGC | GCC |
| ATC | | GCC | 50 | 24.128 | | 6430051 | 8268412 | 03091065e- | 841912e-08 | | 1624707 | GATC | CATC | GCT |
| | | GCG | 6 | 12.348 | | 729 | | 07 | | | | | | GCA |
| | | GCT | 35 | 39.697 | | | | | | | | | | GCG |
| ATT_A_ | I_A_A | GCA | 23 | 52.456 | 3 | 35.0766 | 31.8488469 | 1.17366649 | 5.631742966 | 178 | 1.44837887 | 2.3:ATTGC | 1.4:ATTGC | GCT |
| GCT | | GCC | 48 | 39.766 | | 3704423 | 8707871 | 3518817e- | 926274e-07 | | 87438858 | AGCT | TGCT | GCC |
| | | GCG | 14 | 20.351 | | 153 | | 07 | | | | | | GCA |
| | | GCT | 93 | 65.426 | | | | | | | | | | GCG |
| ATT_D_ | I_D_K | GAC | 88 | 54.988 | 1 | 28.5402 | 30.2969749 | 9.17686178 | 3.707036057 | 159 | 1.53841761 | 1.5:ATTGA | 1.6:ATTGA | GAC |
| AAG | | GAT | 71 | 104.012 | | 9558259 | 1966013 | 6485416e- | 7531034e-08 | | 35940264 | TAAG | CAAG | GAT |
| | | | | | | 6443 | | 08 | | | | | | |
| ATT_E_ | I_E_L | GAA | 13 | 27.955 | 1 | 23.6823 | 26.5698966 | 1.13619749 | 2.541734863 | 40 | 2.21157881 | 2.2:ATTGA | 2.2:ATTGA | GAG |
| CTC | | GAG | 27 | 12.045 | | 5088020 | 6339867 | 45606382e- | 2555785e-07 | | 52947897 | ACTC | GCTC | GAA |
| | | | | | | 6233 | | 06 | | | | | | |
| ATT_F_ | I_F_K | TTC | 122 | 79.195 | 1 | 38.0631 | 38.9584933 | 6.84908664 | 4.329127073 | 195 | 1.55751804 | 1.6:ATTTT | 1.5:ATTTT | TTC |
| AAA | | TTT | 73 | 115.805 | | 6918927 | 6658557 | 9249811e- | 2949576e-10 | | 2098327 | TAAA | CAAA | TTT |
| | | | | | | 2685 | | 10 | | | | | | |
| ATT_F_ | I_F_N | TTC | 80 | 48.735 | 1 | 33.0979 | 33.7731969 | 8.76294464 | 6.192620661 | 120 | 1.68695118 | 1.8:ATTTT | 1.6:ATTTT | TTC |
| AAC | | TTT | 40 | 71.265 | | 8590964 | 2580683 | 7055646e- | 00098e-09 | | 49119811 | TAAC | CAAC | TTT |
| | | | | | | 119 | | 09 | | | | | | |
| ATT_F_ | I_F_K | TTC | 86 | 49.141 | 1 | 45.9043 | 46.5517994 | 1.24171127 | 8.922827521 | 121 | 1.83279370 | 2.1:ATTTT | 1.8:ATTTT | TTC |
| AAG | | TTT | 35 | 71.859 | | 3109941 | 9083492 | 41168346e- | 90336e-12 | | 38236362 | TAAG | CAAG | TTT |
| | | | | | | 034 | | 11 | | | | | | |
| ATT_F_ | I_F_N | TTC | 97 | 60.919 | 1 | 35.2010 | 35.9838632 | 2.97366394 | 1.989584058 | 150 | 1.62299877 | 1.7:ATTTT | 1.6:ATTTT | TTC |
| AAT | | TTT | 53 | 89.081 | | 2892595 | 5587737 | 8740741e- | 935774e-09 | | 87214508 | TAAT | CAAT | TTT |
| | | | | | | 362 | | 09 | | | | | | |
| ATT_G_ | I_G_L | GGA | 16 | 19.909 | 3 | 48.0192 | 70.0287204 | 2.10944578 | 4.208319525 | 89 | 2.08482630 | 1.6:ATTGG | 3.3:ATTGG | GGG |
| CTT | | GGC | 11 | 17.598 | | 9208588 | 2091923 | 7838356e- | 76807e-15 | | 68270394 | TCTT | GCTT | GGT |
| | | GGG | 37 | 11.055 | | 137 | | 10 | | | | | | GGA |
| | | GGT | 25 | 40.438 | | | | | | | | | | GGC |
| ATT_G_ | I_G_F | GGA | 15 | 20.133 | 3 | 32.1378 | 35.8499087 | 4.89477745 | 8.055993321 | 90 | 1.51846533 | 3.6:ATTGG | 2.5:ATTGG | GGT |
| TTC | | GGC | 5 | 17.795 | | 6316747 | 7316597 | 4191303e- | 999106e-08 | | 44060792 | CTTC | GTTC | GGG |
| | | GGG | 28 | 11.179 | | 404 | | 07 | | | | | | GGA |
| | | GGT | 42 | 40.893 | | | | | | | | | | GGC |
| ATT_G_ | I_G_F | GGA | 47 | 33.555 | 3 | 35.1842 | 39.4671601 | 1.11381166 | 1.381930945 | 150 | 1.61287083 | 1.6:ATTGG | 2.1:ATTGG | GGA |
| TTT | | GGC | 21 | 29.659 | | 2768522 | 9167873 | 52085155e- | 526583e-08 | | 03574275 | TTTT | GTTT | GGT |
| | | GGG | 39 | 18.632 | | 9374 | | 07 | | | | | | GGG |
| | | GGT | 43 | 68.155 | | | | | | | | | | GGC |
| ATT_I_ | I_I_K | ATA | 30 | 39.851 | 2 | 39.8157 | 45.3724796 | 2.26001309 | 1.404401329 | 143 | 1.70459433 | 1.6:ATTAT | 2.0:ATTAT | ATC |
| AAG | | ATC | 72 | 36.921 | | 9046320 | 3658716 | 008817e-09 | 033136e-10 | | 86135336 | TAAG | CAAG | ATT |
| | | ATT | 41 | 66.228 | | 916 | | | | | | | | ATA |
| ATT_L_ | I_L_K | CTA | 54 | 61.033 | 5 | 66.9511 | 59.1317076 | 4.41065639 | 1.836977799 | 431 | 1.28057267 | 3.5:ATTCT | 1.5:ATTTT | TTG |
| AAA | | CTC | 17 | 24.889 | | 7931046 | 573359 | 49486627e- | 8443952e-11 | | 2986552 | TAAA | GAAA | TTA |
| | | CTG | 45 | 48.754 | | 98 | | 13 | | | | | | CTA |
| | | CTT | 16 | 55.359 | | | | | | | | | | CTG |
| | | TTA | 119 | 118.944 | | | | | | | | | | CTC |
| | | TTG | 180 | 122.021 | | | | | | | | | | CTT |
| ATT_L_ | I_L_K | CTA | 26 | 44.323 | 5 | 42.7418 | 39.1891217 | 4.16812416 | 2.175509543 | 313 | 1.35695967 | 2.4:ATTCT | 1.4:ATTTT | TTG |
| AAG | | CTC | 15 | 18.075 | | 2557347 | 8885377 | 1644604e- | 9238677e-07 | | 03973232 | TAAG | GAAG | TTA |
| | | CTG | 29 | 35.406 | | 6184 | | 08 | | | | | | CTG |
| | | CTT | 17 | 40.203 | | | | | | | | | | CTA |
| | | TTA | 103 | 86.380 | | | | | | | | | | CTT |
| | | TTG | 123 | 88.614 | | | | | | | | | | CTC |
| ATT_L_ | I_L_G | CTA | 22 | 31.295 | 5 | 38.5130 | 41.6963571 | 2.97577357 | 6.785376375 | 221 | 1.45952455 | 1.8:ATTCT | 1.9:ATTCT | TTG |
| GGT | | CTC | 21 | 12.762 | | 4736932 | 94772325 | 2804654e- | 79173e-08 | | 54944543 | GGGT | TGGT | CTT |
| | | CTG | 14 | 24.999 | | 8945 | | 07 | | | | | | TTA |
| | | CTT | 53 | 28.386 | | | | | | | | | | CTA |
| | | TTA | 41 | 60.990 | | | | | | | | | | CTC |
| | | TTG | 70 | 62.568 | | | | | | | | | | CTG |
| ATT_L_ | I_L_Y | CTA | 8 | 15.435 | 5 | 33.3849 | 38.0699041 | 3.15582386 | 3.653178714 | 109 | 1.69975234 | 1.9:ATTCT | 2.2:ATTCT | CTG |
| TAC | | CTC | 4 | 6.294 | | 2561832 | 5531715 | 0494381e- | 122812e-07 | | 8654816 | ATAC | GTAC | TTA |
| | | CTG | 27 | 12.330 | | 271 | | 06 | | | | | | CTT |
| | | CTT | 26 | 14.000 | | | | | | | | | | TTG |
| | | TTA | 26 | 30.081 | | | | | | | | | | CTA |
| | | TTG | 18 | 30.859 | | | | | | | | | | CTC |
| ATT_L_ | I_L_Y | CTA | 15 | 19.117 | 5 | 45.3839 | 56.6296502 | 1.21212397 | 6.028508592 | 135 | 1.65627897 | 2.0:ATTTT | 2.6:ATTCT | CTT |
| TAT | | CTC | 10 | 7.796 | | 7635939 | 65029014 | 86348256e- | 524408e-11 | | 39578838 | GTAT | TTAT | TTA |
| | | CTG | 11 | 15.271 | | 7245 | | 08 | | | | | | TTG |
| | | CTT | 45 | 17.340 | | | | | | | | | | CTA |
| | | TTA | 35 | 37.256 | | | | | | | | | | CTG |
| | | TTG | 19 | 38.220 | | | | | | | | | | CTC |
| ATT_L_ | I_L_F | CTA | 14 | 21.241 | 5 | 67.0778 | 87.3201731 | 4.15142535 | 2.454649663 | 150 | 1.83700776 | 2.2:ATTTT | 2.9:ATTCT | CTT |
| TTC | | CTC | 11 | 8.662 | | 2581608 | 6960165 | 93672057e- | 5576763e-17 | | 10979787 | GTTC | TTTC | TTA |
| | | CTG | 15 | 16.968 | | 694 | | 13 | | | | | | TTG |
| | | CTT | 56 | 19.266 | | | | | | | | | | CTG |
| | | TTA | 35 | 41.396 | | | | | | | | | | CTA |
| | | TTG | 19 | 42.467 | | | | | | | | | | CTC |
| ATT_L_ | I_L_L | CTA | 30 | 28.180 | 5 | 34.7566 | 40.1848778 | 1.68260072 | 1.370500472 | 199 | 1.37824229 | 1.6:ATTTT | 2.1:ATTCT | TTA |
| TTG | | CTC | 11 | 11.491 | | 7432032 | 8940624 | 2047318e- | 2238915e-07 | | 6220989 | GTTG | TTTG | CTT |
| | | CTG | 15 | 22.510 | | 823 | | 06 | | | | | | TTG |
| | | CTT | 53 | 25.560 | | | | | | | | | | CTA |
| | | TTA | 55 | 54.919 | | | | | | | | | | CTG |
| | | TTG | 35 | 56.339 | | | | | | | | | | CTC |
| ATT_S_ | I_S_I | AGC | 29 | 43.379 | 5 | 47.6980 | 49.6524140 | 4.09343230 | 1.632342004 | 385 | 1.31905009 | 1.8:ATTAG | 1.7:ATTTC | TCC |
| AAA | | AGT | 34 | 62.833 | | 5302529 | 97937886 | 09376095e- | 7440272e-09 | | 90428895 | TAAA | CAAA | TCT |
| | | TCA | 88 | 80.552 | | 998 | | 09 | | | | | | TCA |
| | | TCC | 103 | 60.452 | | | | | | | | | | TCG |
| | | TCG | 40 | 37.519 | | | | | | | | | | AGT |
| | | TCT | 91 | 100.265 | | | | | | | | | | AGC |
| ATT_S_ | I_S_N | AGC | 13 | 22.873 | 5 | 39.6779 | 40.1690772 | 1.73416800 | 1.380595538 | 203 | 1.43328332 | 2.4:ATTAG | 1.8:ATTTC | TCC |
| AAC | | AGT | 14 | 33.130 | | 4553457 | 9817986 | 65217274e- | 4328538e-07 | | 07200095 | TAAC | CAAC | TCA |
| | | TCA | 53 | 42.473 | | 752 | | 07 | | | | | | TCT |
| | | TCC | 58 | 31.875 | | | | | | | | | | TCG |
| | | TCG | 17 | 19.783 | | | | | | | | | | AGT |
| | | TCT | 48 | 52.867 | | | | | | | | | | AGC |
| ATT_S_ | I_S_K | AGC | 16 | 25.464 | 5 | 45.7679 | 46.1501944 | 1.01254349 | 8.464586078 | 226 | 1.46236118 | 2.5:ATTAG | 1.8:ATTTC | TCC |
| AAG | | AGT | 15 | 36.884 | | 8751524 | 83972584 | 62068408e- | 68611e-09 | | 66548325 | TAAG | CAAG | TCA |
| | | TCA | 53 | 47.285 | | 821 | | 08 | | | | | | TCT |
| | | TCC | 64 | 35.486 | | | | | | | | | | TCG |
| | | TCG | 31 | 22.024 | | | | | | | | | | AGC |
| | | TCT | 47 | 58.857 | | | | | | | | | | AGT |
| ATT_S_ | I_S_R | AGC | 13 | 21.521 | 5 | 38.2652 | 39.7046142 | 3.33743238 | 1.712838299 | 191 | 1.46776535 | 2.2:ATTAG | 1.8:ATTTC | TCA |
| AGA | | AGT | 14 | 31.172 | | 6960231 | 81210695 | 8803442e- | 6379525e-07 | | 14224065 | TAGA | AAGA | TCT |
| | | TCA | 71 | 39.962 | | 792 | | 07 | | | | | | TCC |
| | | TCC | 35 | 29.991 | | | | | | | | | | TCG |
| | | TCG | 18 | 18.613 | | | | | | | | | | AGT |
| | | TCT | 40 | 49.742 | | | | | | | | | | AGC |
| ATT_S_ | I_S_I | AGC | 8 | 12.169 | 5 | 40.5031 | 50.5128523 | 1.18211613 | 1.088238398 | 108 | 1.73916873 | 2.1:ATTTC | 2.5:ATTTC | TCC |
| ATC | | AGT | 11 | 17.626 | | 4145165 | 6777753 | 68092106e- | 042794e-09 | | 51530194 | AATC | CATC | TCT |
| | | TCA | 11 | 22.596 | | 969 | | 07 | | | | | | TCA |
| | | TCC | 43 | 16.958 | | | | | | | | | | AGT |
| | | TCG | 8 | 10.525 | | | | | | | | | | TCG |
| | | TCT | 27 | 28.126 | | | | | | | | | | AGC |
| ATT_S_ | I_S_I | AGC | 16 | 23.774 | 5 | 34.7636 | 39.4546917 | 1.67722671 | 1.923424517 | 211 | 1.41443878 | 1.9:ATTTC | 1.9:ATTTC | TCC |
| ATT | | AGT | 28 | 34.436 | | 3992111 | 76463974 | 84067661e- | 0183666e-07 | | 0786557 | GATT | CATT | TCT |
| | | TCA | 34 | 44.147 | | 6194 | | 06 | | | | | | TCA |
| | | TCC | 64 | 33.131 | | | | | | | | | | AGT |
| | | TCG | 11 | 20.562 | | | | | | | | | | AGC |
| | | TCT | 58 | 54.950 | | | | | | | | | | TCG |
| ATT_S_ | I_S_S | AGC | 13 | 23.211 | 5 | 41.4046 | 40.5275701 | 7.77258654 | 1.168771020 | 206 | 1.41563335 | 2.4:ATTAG | 1.6:ATTTC | TCT |
| TCT | | AGT | 14 | 33.620 | | 1452453 | 02021386 | 8611012e- | 8499561e-07 | | 98254205 | TTCT | TTCT | TCA |
| | | TCA | 45 | 43.100 | | 95 | | 08 | | | | | | TCC |
| | | TCC | 33 | 32.346 | | | | | | | | | | AGT |
| | | TCG | 13 | 20.075 | | | | | | | | | | TCG |
| | | TCT | 88 | 53.648 | | | | | | | | | | AGC |
| ATT_V_ | I_V_K | GTA | 30 | 38.732 | 3 | 34.6006 | 39.5731879 | 1.47940064 | 1.312253780 | 180 | 1.48740284 | 1.5:ATTGT | 1.9:ATTGT | GTC |
| AAG | | GTC | 69 | 36.266 | | 9049244 | 28039296 | 17068548e- | 7642233e-08 | | 50291856 | TAAG | CAAG | GTT |
| | | GTG | 35 | 35.308 | | 6056 | | 07 | | | | | | GTG |
| | | GTT | 46 | 69.694 | | | | | | | | | | GTA |
| ATT_V_ | I_V_I | GTA | 17 | 23.884 | 3 | 37.4002 | 44.3773577 | 3.78603491 | 1.254801935 | 111 | 1.74433380 | 2.2:ATTGT | 2.2:ATTGT | GTC |
| ATC | | GTC | 50 | 22.364 | | 9804363 | 8971802 | 40473504e- | 7579798e-09 | | 88290152 | GATC | CATC | GTT |
| | | GTG | 10 | 21.773 | | 613 | | 08 | | | | | | GTA |
| | | GTT | 34 | 42.978 | | | | | | | | | | GTG |
| ATT_V_ | I_V_I | GTA | 15 | 35.074 | 3 | 63.9347 | 69.4418184 | 8.47591191 | 5.620508081 | 163 | 1.64440146 | 2.5:ATTGT | 2.2:ATTGT | GTC |
| ATT | | GTC | 72 | 32.841 | | 8596507 | 9745802 | 8078541e- | 8876785e-15 | | 60425665 | GATT | CATT | GTT |
| | | GTG | 13 | 31.974 | | 867 | | 14 | | | | | | GTA |
| | | GTT | 63 | 63.112 | | | | | | | | | | GTG |
| CAA_G_ | Q_G_S | GGA | 12 | 10.066 | 3 | 40.3687 | 54.0103045 | 8.89972731 | 1.116396438 | 45 | 2.41226149 | 3.4:CAAG | 3.8:CAAG | GGG |
| AGC | | GGC | 6 | 8.898 | | 8573393 | 3483521 | 1037527e- | 4684065e-11 | | 0693765 | GTAGC | GGAGC | GGA |
| | | GGG | 21 | 5.589 | | 371 | | 09 | | | | | | GGT |
| | | GGT | 6 | 20.446 | | | | | | | | | | GGC |
| CAA_I_ | Q_I_I | ATA | 19 | 25.360 | 2 | 35.9470 | 41.1228804 | 1.56383936 | 1.175655173 | 91 | 1.88211276 | 1.9:CAAAT | 2.1:CAAA | ATC |
| ATC | | ATC | 50 | 23.495 | | 7362830 | 9987413 | 61797665e- | 9034503e-09 | | 62797839 | TATC | TCATC | ATT |
| | | ATT | 22 | 42.145 | | 032 | | 08 | | | | | | ATA |
| CAA_I_ | Q_I_S | ATA | 52 | 27.868 | 2 | 29.4884 | 31.2763371 | 3.95055890 | 1.615956558 | 100 | 1.65084680 | 2.3:CAAAT | 1.9:CAAA | ATA |
| TCA | | ATC | 11 | 25.819 | | 7717652 | 46827963 | 0480532e- | 375736e-07 | | 89668151 | CTCA | TATCA | ATT |
| | | ATT | 37 | 46.313 | | 4103 | | 07 | | | | | | ATC |
| CAA_K_ | Q_K_K | AAA | 113 | 156.398 | 1 | 28.1399 | 28.6216963 | 1.12851972 | 8.799074272 | 270 | 1.38287410 | 1.4:CAAA | 1.4:CAAA | AAG |
| AAA | | AAG | 157 | 113.602 | | 5310815 | 4020832 | 58966307e- | 879636e-08 | | 0187737 | AAAAA | AGAAA | AAA |
| | | | | | | 1076 | | 07 | | | | | | |
| CAA_K_ | Q_K_K | AAA | 81 | 119.326 | 1 | 28.7798 | 29.2573898 | 8.10905127 | 6.337407004 | 206 | 1.45428991 | 1.5:CAAA | 1.4:CAAA | AAG |
| AAG | | AAG | 125 | 86.674 | | 4746183 | 4044208 | 8956942e- | 646516e-08 | | 70356012 | AAAAG | AGAAG | AAA |
| | | | | | | 4663 | | 08 | | | | | | |
| CAA_L_ | Q_L_K | CTA | 54 | 50.129 | 5 | 61.6481 | 54.5201800 | 5.54549349 | 1.638396630 | 354 | 1.37905839 | 3.5:CAACT | 1.4:CAACT | TTG |
| AAA | | CTC | 15 | 20.442 | | 0543039 | 3148646 | 76464595e- | 0452317e-10 | | 31958 | TAAA | GAAA | TTA |
| | | CTG | 58 | 40.044 | | 798 | | 12 | | | | | | CTG |
| | | CTT | 13 | 45.469 | | | | | | | | | | CTA |
| | | TTA | 74 | 97.694 | | | | | | | | | | CTC |
| | | TTG | 140 | 100.222 | | | | | | | | | | CTT |
| CAA_Q_ | Q_Q_Q | CAA | 483 | 565.546 | 1 | 36.2827 | 38.0103405 | 1.70669341 | 7.037068149 | 828 | 1.22872956 | 1.2:CAAC | 1.3:CAAC | CAA |
| CAA | | CAG | 345 | 262.454 | | 3230552 | 0080947 | 28487725e- | 90735e-10 | | 7601233 | AACAA | AGCAA | CAG |
| | | | | | | 6196 | | 09 | | | | | | |
| CAA_Q_ | Q_Q_Q | CAA | 256 | 325.804 | 1 | 44.3237 | 47.1821872 | 2.78314523 | 6.468563303 | 477 | 1.35699223 | 1.3:CAAC | 1.5:CAAC | CAA |
| CAG | | CAG | 221 | 151.196 | | 8198167 | 8087599 | 25338187e- | 914926e-12 | | 49900103 | AACAG | AGCAG | CAG |
| | | | | | | 4 | | 11 | | | | | | |
| CAA_S_ | Q_S_D | AGC | 24 | 18.028 | 5 | 41.1370 | 38.9665694 | 8.80338914 | 2.411916681 | 160 | 1.47947775 | 2.8:CAATC | 1.8:CAAA | TCT |
| GAT | | AGT | 47 | 26.112 | | 1328675 | 68202024 | 3943951e- | 0656804e-07 | | 18345372 | CGAT | GTGAT | AGT |
| | | TCA | 16 | 33.476 | | 576 | | 08 | | | | | | AGC |
| | | TCC | 9 | 25.123 | | | | | | | | | | TCG |
| | | TCG | 17 | 15.592 | | | | | | | | | | TCA |
| | | TCT | 47 | 41.669 | | | | | | | | | | TCC |
| CAA_V_ | Q_V_T | GTA | 41 | 19.151 | 3 | 30.8689 | 34.9136428 | 9.05807231 | 1.270516815 | 89 | 1.69806269 | 2.0:CAAGT | 2.1:CAAG | GTA |
| ACA | | GTC | 18 | 17.931 | | 4675309 | 9626172 | 1688947e- | 3248366e-07 | | 35738778 | TACA | TAACA | GTC |
| | | GTG | 13 | 17.458 | | 442 | | 07 | | | | | | GTT |
| | | GTT | 17 | 34.460 | | | | | | | | | | GTG |
| CAC_G_ | H_G_K | GGA | 4 | 9.619 | 3 | 31.0177 | 46.4393931 | 8.42749277 | 4.573663339 | 43 | 2.38101470 | 2.4:CACG | 3.7:CACG | GGG |
| AAG | | GGC | 6 | 8.502 | | 8655560 | 3202548 | 8357571e- | 052711e-10 | | 830117 | GAAAG | GGAAG | GGT |
| | | GGG | 20 | 5.341 | | 2072 | | 07 | | | | | | GGC |
| | | GGT | 13 | 19.538 | | | | | | | | | | GGA |
| CAC_L_ | H_L_R | CTA | 2 | 3.823 | 5 | 38.4625 | 38.5714125 | 3.04617457 | 2.896428132 | 27 | 2.74681067 | 6.9:CACCT | 2.9:CACTT | TTG |
| CGA | | CTC | 0 | 1.559 | | 4469296 | 399401 | 0352341e- | 280687e-07 | | 97973433 | TCGA | GCGA | TTA |
| | | CTG | 0 | 3.054 | | 661 | | 07 | | | | | | CTA |
| | | CTT | 0 | 3.468 | | | | | | | | | | CTT |
| | | TTA | 3 | 7.451 | | | | | | | | | | CTG |
| | | TTG | 22 | 7.644 | | | | | | | | | | CTC |
| CAG_A_ | Q_A_T | GCA | 8 | 12.672 | 3 | 35.9704 | 54.1208901 | 7.59686291 | 1.057386241 | 43 | 2.42784926 | 2.6:CAGG | 4.1:CAGG | GCG |
| ACA | | GCC | 9 | 9.607 | | 5455978 | 2195521 | 5604791e- | 651209e-11 | | 9283763 | CTACA | CGACA | GCC |
| | | GCG | 20 | 4.916 | | 321 | | 08 | | | | | | GCA |
| | | GCT | 6 | 15.805 | | | | | | | | | | GCT |
| CAG_F_ | Q_F_K | TTC | 60 | 32.896 | 1 | 37.3069 | 37.6024419 | 1.00924849 | 8.673582701 | 81 | 1.93490209 | 2.3:CAGTT | 1.8:CAGTT | TTC |
| AAA | | TTT | 21 | 48.104 | | 3932056 | 52051095 | 39453898e- | 581865e-10 | | 45784507 | TAAA | CAAA | TTT |
| | | | | | | 055 | | 09 | | | | | | |
| CAG_G_ | Q_G_G | GGA | 2 | 5.369 | 3 | 39.7969 | 53.5200658 | 1.17648100 | 1.420241757 | 24 | 3.92504087 | 5.5:CAGG | 4.0:CAGG | GGC |
| GGA | | GGC | 19 | 4.745 | | 9948265 | 1322712 | 60686548e- | 9522068e-11 | | 7723925 | GTGGA | GCGGA | GGT |
| | | GGG | 1 | 2.981 | | 218 | | 08 | | | | | | GGA |
| | | GGT | 2 | 10.905 | | | | | | | | | | GGG |
| CAG_I_ | Q_I_K | ATA | 22 | 27.032 | 2 | 36.1226 | 40.6477212 | 1.43244174 | 1.490937625 | 97 | 1.81685613 | 2.0:CAGAT | 2.1:CAGA | ATC |
| AAA | | ATC | 52 | 25.045 | | 0048453 | 7193013 | 43867102e- | 6160466e-09 | | 20452992 | TAAA | TCAAA | ATT |
| | | ATT | 23 | 44.924 | | 466 | | 08 | | | | | | ATA |
| CAG_I_ | Q_I_C | ATA | 32 | 12.262 | 2 | 39.0593 | 44.4473381 | 3.29889485 | 2.230402002 | 44 | 2.58938336 | 3.4:CAGAT | 2.6:CAGA | ATA |
| TGT | | ATC | 6 | 11.360 | | 5663479 | 80857344 | 36497267e- | 7388762e-10 | | 95949855 | TTGT | TATGT | ATT |
| | | ATT | 6 | 20.378 | | 304 | | 09 | | | | | | ATC |
| CAG_L_ | Q_L_A | CTA | 4 | 5.806 | 5 | 35.2459 | 54.1440461 | 1.34382480 | 1.957710334 | 41 | 2.68352122 | 2.4:CAGCT | 4.0:CAGCT | CTT |
| GCG | | CTC | 1 | 2.368 | | 2773993 | 46126946 | 49233848e- | 9338626e-10 | | 07706105 | CGCG | TGCG | TTG |
| | | CTG | 3 | 4.638 | | 925 | | 06 | | | | | | TTA |
| | | CTT | 21 | 5.266 | | | | | | | | | | CTA |
| | | TTA | 6 | 11.315 | | | | | | | | | | CTG |
| | | TTG | 6 | 11.608 | | | | | | | | | | CTC |
| CAG_P_ | Q_P_E | CCA | 8 | 22.815 | 3 | 35.8983 | 42.2409885 | 7.86824078 | 3.566414839 | 56 | 2.17507547 | 2.9:CAGCC | 2.8:CAGC | CCC |
| GAA | | CCC | 25 | 8.988 | | 5317592 | 44000565 | 2108241e- | 8417185e-09 | | 23946097 | AGAA | CCGAA | CCT |
| | | CCG | 11 | 6.883 | | 9714 | | 08 | | | | | | CCG |
| | | CCT | 12 | 17.314 | | | | | | | | | | CCA |
| CAG_Q_ | Q_Q_Q | CAA | 262 | 334.000 | 1 | 45.9869 | 48.9661469 | 1.19042178 | 2.604185695 | 489 | 1.35960750 | 1.3:CAGC | 1.5:CAGC | CAA |
| CAA | | CAG | 227 | 155.000 | | 6902220 | 4171074 | 23837535e- | 3884798e-12 | | 6027204 | AACAA | AGCAA | CAG |
| | | | | | | 6495 | | 11 | | | | | | |
| CAG_Q_ | Q_Q_Q | CAA | 253 | 356.540 | 1 | 87.8712 | 94.8603080 | 6.98563231 | 2.043055601 | 522 | 1.51696159 | 1.4:CAGC | 1.6:CAGC | CAG |
| CAG | | CAG | 269 | 165.460 | | 6069071 | 6369678 | 1173287e- | 9472275e-22 | | 5988054 | AACAG | AGCAG | CAA |
| | | | | | | 63 | | 21 | | | | | | |
| CAG_R_ | Q_R_I | AGA | 13 | 26.552 | 5 | 36.5362 | 50.7460728 | 7.41823540 | 9.749123902 | 56 | 2.21480859 | 2.3:CAGC | 3.3:CAGC | CGT |
| ATT | | AGG | 9 | 12.147 | | 8968830 | 8476864 | 5989118e- | 010704e-10 | | 43830673 | GGATT | GTATT | AGA |
| | | CGA | 4 | 3.824 | | 904 | | 07 | | | | | | AGG |
| | | CGC | 3 | 3.314 | | | | | | | | | | CGA |
| | | CGG | 1 | 2.337 | | | | | | | | | | CGC |
| | | CGT | 26 | 7.825 | | | | | | | | | | CGG |
| CAG_R_ | Q_R_L | AGA | 22 | 37.457 | 5 | 46.2224 | 58.1311085 | 8.18264369 | 2.955534398 | 79 | 2.12770910 | 5.4:CAGC | 2.8:CAGC | CGT |
| TTG | | AGG | 11 | 17.135 | | 4024316 | 8160352 | 569681e-09 | 7062184e-11 | | 3498453 | GATTG | GTTTG | AGA |
| | | CGA | 1 | 5.395 | | 743 | | | | | | | | AGG |
| | | CGC | 5 | 4.676 | | | | | | | | | | CGG |
| | | CGG | 9 | 3.297 | | | | | | | | | | CGC |
| | | CGT | 31 | 11.039 | | | | | | | | | | CGA |
| CAG_S_ | Q_S_Q | AGC | 7 | 10.929 | 5 | 34.5659 | 47.7951099 | 1.83655274 | 3.910947076 | 97 | 1.66121011 | 2.0:CAGA | 3.1:CAGTC | TCG |
| CAA | | AGT | 8 | 15.831 | | 9422530 | 6434827 | 28223278e- | 868426e-09 | | 5346313 | GTCAA | GCAA | TCT |
| | | TCA | 15 | 20.295 | | 8245 | | 06 | | | | | | TCA |
| | | TCC | 12 | 15.231 | | | | | | | | | | TCC |
| | | TCG | 29 | 9.453 | | | | | | | | | | AGT |
| | | TCT | 26 | 25.262 | | | | | | | | | | AGC |
| CAG_V_ | Q_V_R | GTA | 20 | 5.595 | 3 | 39.3036 | 48.1256196 | 1.49670352 | 2.002355027 | 26 | 3.33363914 | 10.1:CAGG | 3.6:CAGG | GTA |
| CGC | | GTC | 2 | 5.238 | | 3808747 | 7032789 | 4726313e- | 3444165e-10 | | 04104457 | TTCGC | TACGC | GTG |
| | | GTG | 3 | 5.100 | | 676 | | 08 | | | | | | GTC |
| | | GTT | 1 | 10.067 | | | | | | | | | | GTT |
| CAT_F_ | H_F_K | TTC | 58 | 34.927 | 1 | 25.1744 | 25.6658630 | 5.23719619 | 4.059447733 | 86 | 1.71214320 | 1.8:CATTT | 1.7:CATTT | TTC |
| AAA | | TTT | 28 | 51.073 | | 3110550 | 27012847 | 43578e-07 | 272024e-07 | | 27028451 | TAAA | CAAA | TTT |
| | | | | | | 923 | | | | | | | | |
| CAT_G_ | H_G_F | GGA | 12 | 13.646 | 3 | 31.1085 | 42.6779900 | 8.06468331 | 2.880544753 | 61 | 1.91987528 | 2.0:CATGG | 3.2:CATG | GGG |
| TTT | | GGC | 11 | 12.061 | | 4597353 | 3806919 | 6276279e- | 0673023e-09 | | 0581611 | TTTT | GGTTT | GGT |
| | | GGG | 24 | 7.577 | | 2134 | | 07 | | | | | | GGA |
| | | GGT | 14 | 27.716 | | | | | | | | | | GGC |
| CAT_L_ | H_L_K | CTA | 17 | 29.596 | 5 | 68.3319 | 63.3783950 | 2.27810785 | 2.430398411 | 209 | 1.53405052 | 6.7:CATCT | 1.8:CATTT | TTG |
| AAA | | CTC | 11 | 12.069 | | 9611216 | 3987388 | 08768886e- | 108009e-12 | | 14747804 | TAAA | GAAA | TTA |
| | | CTG | 22 | 23.642 | | 261 | | 13 | | | | | | CTG |
| | | CTT | 4 | 26.845 | | | | | | | | | | CTA |
| | | TTA | 49 | 57.678 | | | | | | | | | | CTC |
| | | TTG | 106 | 59.170 | | | | | | | | | | CTT |
| CAT_L_ | H_L_P | CTA | 1 | 7.080 | 5 | 65.8928 | 128.140524 | 7.31543794 | 5.903568836 | 50 | 3.27045670 | 7.1:CATCT | 7.3:CATCT | CTC |
| CCC | | CTC | 21 | 2.887 | | 6899130 | 14587172 | 6384157e- | 642293e-26 | | 17767303 | ACCC | CCCC | CTT |
| | | CTG | 3 | 5.656 | | 144 | | 13 | | | | | | TTA |
| | | CTT | 10 | 6.422 | | | | | | | | | | TTG |
| | | TTA | 8 | 13.799 | | | | | | | | | | CTG |
| | | TTG | 7 | 14.156 | | | | | | | | | | CTA |
| CAT_L_ | H_L_F | CTA | 4 | 11.470 | 5 | 75.1235 | 94.1008168 | 8.76662765 | 9.230957120 | 81 | 2.35780555 | 18.3:CATC | 3.7:CATCT | CTT |
| TTC | | CTC | 8 | 4.677 | | 6797374 | 5342436 | 7397516e- | 905817e-19 | | 52226647 | TGTTC | TTTC | TTG |
| | | CTG | 0 | 9.163 | | 375 | | 15 | | | | | | TTA |
| | | CTT | 38 | 10.404 | | | | | | | | | | CTC |
| | | TTA | 15 | 22.354 | | | | | | | | | | CTA |
| | | TTG | 16 | 22.932 | | | | | | | | | | CTG |
| CAT_R_ | H_R_Q | AGA | 9 | 22.285 | 5 | 59.5781 | 99.7692956 | 1.48555114 | 5.911247825 | 47 | 3.20143279 | 3.9:CATCG | 5.9:CATCG | CGA |
| CAG | | AGG | 8 | 10.194 | | 9967248 | 7745887 | 7379553e- | 950523e-20 | | 44733854 | GCAG | ACAG | AGA |
| | | CGA | 19 | 3.209 | | 035 | | 11 | | | | | | CGC |
| | | CGC | 8 | 2.782 | | | | | | | | | | AGG |
| | | CGG | 0 | 1.962 | | | | | | | | | | CGT |
| | | CGT | 3 | 6.568 | | | | | | | | | | CGG |
| CCA_E_ | P_E_S | GAA | 16 | 32.847 | 1 | 25.5966 | 28.6966699 | 4.20763442 | 8.464916745 | 47 | 2.14262517 | 2.1:CCAG | 2.2:CCAG | GAG |
| TCG | | GAG | 31 | 14.153 | | 7669610 | 35422335 | 91090056e- | 316905e-08 | | 1013442 | AATCG | AGTCG | GAA |
| | | | | | | 3053 | | 07 | | | | | | |
| CCA_F_ | P_F_K | TTC | 51 | 28.429 | 1 | 29.8580 | 30.1752757 | 4.64869840 | 3.947093454 | 70 | 1.89327888 | 2.2:CCATT | 1.8:CCATT | TTC |
| AAG | | TTT | 19 | 41.571 | | 2042663 | 44286367 | 8181602e- | 1370847e-08 | | 51163382 | TAAG | CAAG | TTT |
| | | | | | | 798 | | 08 | | | | | | |
| CCA_G_ | P_G_G | GGA | 3 | 14.988 | 3 | 40.7789 | 37.1477725 | 7.28468530 | 4.281756002 | 67 | 1.94797859 | 5.0:CCAG | 1.8:CCAG | GGT |
| GGT | | GGC | 7 | 13.248 | | 2212180 | 20581995 | 7408518e- | 2099955e-08 | | 9668731 | GAGGT | GTGGT | GGC |
| | | GGG | 2 | 8.322 | | 889 | | 09 | | | | | | GGA |
| | | GGT | 55 | 30.442 | | | | | | | | | | GGG |
| CCA_K_ | P_K_G | AAA | 27 | 51.554 | 1 | 27.5972 | 27.7939192 | 1.49389884 | 1.349495967 | 89 | 1.72887655 | 1.9:CCAA | 1.7:CCAA | AAG |
| GGT | | AAG | 62 | 37.446 | | 6456842 | 1646883 | 44814098e- | 713402e-07 | | 99918776 | AAGGT | AGGGT | AAA |
| | | | | | | 3036 | | 07 | | | | | | |
| CCA_P_ | P_P_R | CCA | 55 | 30.148 | 3 | 37.7658 | 36.0488854 | 3.16826584 | 7.312264586 | 74 | 1.89367635 | 3.8:CCACC | 1.8:CCACC | CCA |
| AGA | | CCC | 8 | 11.876 | | 1305493 | 1193638 | 09033286e- | 470681e-08 | | 18419142 | TAGA | AAGA | CCC |
| | | CCG | 5 | 9.096 | | 613 | | 08 | | | | | | CCT |
| | | CCT | 6 | 22.880 | | | | | | | | | | CCG |
| CCA_P_ | P_P_G | CCA | 9 | 16.296 | 3 | 46.9395 | 76.0955329 | 3.58001569 | 2.110004438 | 40 | 3.27895716 | 3.2:CCACC | 4.7:CCACC | CCG |
| GGC | | CCC | 2 | 6.420 | | 6880680 | 7769995 | 0820228e- | 6194562e-16 | | 43108233 | CGGC | GGGC | CCA |
| | | CCG | 23 | 4.917 | | 9326 | | 10 | | | | | | CCT |
| | | CCT | 6 | 12.367 | | | | | | | | | | CCC |
| CCC_R_ | P_R_E | AGA | 12 | 15.647 | 5 | 53.8950 | 105.876493 | 2.20255995 | 3.044221715 | 33 | 3.54446944 | 3.9:CCCCG | 7.5:CCCCG | CGA |
| GAG | | AGG | 2 | 7.158 | | 2954184 | 27985133 | 74905694e- | 314959e-21 | | 62547126 | CGAG | AGAG | AGA |
| | | CGA | 17 | 2.253 | | 165 | | 10 | | | | | | CGT |
| | | CGC | 0 | 1.953 | | | | | | | | | | AGG |
| | | CGG | 0 | 1.377 | | | | | | | | | | CGG |
| | | CGT | 2 | 4.611 | | | | | | | | | | CGC |
| CCC_S_ | P_S_V | AGC | 4 | 7.662 | 5 | 42.8934 | 47.1541390 | 3.88345528 | 5.284864719 | 68 | 2.11994768 | 4.7:CCCTC | 2.4:CCCTC | TCT |
| GTG | | AGT | 7 | 11.098 | | 4647981 | 064562 | 08327425e- | 6526456e-09 | | 85711364 | AGTG | TGTG | TCC |
| | | TCA | 3 | 14.227 | | 75 | | 08 | | | | | | AGT |
| | | TCC | 8 | 10.677 | | | | | | | | | | TCG |
| | | TCG | 4 | 6.627 | | | | | | | | | | AGC |
| | | TCT | 42 | 17.709 | | | | | | | | | | TCA |
| CCG_G_ | P_G_Y | GGA | 3 | 5.816 | 3 | 57.6509 | 70.0037772 | 1.86615342 | 4.260394479 | 26 | 3.86369943 | 23.6:CCGG | 4.3:CCGG | GGC |
| TAT | | GGC | 22 | 5.141 | | 3833110 | 3465179 | 50096314e- | 686388e-15 | | 85161945 | GTTAT | GCTAT | GGA |
| | | GGG | 1 | 3.229 | | 1486 | | 12 | | | | | | GGG |
| | | GGT | 0 | 11.813 | | | | | | | | | | GGT |
| CCG_L_ | P_L_Y | CTA | 6 | 5.806 | 5 | 39.2382 | 59.7434823 | 2.12651162 | 1.373226649 | 41 | 2.60374114 | 2.8:CCGTT | 4.3:CCGCT | CTG |
| TAC | | CTC | 2 | 2.368 | | 5410074 | 6727016 | 10122422e- | 0107279e-11 | | 011348 | ATAC | GTAC | CTA |
| | | CTG | 20 | 4.638 | | 345 | | 07 | | | | | | TTG |
| | | CTT | 4 | 5.266 | | | | | | | | | | TTA |
| | | TTA | 4 | 11.315 | | | | | | | | | | CTT |
| | | TTG | 5 | 11.608 | | | | | | | | | | CTC |
| CCT_R_ | P_R_L | AGA | 1 | 10.905 | 5 | 48.3609 | 75.5818142 | 2.99756151 | 7.033696003 | 23 | 4.24130299 | 10.9:CCTA | 7.0:CCTCG | CGA |
| CTA | | AGG | 2 | 4.989 | | 4167927 | 7831528 | 0510337e- | 922999e-15 | | 2595476 | GACTA | ACTA | CGT |
| | | CGA | 11 | 1.571 | | 687 | | 09 | | | | | | AGG |
| | | CGC | 1 | 1.361 | | | | | | | | | | CGC |
| | | CGG | 0 | 0.960 | | | | | | | | | | AGA |
| | | CGT | 8 | 3.214 | | | | | | | | | | CGG |
| CCT_R_ | P_R_L | AGA | 3 | 10.431 | 5 | 25.9551 | 44.0313004 | 9.10430516 | 2.282582313 | 22 | 2.87582041 | 3.5:CCTAG | 6.0:CCTCG | CGA |
| CTT | | AGG | 3 | 4.772 | | 0118786 | 5694727 | 8484215e- | 0204454e-08 | | 85343414 | ACTT | ACTT | CGT |
| | | CGA | 9 | 1.502 | | 651 | | 05 | | | | | | AGG |
| | | CGC | 2 | 1.302 | | | | | | | | | | AGA |
| | | CGG | 1 | 0.918 | | | | | | | | | | CGC |
| | | CGT | 4 | 3.074 | | | | | | | | | | CGG |
| CGA_E_ | R_E_P | GAA | 0 | 12.580 | 1 | 43.2091 | 41.7773142 | 4.91898303 | 1.022833151 | 18 | 3.32096190 | 25.2:CGAG | 3.3:CGAG | GAG |
| CCC | | GAG | 18 | 5.420 | | 6097284 | 9488207 | 3538821e- | 9071506e-10 | | 5271226 | AACCC | AGCCC | GAA |
| | | | | | | 805 | | 11 | | | | | | |
| CGA_L_ | R_L_G | CTA | 1 | 4.107 | 5 | 36.3814 | 37.9427859 | 7.96728936 | 3.874421694 | 29 | 2.73656109 | 6.6:CGACT | 2.8:CGATT | TTG |
| GGT | | CTC | 0 | 1.675 | | 1858727 | 4111932 | 2781744e- | 411382e-07 | | 8525587 | GGGT | GGGT | TTA |
| | | CTG | 0 | 3.280 | | 622 | | 07 | | | | | | CTT |
| | | CTT | 1 | 3.725 | | | | | | | | | | CTA |
| | | TTA | 4 | 8.003 | | | | | | | | | | CTG |
| | | TTG | 23 | 8.210 | | | | | | | | | | CTC |
| CGA_Q_ | R_Q_L | CAA | 5 | 17.759 | 1 | 26.6108 | 28.9186856 | 2.48837143 | 7.548123987 | 26 | 2.71617253 | 3.6:CGAC | 2.5:CGAC | CAG |
| TTG | | CAG | 21 | 8.241 | | 9048825 | 6097344 | 40774176e- | 44897e-08 | | 65133447 | AATTG | AGTTG | CAA |
| | | | | | | 327 | | 07 | | | | | | |
| CGA_R_ | R_R_Y | AGA | 1 | 4.741 | 5 | 25.0930 | 47.7307338 | 0.00013368 | 4.031057291 | 10 | 5.11839705 | 4.7:CGAA | 8.8:CGAC | CGA |
| TAC | | AGG | 0 | 2.169 | | 3793731 | 011119 | 6795931917 | 183412e-09 | | 4858626 | GATAC | GATAC | CGT |
| | | CGA | 6 | 0.683 | | 7288 | | 16 | | | | | | CGG |
| | | CGC | 1 | 0.592 | | | | | | | | | | CGC |
| | | CGG | 1 | 0.417 | | | | | | | | | | AGA |
| | | CGT | 1 | 1.397 | | | | | | | | | | AGG |
| CGC_E_ | R_E_F | GAA | 3 | 16.074 | 1 | 32.3480 | 35.3157593 | 1.28886739 | 2.803543152 | 23 | 3.13026115 | 5.4:CGCG | 2.9:CGCG | GAG |
| TTC | | GAG | 20 | 6.926 | | 4614441 | 34878805 | 65603598e- | 953539e-09 | | 99692667 | AATTC | AGTTC | GAA |
| | | | | | | 254 | | 08 | | | | | | |
| CGC_R_ | R_R_T | AGA | 0 | 2.845 | 5 | 19.1982 | 41.0163159 | 0.00176532 | 9.311842721 | 6 | 5.40690012 | 5.7:CGCA | 11.3:CGCC | CGC |
| ACC | | AGG | 1 | 1.301 | | 7712153 | 3718349 | 4466073480 | 383708e-08 | | 9760741 | GAACC | GCACC | CGT |
| | | CGA | 0 | 0.410 | | 177 | | 6 | | | | | | AGG |
| | | CGC | 4 | 0.355 | | | | | | | | | | CGG |
| | | CGG | 0 | 0.250 | | | | | | | | | | CGA |
| | | CGT | 1 | 0.838 | | | | | | | | | | AGA |
| CGC_R_ | R_R_Q | AGA | 1 | 4.741 | 5 | 19.7234 | 38.6251853 | 0.00140820 | 2.825191912 | 10 | 4.27291435 | 4.7:CGCA | 9.6:CGCC | CGG |
| CAA | | AGG | 1 | 2.169 | | 2594323 | 64977874 | 2819230015 | 74817e-07 | | 3405356 | GACAA | GGCAA | CGT |
| | | CGA | 0 | 0.683 | | 9487 | | | | | | | | CGC |
| | | CGC | 2 | 0.592 | | | | | | | | | | AGG |
| | | CGG | 4 | 0.417 | | | | | | | | | | AGA |
| | | CGT | 2 | 1.397 | | | | | | | | | | CGA |
| CGG_L_ | R_L_K | CTA | 5 | 5.948 | 5 | 59.9998 | 91.3411723 | 1.21553872 | 3.511715809 | 42 | 3.11682326 | 5.8:CGGTT | 5.1:CGGCT | CTG |
| AAG | | CTC | 0 | 2.425 | | 5865735 | 8844607 | 41910107e- | 385506e-18 | | 6240415 | AAAG | GAAG | TTG |
| | | CTG | 24 | 4.751 | | 51 | | 11 | | | | | | CTA |
| | | CTT | 2 | 5.395 | | | | | | | | | | TTA |
| | | TTA | 2 | 11.591 | | | | | | | | | | CTT |
| | | TTG | 9 | 11.891 | | | | | | | | | | CTC |
| CGG_Q_ | R_Q_S | CAA | 1 | 15.027 | 1 | 40.8818 | 41.3067320 | 1.61712614 | 1.301199907 | 22 | 3.23970174 | 15.0:CGGC | 3.0:CGGC | CAG |
| TCG | | CAG | 21 | 6.973 | | 9185299 | 24118446 | 52767198e- | 105783e-10 | | 11630995 | AATCG | AGTCG | CAA |
| | | | | | | 5146 | | 10 | | | | | | |
| CGG_R_ | R_R_S | AGA | 0 | 0.948 | 5 | 12.7051 | 45.9156053 | 0.02630392 | 9.448594332 | 2 | 23.9578026 | 1.9:CGGA | 24.0:CGGC | CGG |
| TCT | | AGG | 0 | 0.434 | | 7624797 | 98213266 | 9782050435 | 49579e-09 | | 9910663 | GATCT | GGTCT | CGT |
| | | CGA | 0 | 0.137 | | 1712 | | | | | | | | CGC |
| | | CGC | 0 | 0.118 | | | | | | | | | | CGA |
| | | CGG | 2 | 0.083 | | | | | | | | | | AGG |
| | | CGT | 0 | 0.279 | | | | | | | | | | AGA |
| CGG_S_ | R_S_E | AGC | 1 | 3.606 | 5 | 61.1626 | 104.971780 | 6.98842626 | 4.725487440 | 32 | 4.00202300 | 8.3:CGGTC | 6.4:CGGTC | TCG |
| GAA | | AGT | 1 | 5.222 | | 0579664 | 96724384 | 38676816e- | 903565e-21 | | 4381506 | TGAA | GGAA | TCA |
| | | TCA | 7 | 6.695 | | 949 | | 12 | | | | | | TCC |
| | | TCC | 2 | 5.025 | | | | | | | | | | TCT |
| | | TCG | 20 | 3.118 | | | | | | | | | | AGT |
| | | TCT | 1 | 8.334 | | | | | | | | | | AGC |
| CGG_S_ | R_S_D | AGC | 1 | 2.366 | 5 | 35.7395 | 39.1849414 | 1.07084856 | 2.179729939 | 21 | 3.29117537 | 6.6:CGGTC | 3.3:CGGTC | TCT |
| GAC | | AGT | 1 | 3.427 | | 0429405 | 97559045 | 81934712e- | 6338427e-07 | | 85897853 | CGAC | TGAC | TCA |
| | | TCA | 1 | 4.394 | | 9515 | | 06 | | | | | | AGT |
| | | TCC | 0 | 3.297 | | | | | | | | | | AGC |
| | | TCG | 0 | 2.046 | | | | | | | | | | TCG |
| | | TCT | 18 | 5.469 | | | | | | | | | | TCC |
| CGT_L_ | R_L_R | CTA | 1 | 4.390 | 5 | 35.3184 | 37.5377364 | 1.29975786 | 4.672299240 | 31 | 2.68583536 | 7.0:CGTCT | 2.7:CGTTT | TTG |
| CGT | | CTC | 1 | 1.790 | | 3805942 | 60865766 | 1644524e- | 009048e-07 | | 4466964 | GCGT | GCGT | TTA |
| | | CTG | 0 | 3.507 | | 047 | | 06 | | | | | | CTT |
| | | CTT | 1 | 3.982 | | | | | | | | | | CTC |
| | | TTA | 4 | 8.555 | | | | | | | | | | CTA |
| | | TTG | 24 | 8.776 | | | | | | | | | | CTG |
| CGT_R_ | R_R_R | AGA | 0 | 3.319 | 5 | 24.9984 | 45.9675592 | 0.00013942 | 9.221273869 | 7 | 6.71887713 | 6.6:CGTAG | 9.7:CGTCG | CGC |
| CGC | | AGG | 1 | 1.518 | | 5779772 | 8143284 | 9357865386 | 309018e-09 | | 77646805 | ACGC | CCGC | CGG |
| | | CGA | 0 | 0.478 | | 2658 | | 06 | | | | | | AGG |
| | | CGC | 4 | 0.414 | | | | | | | | | | CGT |
| | | CGG | 2 | 0.292 | | | | | | | | | | CGA |
| | | CGT | 0 | 0.978 | | | | | | | | | | AGA |
| CGT_S_ | R_S_M | AGC | 2 | 5.183 | 5 | 34.6346 | 44.1310683 | 1.77956716 | 2.178568572 | 46 | 2.23785422 | 3.8:CGTAG | 3.2:CGTTC | TCC |
| ATG | | AGT | 2 | 7.507 | | 5412517 | 0812757 | 19672613e- | 6589464e-08 | | 8135717 | TATG | CATG | TCT |
| | | TCA | 4 | 9.624 | | 878 | | 06 | | | | | | TCG |
| | | TCC | 23 | 7.223 | | | | | | | | | | TCA |
| | | TCG | 5 | 4.483 | | | | | | | | | | AGT |
| | | TCT | 10 | 11.980 | | | | | | | | | | AGC |
| CTA_G_ | L_G_R | GGA | 12 | 2.684 | 3 | 35.9390 | 41.6437647 | 7.71406075 | 4.774887719 | 12 | 4.47031373 | 10.9:CTAG | 4.5:CTAG | GGA |
| CGG | | GGC | 0 | 2.373 | | 0621325 | 80072516 | 8834998e- | 0802405e-09 | | 167271 | GTCGG | GACGG | GGT |
| | | GGG | 0 | 1.491 | | 807 | | 08 | | | | | | GGG |
| | | GGT | 0 | 5.452 | | | | | | | | | | GGC |
| CTA_I_ | L_I_K | ATA | 27 | 25.360 | 2 | 60.0633 | 60.1725521 | 9.06604788 | 8.584130619 | 91 | 1.92466699 | 3.8:CTAAT | 2.3:CTAAT | ATC |
| AAG | | ATC | 53 | 23.495 | | 0973614 | 6008214 | 0635049e- | 834704e-14 | | 87494047 | TAAG | CAAG | ATA |
| | | ATT | 11 | 42.145 | | 24 | | 14 | | | | | | ATT |
| CTA_R_ | L_R_C | AGA | 2 | 9.009 | 5 | 24.1840 | 42.4098524 | 0.00020012 | 4.866098703 | 19 | 2.90345342 | 4.5:CTAAG | 7.6:CTACG | CGG |
| TGT | | AGG | 3 | 4.121 | | 3392687 | 8073355 | 6702640095 | 709642e-08 | | 439928 | ATGT | GTGT | CGT |
| | | CGA | 2 | 1.297 | | 6218 | | 86 | | | | | | AGG |
| | | CGC | 1 | 1.125 | | | | | | | | | | CGA |
| | | CGG | 6 | 0.793 | | | | | | | | | | AGA |
| | | CGT | 5 | 2.655 | | | | | | | | | | CGC |
| CTA_S_ | L_S_S | AGC | 7 | 5.634 | 5 | 39.8000 | 52.9450147 | 1.63866342 | 3.451919330 | 50 | 2.47976776 | 2.6:CTATC | 3.3:CTATC | TCC |
| AGC | | AGT | 4 | 8.160 | | 0223634 | 3352247 | 1012493e- | 367396e-10 | | 60740236 | TAGC | CAGC | AGC |
| | | TCA | 6 | 10.461 | | 951 | | 07 | | | | | | TCA |
| | | TCC | 26 | 7.851 | | | | | | | | | | TCT |
| | | TCG | 2 | 4.873 | | | | | | | | | | AGT |
| | | TCT | 5 | 13.021 | | | | | | | | | | TCG |
| CTC_P_ | L_P_L | CCA | 4 | 11.000 | 3 | 60.9955 | 86.4493693 | 3.60192827 | 1.267705099 | 27 | 4.56372445 | 16.7:CTCC | 5.1:CTCCC | CCC |
| TTG | | CCC | 22 | 4.333 | | 0984391 | 0992458 | 9681707e- | 2287093e-18 | | 802666 | CTTTG | CTTG | CCA |
| | | CCG | 1 | 3.319 | | 381 | | 13 | | | | | | CCG |
| | | CCT | 0 | 8.348 | | | | | | | | | | CCT |
| CTC_S_ | L_S_R | AGC | 21 | 4.958 | 5 | 40.2843 | 60.6400389 | 1.30861949 | 8.962805977 | 44 | 2.50979298 | 3.8:CTCTC | 4.2:CTCAG | AGC |
| AGA | | AGT | 4 | 7.181 | | 4168174 | 78100854 | 36190197e- | 162752e-12 | | 4346522 | TAGA | CAGA | TCA |
| | | TCA | 7 | 9.206 | | 92 | | 07 | | | | | | TCC |
| | | TCC | 5 | 6.909 | | | | | | | | | | TCG |
| | | TCG | 4 | 4.288 | | | | | | | | | | AGT |
| | | TCT | 3 | 11.459 | | | | | | | | | | TCT |
| CTG_A_ | L_A_K | GCA | 19 | 25.049 | 3 | 55.0160 | 64.0919661 | 6.81227973 | 7.844629907 | 85 | 2.15821713 | 3.1:CTGGC | 2.6:CTGGC | GCC |
| AAG | | GCC | 49 | 18.990 | | 4071693 | 2736466 | 70191835e- | 642043e-14 | | 52138455 | TAAG | CAAG | GCA |
| | | GCG | 7 | 9.718 | | 041 | | 12 | | | | | | GCT |
| | | GCT | 10 | 31.243 | | | | | | | | | | GCG |
| CTG_A_ | L_A_S | GCA | 18 | 20.039 | 3 | 24.5606 | 34.3543835 | 1.90764319 | 1.667640242 | 68 | 1.73866594 | 1.5:CTGGC | 3.0:CTGGC | GCG |
| TCT | | GCC | 10 | 15.192 | | 3182876 | 88543314 | 54237673e- | 8638804e-07 | | 08793919 | CTCT | GTCT | GCA |
| | | GCG | 23 | 7.775 | | 198 | | 05 | | | | | | GCT |
| | | GCT | 17 | 24.994 | | | | | | | | | | GCC |
| CTG_G_ | L_G_V | GGA | 27 | 10.738 | 3 | 26.8235 | 32.3292549 | 6.41081629 | 4.460552890 | 48 | 2.13388562 | 3.0:CTGGG | 2.5:CTGG | GGA |
| GTT | | GGC | 7 | 9.491 | | 2323884 | 7713816 | 2061468e- | 112313e-07 | | 0549679 | GGTT | GAGTT | GGT |
| | | GGG | 2 | 5.962 | | 45 | | 06 | | | | | | GGC |
| | | GGT | 12 | 21.810 | | | | | | | | | | GGG |
| CTG_Q_ | L_Q_F | CAA | 14 | 31.419 | 1 | 27.6718 | 30.4676800 | 1.43735967 | 3.394752959 | 46 | 2.20963705 | 2.2:CTGCA | 2.2:CTGCA | CAG |
| TTT | | CAG | 32 | 14.581 | | 9420815 | 59169965 | 41920386e- | 6823246e-08 | | 51420015 | ATTT | GTTT | CAA |
| | | | | | | 805 | | 07 | | | | | | |
| CTG_R_ | L_R_N | AGA | 22 | 35.561 | 5 | 60.0820 | 104.601410 | 1.16893857 | 5.657343646 | 75 | 2.31262830 | 3.5:CTGCG | 5.3:CTGCG | CGA |
| AAT | | AGG | 14 | 16.268 | | 1161701 | 3010177 | 64289617e- | 198293e-21 | | 43057483 | TAAT | AAAT | AGA |
| | | CGA | 27 | 5.122 | | 252 | | 11 | | | | | | AGG |
| | | CGC | 5 | 4.439 | | | | | | | | | | CGC |
| | | CGG | 4 | 3.131 | | | | | | | | | | CGG |
| | | CGT | 3 | 10.480 | | | | | | | | | | CGT |
| CTG_R_ | L_R_L | AGA | 4 | 9.957 | 5 | 24.4540 | 42.3171185 | 0.00017755 | 5.081096682 | 21 | 3.18822567 | 2.5:CTGAG | 6.8:CTGCG | CGG |
| CTA | | AGG | 2 | 4.555 | | 1125682 | 69294564 | 9556049671 | 2278284e-08 | | 3247993 | ACTA | GCTA | CGA |
| | | CGA | 4 | 1.434 | | 7187 | | 84 | | | | | | AGA |
| | | CGC | 3 | 1.243 | | | | | | | | | | CGC |
| | | CGG | 6 | 0.877 | | | | | | | | | | CGT |
| | | CGT | 2 | 2.935 | | | | | | | | | | AGG |
| CTG_S_ | L_S_M | AGC | 2 | 5.408 | 5 | 51.2175 | 78.1434692 | 7.80501735 | 2.051553651 | 48 | 2.88345499 | 3.9:CTGAG | 4.7:CTGTC | TCG |
| ATG | | AGT | 2 | 7.834 | | 7354820 | 0717493 | 1633154e- | 2413678e-15 | | 95140875 | TATG | GATG | TCC |
| | | TCA | 5 | 10.043 | | 1145 | | 10 | | | | | | TCT |
| | | TCC | 11 | 7.537 | | | | | | | | | | TCA |
| | | TCG | 22 | 4.678 | | | | | | | | | | AGT |
| | | TCT | 6 | 12.501 | | | | | | | | | | AGC |
| CTT_A_ | L_A_L | GCA | 5 | 8.841 | 3 | 41.2353 | 70.1517185 | 5.82926516 | 3.960687975 | 30 | 3.67704616 | 3.4:CTTGC | 5.2:CTTGC | GCG |
| CTG | | GCC | 2 | 6.702 | | 1155347 | 5098241 | 4023173e- | 340497e-15 | | 88987153 | CCTG | GCTG | GCT |
| | | GCG | 18 | 3.430 | | 392 | | 09 | | | | | | GCA |
| | | GCT | 5 | 11.027 | | | | | | | | | | GCC |
| CTT_F_ | L_F_K | TTC | 63 | 30.053 | 1 | 62.7881 | 60.8181580 | 2.30176879 | 6.259786391 | 74 | 2.30717718 | 4.0:CTTTT | 2.1:CTTTT | TTC |
| AAG | | TTT | 11 | 43.947 | | 7304689 | 0988166 | 4279102e- | 0482034e-15 | | 79460603 | TAAG | CAAG | TTT |
| | | | | | | 031 | | 15 | | | | | | |
| CTT_F_ | L_F_N | TTC | 60 | 36.145 | 1 | 26.0010 | 26.5094706 | 3.41224523 | 2.622492687 | 89 | 1.71129054 | 1.8:CTTTT | 1.7:CTTTT | TTC |
| AAT | | TTT | 29 | 52.855 | | 9071897 | 88248435 | 10250743e- | 470553e-07 | | 71119482 | TAAT | CAAT | TTT |
| | | | | | | 308 | | 07 | | | | | | |
| CTT_F_ | L_F_Q | TTC | 36 | 18.682 | 1 | 27.1302 | 27.0326833 | 1.90199904 | 2.000442845 | 46 | 2.07889301 | 2.7:CTTTT | 1.9:CTTTT | TTC |
| CAG | | TTT | 10 | 27.318 | | 3438793 | 2912699 | 82281682e- | 6917865e-07 | | 81751137 | TCAG | CCAG | TTT |
| | | | | | | 582 | | 07 | | | | | | |
| CTT_G_ | L_G_F | GGA | 34 | 15.659 | 3 | 34.3123 | 37.1529249 | 1.70209534 | 4.271020912 | 70 | 2.01097794 | 2.3:CTTGG | 2.2:CTTGG | GGA |
| TTT | | GGC | 8 | 13.841 | | 2343626 | 232303 | 65606973e- | 052423e-08 | | 6866545 | TTTT | ATTT | GGT |
| | | GGG | 14 | 8.695 | | 7434 | | 07 | | | | | | GGG |
| | | GGT | 14 | 31.806 | | | | | | | | | | GGC |
| CTT_L_ | L_L_K | CTA | 23 | 39.225 | 5 | 63.7325 | 67.7374005 | 2.05256173 | 3.028032347 | 277 | 1.56528369 | 2.2:CTTCT | 1.8:CTTTT | TTG |
| AAA | | CTC | 11 | 15.996 | | 2682295 | 4085735 | 21243047e- | 3389883e-13 | | 28485911 | TAAA | GAAA | TTA |
| | | CTG | 24 | 31.334 | | 603 | | 12 | | | | | | CTG |
| | | CTT | 16 | 35.579 | | | | | | | | | | CTA |
| | | TTA | 65 | 76.445 | | | | | | | | | | CTT |
| | | TTG | 138 | 78.422 | | | | | | | | | | CTC |
| CTT_L_ | L_L_L | CTA | 21 | 17.276 | 5 | 50.5096 | 53.5251043 | 1.08990800 | 2.623813752 | 122 | 1.69048293 | 2.9:CTTTT | 2.4:CTTCT | TTA |
| TTA | | CTC | 5 | 7.045 | | 0062584 | 50486316 | 14587936e- | 915273e-10 | | 5127555 | GTTA | TTTA | CTT |
| | | CTG | 6 | 13.800 | | 741 | | 09 | | | | | | CTA |
| | | CTT | 38 | 15.670 | | | | | | | | | | TTG |
| | | TTA | 40 | 33.669 | | | | | | | | | | CTG |
| | | TTG | 12 | 34.540 | | | | | | | | | | CTC |
| CTT_R_ | L_R_K | AGA | 10 | 27.974 | 5 | 58.0348 | 88.0732910 | 3.09383867 | 1.705769769 | 59 | 2.75265452 | 2.8:CTTAG | 4.7:CTTCG | CGA |
| AAA | | AGG | 9 | 12.797 | | 3806338 | 5250818 | 57572567e- | 666273e-17 | | 8454648 | AAAA | AAAA | AGA |
| | | CGA | 19 | 4.029 | | 0185 | | 11 | | | | | | CGG |
| | | CGC | 6 | 3.492 | | | | | | | | | | AGG |
| | | CGG | 9 | 2.463 | | | | | | | | | | CGT |
| | | CGT | 6 | 8.245 | | | | | | | | | | CGC |
| CTT_R_ | L_R_K | AGA | 12 | 16.121 | 5 | 29.5542 | 51.9384116 | 1.80480656 | 5.553982294 | 34 | 2.40700288 | 3.7:CTTAG | 6.3:CTTCG | AGA |
| AAG | | AGG | 2 | 7.375 | | 1111794 | 748259 | 8198472e- | 584428e-10 | | 49232523 | GAAG | GAAG | CGG |
| | | CGA | 6 | 2.322 | | 187 | | 05 | | | | | | CGA |
| | | CGC | 2 | 2.012 | | | | | | | | | | CGT |
| | | CGG | 9 | 1.419 | | | | | | | | | | CGC |
| | | CGT | 3 | 4.751 | | | | | | | | | | AGG |
| CTT_R_ | L_R_R | AGA | 15 | 15.173 | 5 | 33.8136 | 46.0448898 | 2.59325211 | 8.892979252 | 32 | 2.08447579 | 8.9:CTTCG | 5.0:CTTCG | AGA |
| AGA | | AGG | 2 | 6.941 | | 7556282 | 5420287 | 7837411e- | 159358e-09 | | 11823275 | TAGA | AAGA | CGA |
| | | CGA | 11 | 2.185 | | 483 | | 06 | | | | | | CGG |
| | | CGC | 1 | 1.894 | | | | | | | | | | AGG |
| | | CGG | 3 | 1.336 | | | | | | | | | | CGC |
| | | CGT | 0 | 4.472 | | | | | | | | | | CGT |
| CTT_R_ | L_R_E | AGA | 19 | 31.768 | 5 | 31.3879 | 39.8313867 | 7.85171377 | 1.614964885 | 67 | 1.97072947 | 2.1:CTTAG | 3.3:CTTCG | AGA |
| GAA | | AGG | 7 | 14.533 | | 7836378 | 6970263 | 7364288e- | 1682735e-07 | | 50887956 | GGAA | AGAA | CGT |
| | | CGA | 15 | 4.575 | | 6026 | | 06 | | | | | | CGA |
| | | CGC | 7 | 3.966 | | | | | | | | | | CGC |
| | | CGG | 3 | 2.797 | | | | | | | | | | AGG |
| | | CGT | 16 | 9.363 | | | | | | | | | | CGG |
| CTT_R_ | L_R_E | AGA | 4 | 11.379 | 5 | 30.1085 | 44.5652755 | 1.40405918 | 1.778204707 | 24 | 3.04422131 | 5.2:CTTAG | 5.5:CTTCG | CGA |
| GAG | | AGG | 1 | 5.206 | | 2660015 | 7585916 | 81651407e- | 7903607e-08 | | 63946747 | GGAG | AGAG | CGT |
| | | CGA | 9 | 1.639 | | 358 | | 05 | | | | | | AGA |
| | | CGC | 2 | 1.420 | | | | | | | | | | CGG |
| | | CGG | 2 | 1.002 | | | | | | | | | | CGC |
| | | CGT | 6 | 3.354 | | | | | | | | | | AGG |
| CTT_R_ | L_R_G | AGA | 0 | 3.793 | 5 | 27.9976 | 48.8170738 | 3.64373690 | 2.418741552 | 8 | 6.60375197 | 7.6:CTTAG | 9.0:CTTCG | CGA |
| GGC | | AGG | 1 | 1.735 | | 4505976 | 93617405 | 3953551e- | 8102733e-09 | | 7947322 | AGGC | GGGC | CGG |
| | | CGA | 4 | 0.546 | | 1062 | | 05 | | | | | | AGG |
| | | CGC | 0 | 0.473 | | | | | | | | | | CGT |
| | | CGG | 3 | 0.334 | | | | | | | | | | CGC |
| | | CGT | 0 | 1.118 | | | | | | | | | | AGA |
| CTT_R_ | L_R_F | AGA | 8 | 15.647 | 5 | 27.9226 | 38.4174889 | 3.76887919 | 3.110380961 | 33 | 2.46666987 | 3.6:CTTAG | 4.0:CTTCG | CGA |
| TTT | | AGG | 2 | 7.158 | | 1224762 | 7419877 | 1744005e- | 2390825e-07 | | 51668026 | GTTT | ATTT | AGA |
| | | CGA | 9 | 2.253 | | 2972 | | 05 | | | | | | CGT |
| | | CGC | 2 | 1.953 | | | | | | | | | | CGG |
| | | CGG | 5 | 1.377 | | | | | | | | | | CGC |
| | | CGT | 7 | 4.611 | | | | | | | | | | AGG |
| CTT_S_ | L_S_K | AGC | 5 | 22.309 | 5 | 46.1811 | 40.1390728 | 8.34248128 | 1.399969817 | 198 | 1.36903752 | 4.5:CTTAG | 1.6:CTTTC | TCT |
| AAA | | AGT | 15 | 32.314 | | 8388474 | 6407812 | 123318e-09 | 2863094e-07 | | 62973886 | CAAA | CAAA | TCC |
| | | TCA | 48 | 41.427 | | 2474 | | | | | | | | TCA |
| | | TCC | 50 | 31.090 | | | | | | | | | | TCG |
| | | TCG | 29 | 19.296 | | | | | | | | | | AGT |
| | | TCT | 51 | 51.565 | | | | | | | | | | AGC |
| CTT_S_ | L_S_N | AGC | 3 | 12.169 | 5 | 58.2129 | 51.2720516 | 2.84281352 | 7.606943191 | 108 | 1.78010990 | 8.8:CTTAG | 2.0:CTTTC | TCC |
| AAC | | AGT | 2 | 17.626 | | 5759176 | 4761694 | 9629753e- | 226615e-10 | | 84291472 | TAAC | CAAC | TCA |
| | | TCA | 34 | 22.596 | | 351 | | 11 | | | | | | TCT |
| | | TCC | 34 | 16.958 | | | | | | | | | | TCG |
| | | TCG | 17 | 10.525 | | | | | | | | | | AGC |
| | | TCT | 18 | 28.126 | | | | | | | | | | AGT |
| CTT_S_ | L_S_K | AGC | 2 | 12.507 | 5 | 48.1971 | 41.8261215 | 3.23746902 | 6.387423514 | 111 | 1.62704418 | 6.3:CTTAG | 1.8:CTTTC | TCA |
| AAG | | AGT | 4 | 18.115 | | 9343215 | 15009596 | 05138357e- | 096102e-08 | | 69037429 | CAAG | CAAG | TCC |
| | | TCA | 37 | 23.224 | | 6354 | | 09 | | | | | | TCT |
| | | TCC | 32 | 17.429 | | | | | | | | | | TCG |
| | | TCG | 13 | 10.817 | | | | | | | | | | AGT |
| | | TCT | 23 | 28.908 | | | | | | | | | | AGC |
| CTT_S_ | L_S_N | AGC | 2 | 17.577 | 5 | 58.5004 | 48.4423247 | 2.47986547 | 2.885008234 | 156 | 1.43574631 | 8.8:CTTAG | 1.9:CTTTC | TCT |
| AAT | | AGT | 7 | 25.459 | | 1782422 | 60302725 | 42114117e- | 988034e-09 | | 523567 | CAAT | CAAT | TCC |
| | | TCA | 40 | 32.639 | | 76 | | 11 | | | | | | TCA |
| | | TCC | 46 | 24.495 | | | | | | | | | | TCG |
| | | TCG | 15 | 15.203 | | | | | | | | | | AGT |
| | | TCT | 46 | 40.627 | | | | | | | | | | AGC |
| CTT_T_ | L_T_G | ACA | 8 | 10.029 | 3 | 55.4305 | 70.9453720 | 5.55716792 | 2.677980269 | 33 | 2.95891863 | 22.7:CTTA | 4.5:CTTAC | ACG |
| GGA | | ACC | 4 | 6.992 | | 6537996 | 0385508 | 9313938e- | 981928e-15 | | 07817372 | CTGGA | GGGA | ACA |
| | | ACG | 21 | 4.629 | | 783 | | 12 | | | | | | ACC |
| | | ACT | 0 | 11.351 | | | | | | | | | | ACT |
| GAA_A_ | E_A_L | GCA | 55 | 30.648 | 3 | 31.4714 | 32.6684545 | 6.76328477 | 3.783300315 | 104 | 1.70605991 | 2.1:GAAG | 1.8:GAAG | GCA |
| CTA | | GCC | 11 | 23.234 | | 3672721 | 9416085 | 0048341e- | 7808927e-07 | | 7995285 | CCCTA | CACTA | GCT |
| | | GCG | 15 | 11.891 | | 389 | | 07 | | | | | | GCG |
| | | GCT | 23 | 38.226 | | | | | | | | | | GCC |
| GAA_A_ | E_A_L | GCA | 9 | 15.914 | 3 | 33.8910 | 51.9511664 | 2.08896296 | 3.067721406 | 54 | 2.24005097 | 1.8:GAAG | 3.7:GAAG | GCG |
| CTC | | GCC | 8 | 12.064 | | 2133672 | 7606496 | 54422323e- | 2126626e-11 | | 48710573 | CACTC | CGCTC | GCT |
| | | GCG | 23 | 6.174 | | 005 | | 07 | | | | | | GCA |
| | | GCT | 14 | 19.848 | | | | | | | | | | GCC |
| GAA_A_ | E_A_E | GCA | 96 | 105.502 | 3 | 35.1688 | 34.9056204 | 1.12217775 | 1.275484574 | 358 | 1.32399694 | 1.7:GAAG | 1.4:GAAG | GCT |
| GAA | | GCC | 48 | 79.980 | | 4710539 | 32914915 | 04411289e- | 2957839e-07 | | 5015043 | CCGAA | CTGAA | GCA |
| | | GCG | 32 | 40.932 | | 044 | | 07 | | | | | | GCC |
| | | GCT | 182 | 131.587 | | | | | | | | | | GCG |
| GAA_F_ | E_F_K | TTC | 127 | 86.505 | 1 | 31.1648 | 31.9201467 | 2.37023961 | 1.606423299 | 213 | 1.46923057 | 1.5:GAATT | 1.5:GAATT | TTC |
| AAA | | TTT | 86 | 126.495 | | 1107284 | 8597876 | 82007058e- | 229625e-08 | | 6554999 | TAAA | CAAA | TTT |
| | | | | | | 305 | | 08 | | | | | | |
| GAA_F_ | E_F_D | TTC | 55 | 91.785 | 1 | 26.5064 | 24.8240375 | 2.62664432 | 6.280931531 | 226 | 1.36056658 | 1.7:GAATT | 1.3:GAATT | TTT |
| GAT | | TTT | 171 | 134.215 | | 1489139 | 77611563 | 98690824e- | 100653e-07 | | 6645506 | CGAT | TGAT | TTC |
| | | | | | | 398 | | 07 | | | | | | |
| GAA_G_ | E_G_V | GGA | 14 | 36.463 | 3 | 43.8688 | 39.8229842 | 1.60918779 | 1.161655888 | 163 | 1.51669160 | 2.6:GAAG | 1.5:GAAG | GGT |
| GTT | | GGC | 30 | 32.230 | | 1851502 | 6170389 | 80949446e- | 6937229e-08 | | 78165464 | GAGTT | GTGTT | GGC |
| | | GGG | 8 | 20.246 | | 119 | | 09 | | | | | | GGA |
| | | GGT | 111 | 74.061 | | | | | | | | | | GGG |
| GAA_G_ | E_G_F | GGA | 55 | 36.910 | 3 | 37.2897 | 40.6320203 | 3.99564142 | 7.826406215 | 165 | 1.61143333 | 1.6:GAAG | 2.0:GAAG | GGA |
| TTT | | GGC | 20 | 32.625 | | 1433144 | 147132 | 04473314e- | 09287e-09 | | 36298383 | GCTTT | GGTTT | GGT |
| | | GGG | 40 | 20.495 | | 258 | | 08 | | | | | | GGG |
| | | GGT | 50 | 74.970 | | | | | | | | | | GGC |
| GAA_I_ | E_I_K | ATA | 69 | 69.948 | 2 | 34.2552 | 36.2999728 | 3.64394059 | 1.310874297 | 251 | 1.38226257 | 1.5:GAAA | 1.6:GAAA | ATC |
| AAG | | ATC | 104 | 64.806 | | 3013490 | 5337337 | 27157784e- | 4934256e-08 | | 1596577 | TTAAG | TCAAG | ATT |
| | | ATT | 78 | 116.246 | | 979 | | 08 | | | | | | ATA |
| GAA_I_ | E_I_E | ATA | 114 | 140.453 | 2 | 33.0346 | 32.8948892 | 6.70826284 | 7.193919261 | 504 | 1.28549536 | 1.4:GAAA | 1.3:GAAA | ATT |
| GAA | | ATC | 93 | 130.129 | | 8143394 | 4352821 | 4845118e- | 578336e-08 | | 46297118 | TCGAA | TTGAA | ATA |
| | | ATT | 297 | 233.419 | | 356 | | 08 | | | | | | ATC |
| GAA_I_ | E_I_V | ATA | 47 | 58.801 | 2 | 35.7369 | 33.8578261 | 1.73711556 | 4.444945770 | 211 | 1.44307516 | 2.1:GAAA | 1.4:GAAA | ATT |
| GTT | | ATC | 26 | 54.479 | | 0945873 | 5039289 | 18065218e- | 397595e-08 | | 040918 | TCGTT | TTGTT | ATA |
| | | ATT | 138 | 97.721 | | 791 | | 08 | | | | | | ATC |
| GAA_K_ | E_K_K | AAA | 195 | 311.638 | 1 | 102.250 | 103.755590 | 4.89348489 | 2.288783219 | 538 | 1.54480286 | 1.6:GAAA | 1.5:GAAA | AAG |
| AAA | | AAG | 343 | 226.362 | | 1666951 | 75673644 | 08515474e- | 7377122e-24 | | 32158135 | AAAAA | AGAAA | AAA |
| | | | | | | 668 | | 24 | | | | | | |
| GAA_K_ | E_K_K | AAA | 154 | 232.860 | 1 | 62.4667 | 63.4742048 | 2.70987679 | 1.624806026 | 402 | 1.48363313 | 1.5:GAAA | 1.5:GAAA | AAG |
| AAG | | AAG | 248 | 169.140 | | 0332163 | 2049384 | 1201589e- | 5888797e-15 | | 66726083 | AAAAG | AGAAG | AAA |
| | | | | | | 41 | | 15 | | | | | | |
| GAA_K_ | E_K_Q | AAA | 107 | 147.130 | 1 | 25.5770 | 26.0149993 | 4.25065422 | 3.387750935 | 254 | 1.37531515 | 1.4:GAAA | 1.4:GAAA | AAG |
| CAA | | AAG | 147 | 106.870 | | 4844934 | 06051983 | 36084143e- | 408177e-07 | | 88652779 | AACAA | AGCAA | AAA |
| | | | | | | 6833 | | 07 | | | | | | |
| GAA_K_ | E__E | AAA | 313 | 389.838 | 1 | 35.4361 | 35.9950986 | 2.63549778 | 1.978144932 | 673 | 1.25925849 | 1.2:GAAA | 1.3:GAAA | AAG |
| GAA | | AAG | 360 | 283.162 | | 4979283 | 0272166 | 3525921e- | 1012027e-09 | | 40902833 | AAGAA | AGGAA | AAA |
| | | | | | | 842 | | 09 | | | | | | |
| GAA_L_ | E_L_K | CTA | 102 | 86.806 | 5 | 65.8496 | 61.7754400 | 7.46827658 | 5.219046778 | 613 | 1.32957420 | 2.1:GAACT | 1.4:GAAC | TTG |
| AAA | | CTC | 29 | 35.398 | | 0266106 | 13173366 | 9836579e- | 573212e-12 | | 5455067 | TAAA | TGAAA | TTA |
| | | CTG | 98 | 69.341 | | 316 | | 13 | | | | | | CTA |
| | | CTT | 37 | 78.736 | | | | | | | | | | CTG |
| | | TTA | 126 | 169.171 | | | | | | | | | | CTT |
| | | TTG | 221 | 173.548 | | | | | | | | | | CTC |
| GAA_L_ | E_L_K | CTA | 58 | 51.687 | 5 | 50.0241 | 48.6236152 | 1.37012336 | 2.649205410 | 365 | 1.37484454 | 2.1:GAACT | 1.5:GAATT | TTG |
| AAG | | CTC | 18 | 21.077 | | 4119704 | 12595766 | 55207048e- | 558978e-09 | | 34599583 | TAAG | GAAG | TTA |
| | | CTG | 45 | 41.288 | | 2795 | | 09 | | | | | | CTA |
| | | CTT | 22 | 46.882 | | | | | | | | | | CTG |
| | | TTA | 69 | 100.730 | | | | | | | | | | CTT |
| | | TTG | 153 | 103.336 | | | | | | | | | | CTC |
| GAA_L_ | E_L_I | CTA | 46 | 33.136 | 5 | 36.6358 | 39.2338843 | 7.08527610 | 2.130824543 | 234 | 1.39916543 | 2.0:GAACT | 1.9:GAAC | TTG |
| ATA | | CTC | 15 | 13.513 | | 6618268 | 2911362 | 9061001e- | 840872e-07 | | 38009272 | TATA | TGATA | CTG |
| | | CTG | 50 | 26.470 | | 731 | | 07 | | | | | | TTA |
| | | CTT | 15 | 30.056 | | | | | | | | | | CTA |
| | | TTA | 46 | 64.578 | | | | | | | | | | CTT |
| | | TTG | 62 | 66.248 | | | | | | | | | | CTC |
| GAA_L_ | E_L_S | CTA | 35 | 33.986 | 5 | 41.4424 | 39.3025538 | 7.63694713 | 2.064044375 | 240 | 1.39385634 | 2.1:GAATT | 1.7:GAAC | TTA |
| TCT | | CTC | 19 | 13.859 | | 3483256 | 8079535 | 6818593e- | 4065687e-07 | | 1771762 | GTCT | TTTCT | CTT |
| | | CTG | 21 | 27.148 | | 4686 | | 08 | | | | | | CTA |
| | | CTT | 51 | 30.826 | | | | | | | | | | TTG |
| | | TTA | 82 | 66.234 | | | | | | | | | | CTG |
| | | TTG | 32 | 67.947 | | | | | | | | | | CTC |
| GAA_S_ | E_S_T | AGC | 18 | 24.675 | 5 | 232.033 | 321.829210 | 3.92054764 | 2.022898173 | 219 | 2.90460599 | 4.2:GAATC | 3.7:GAAA | AGT |
| ACC | | AGT | 133 | 35.741 | | 3443715 | 0251212 | 5771847e- | 3187055e-67 | | 5063836 | AACC | GTACC | TCT |
| | | TCA | 11 | 45.820 | | 0374 | | 48 | | | | | | TCC |
| | | TCC | 19 | 34.387 | | | | | | | | | | AGC |
| | | TCG | 6 | 21.342 | | | | | | | | | | TCA |
| | | TCT | 32 | 57.034 | | | | | | | | | | TCG |
| GAA_S_ | E_S_I | AGC | 43 | 34.591 | 5 | 39.5325 | 40.2386851 | 1.85521939 | 1.336671126 | 307 | 1.42574727 | 1.5:GAATC | 1.5:GAAA | AGT |
| ATT | | AGT | 74 | 50.103 | | 2093281 | 7188826 | 96332943e- | 6956296e-07 | | 22057476 | AATT | GTATT | TCC |
| | | TCA | 42 | 64.232 | | 293 | | 07 | | | | | | TCT |
| | | TCC | 70 | 48.205 | | | | | | | | | | AGC |
| | | TCG | 21 | 29.918 | | | | | | | | | | TCA |
| | | TCT | 57 | 79.952 | | | | | | | | | | TCG |
| GAA_S_ | E_S_E | AGC | 72 | 56.900 | 5 | 151.982 | 178.615116 | 5.05150119 | 1.057280205 | 505 | 1.67568893 | 2.0:GAATC | 2.3:GAAA | AGT |
| GAA | | AGT | 186 | 82.417 | | 7451919 | 52477031 | 7679998e- | 3017363e-36 | | 64666352 | CGAA | GTGAA | TCT |
| | | TCA | 78 | 105.659 | | 4516 | | 31 | | | | | | TCA |
| | | TCC | 39 | 79.294 | | | | | | | | | | AGC |
| | | TCG | 26 | 49.213 | | | | | | | | | | TCC |
| | | TCT | 104 | 131.517 | | | | | | | | | | TCG |
| GAA_S_ | E_S_D | AGC | 60 | 47.548 | 5 | 74.4200 | 80.9236678 | 1.22922762 | 5.377486790 | 422 | 1.43569640 | 2.2:GAATC | 1.9:GAAA | AGT |
| GAT | | AGT | 129 | 68.871 | | 4780472 | 6247729 | 85992985e- | 198703e-16 | | 10346014 | GGAT | GTGAT | TCT |
| | | TCA | 68 | 88.293 | | 514 | | 14 | | | | | | TCA |
| | | TCC | 43 | 66.262 | | | | | | | | | | AGC |
| | | TCG | 19 | 41.125 | | | | | | | | | | TCC |
| | | TCT | 103 | 109.901 | | | | | | | | | | TCG |
| GAA_S_ | E_S_G | AGC | 23 | 22.760 | 5 | 65.9198 | 64.9264812 | 7.22165619 | 1.160789718 | 202 | 1.46944698 | 3.9:GAATC | 2.1:GAAA | AGT |
| GGT | | AGT | 68 | 32.967 | | 6635430 | 878808 | 900754e-13 | 9058918e-12 | | 77827803 | GGGT | GTGGT | TCT |
| | | TCA | 16 | 42.263 | | 078 | | | | | | | | TCC |
| | | TCC | 33 | 31.718 | | | | | | | | | | AGC |
| | | TCG | 5 | 19.685 | | | | | | | | | | TCA |
| | | TCT | 57 | 52.607 | | | | | | | | | | TCG |
| GAA_S_ | E_S_S | AGC | 78 | 34.703 | 5 | 50.0009 | 63.3117847 | 1.38516444 | 2.508868889 | 308 | 1.38961125 | 1.6:GAATC | 2.2:GAAA | AGC |
| TCT | | AGT | 44 | 50.266 | | 6949638 | 43544194 | 5552955e- | 455102e-12 | | 18514785 | GTCT | GCTCT | TCT |
| | | TCA | 51 | 64.441 | | 423 | | 09 | | | | | | TCA |
| | | TCC | 40 | 48.362 | | | | | | | | | | AGT |
| | | TCG | 19 | 30.015 | | | | | | | | | | TCC |
| | | TCT | 76 | 80.212 | | | | | | | | | | TCG |
| GAA_V_ | E_V_R | GTA | 3 | 4.949 | 3 | 33.0586 | 43.5403623 | 3.13026258 | 1.889592410 | 23 | 3.46368406 | 4.6:GAAG | 3.8:GAAG | GTG |
| CGG | | GTC | 1 | 4.634 | | 2279305 | 45217865 | 0375659e- | 0289535e-09 | | 6362724 | TCCGG | TGCGG | GTA |
| | | GTG | 17 | 4.512 | | 583 | | 07 | | | | | | GTT |
| | | GTT | 2 | 8.905 | | | | | | | | | | GTC |
| GAC_D_ | D_D_K | GAC | 49 | 26.975 | 1 | 25.7257 | 27.4902060 | 3.93531751 | 1.578920509 | 78 | 1.79508199 | 1.8:GACG | 1.8:GACG | GAC |
| AAG | | GAT | 29 | 51.025 | | 9513740 | 41042825 | 5400039e- | 4588936e-07 | | 04156843 | ATAAG | ACAAG | GAT |
| | | | | | | 5925 | | 07 | | | | | | |
| GAC_G_ | D_G_L | GGA | 16 | 4.698 | 3 | 32.6973 | 37.2912657 | 3.73054160 | 3.992622113 | 21 | 3.09231728 | 9.5:GACG | 3.4:GACG | GGA |
| CTC | | GGC | 1 | 4.152 | | 7637871 | 3616635 | 5209547e- | 917608e-08 | | 13025204 | GTCTC | GACTC | GGG |
| | | GGG | 3 | 2.608 | | 7706 | | 07 | | | | | | GGT |
| | | GGT | 1 | 9.542 | | | | | | | | | | GGC |
| GAC_L_ | D_L_K | CTA | 27 | 31.862 | 5 | 53.2986 | 52.3090228 | 2.92039520 | 4.662137376 | 225 | 1.49564660 | 3.2:GACCT | 1.7:GACTT | TTG |
| AAA | | CTC | 6 | 12.993 | | 7306461 | 06624455 | 98345084e- | 809013e-10 | | 23932524 | TAAA | GAAA | TTA |
| | | CTG | 27 | 25.451 | | 475 | | 10 | | | | | | CTG |
| | | CTT | 9 | 28.900 | | | | | | | | | | CTA |
| | | TTA | 48 | 62.094 | | | | | | | | | | CTT |
| | | TTG | 108 | 63.700 | | | | | | | | | | CTC |
| GAC_L_ | D_L_K | CTA | 18 | 30.021 | 5 | 41.5773 | 41.0731352 | 7.17216557 | 9.068938979 | 212 | 1.43705513 | 2.7:GACCT | 1.6:GACTT | TTG |
| AAG | | CTC | 13 | 12.242 | | 0509900 | 2412589 | 9533535e- | 285104e-08 | | 33196482 | TAAG | GAAG | TTA |
| | | CTG | 23 | 23.981 | | 661 | | 08 | | | | | | CTG |
| | | CTT | 10 | 27.230 | | | | | | | | | | CTA |
| | | TTA | 50 | 58.506 | | | | | | | | | | CTC |
| | | TTG | 98 | 60.020 | | | | | | | | | | CTT |
| GAC_R_ | D_R_V | AGA | 6 | 11.854 | 5 | 27.8284 | 38.5408756 | 3.93195552 | 2.937675623 | 25 | 2.84733177 | 3.4:GACC | 4.0:GACC | CGT |
| GTC | | AGG | 2 | 5.423 | | 5984842 | 30740615 | 0670206e- | 750734e-07 | | 8867363 | GAGTC | GTGTC | AGA |
| | | CGA | 0 | 1.707 | | 0223 | | 05 | | | | | | CGC |
| | | CGC | 2 | 1.480 | | | | | | | | | | AGG |
| | | CGG | 1 | 1.044 | | | | | | | | | | CGG |
| | | CGT | 14 | 3.493 | | | | | | | | | | CGA |
| GAC_R_ | D_R_L | AGA | 43 | 49.311 | 5 | 29.2664 | 44.2568037 | 2.05572002 | 2.054185539 | 104 | 1.52396033 | 2.2:GACC | 3.4:GACC | AGA |
| TTG | | AGG | 19 | 22.558 | | 3392270 | 3595955 | 2754678e- | 4875484e-08 | | 86597116 | GGTTG | GATTG | CGA |
| | | CGA | 24 | 7.102 | | 364 | | 05 | | | | | | AGG |
| | | CGC | 6 | 6.155 | | | | | | | | | | CGT |
| | | CGG | 2 | 4.341 | | | | | | | | | | CGC |
| | | CGT | 10 | 14.533 | | | | | | | | | | CGG |
| GAC_S_ | D_S_D | AGC | 28 | 13.633 | 5 | 37.2828 | 41.0898713 | 5.25630245 | 8.998602833 | 121 | 1.70972365 | 1.9:GACTC | 2.1:GACA | AGT |
| GAC | | AGT | 36 | 19.747 | | 0149256 | 2455584 | 466145e-07 | 064653e-08 | | 34728628 | CGAC | GCGAC | AGC |
| | | TCA | 19 | 25.316 | | 313 | | | | | | | | TCA |
| | | TCC | 10 | 18.999 | | | | | | | | | | TCT |
| | | TCG | 11 | 11.792 | | | | | | | | | | TCG |
| | | TCT | 17 | 31.512 | | | | | | | | | | TCC |
| GAC_S_ | D_S_D | AGC | 37 | 24.112 | 5 | 36.5893 | 39.8651572 | 7.23906589 | 1.589845906 | 214 | 1.48458685 | 1.7:GACTC | 1.8:GACA | AGT |
| GAT | | AGT | 62 | 34.925 | | 0682283 | 1969571 | 987142e-07 | 8954704e-07 | | 33801976 | GGAT | GTGAT | TCT |
| | | TCA | 35 | 44.774 | | 777 | | | | | | | | AGC |
| | | TCC | 21 | 33.602 | | | | | | | | | | TCA |
| | | TCG | 12 | 20.855 | | | | | | | | | | TCC |
| | | TCT | 47 | 55.732 | | | | | | | | | | TCG |
| GAG_A_ | E_A_A | GCA | 8 | 10.314 | 3 | 40.5213 | 64.7265873 | 8.26097599 | 5.739079359 | 35 | 3.04153798 | 3.9:GAGG | 4.7:GAGG | GCG |
| GCG | | GCC | 2 | 7.819 | | 3942782 | 7675347 | 4964996e- | 844873e-14 | | 62379934 | CCGCG | CGGCG | GCA |
| | | GCG | 19 | 4.002 | | 3904 | | 09 | | | | | | GCT |
| | | GCT | 6 | 12.865 | | | | | | | | | | GCC |
| GAG_C_ | E_C_T | TGC | 30 | 12.046 | 1 | 45.5464 | 42.9136824 | 1.49060598 | 5.720913731 | 32 | 2.71610375 | 10.0:GAGT | 2.5:GAGT | TGC |
| ACC | | TGT | 2 | 19.954 | | 6316346 | 01950396 | 1265762e- | 861019e-11 | | 80822924 | GTACC | GCACC | TGT |
| | | | | | | 138 | | 11 | | | | | | |
| GAG_F_ | E_F_K | TTC | 53 | 30.866 | 1 | 26.2977 | 26.7278006 | 2.92630202 | 2.342272193 | 76 | 1.78791272 | 2.0:GAGTT | 1.7:GAGTT | TTC |
| AAG | | TTT | 23 | 45.134 | | 4467020 | 2000927 | 00478625e- | 062238e-07 | | 48014608 | TAAG | CAAG | TTT |
| | | | | | | 812 | | 07 | | | | | | |
| GAG_G_ | E_G_N | GGA | 37 | 18.343 | 3 | 52.6248 | 46.6839541 | 2.20410453 | 4.057447387 | 82 | 1.86090510 | 4.7:GAGG | 2.0:GAGG | GGA |
| AAT | | GGC | 21 | 16.214 | | 1087345 | 4904819 | 54368606e- | 4683053e-10 | | 40304536 | GTAAT | GAAAT | GGC |
| | | GGG | 16 | 10.185 | | 7754 | | 11 | | | | | | GGG |
| | | GGT | 8 | 37.258 | | | | | | | | | | GGT |
| GAG_L_ | E_L_K | CTA | 38 | 41.208 | 5 | 52.0319 | 56.8365589 | 5.31400540 | 5.464794878 | 291 | 1.40237960 | 2.3:GAGCT | 2.3:GAGC | TTG |
| AAA | | CTC | 39 | 16.804 | | 4454183 | 6107976 | 6116372e- | 678549e-11 | | 5515432 | TAAA | TCAAA | TTA |
| | | CTG | 48 | 32.917 | | 273 | | 10 | | | | | | CTG |
| | | CTT | 16 | 37.377 | | | | | | | | | | CTC |
| | | TTA | 57 | 80.308 | | | | | | | | | | CTA |
| | | TTG | 93 | 82.386 | | | | | | | | | | CTT |
| GAG_L_ | E_L_I | CTA | 21 | 27.897 | 5 | 28.0921 | 38.6297578 | 3.49189833 | 2.819215528 | 197 | 1.30235737 | 1.3:GAGCT | 2.7:GAGC | TTG |
| ATT | | CTC | 31 | 11.376 | | 9406116 | 6867777 | 80375875e- | 7625367e-07 | | 24634725 | AATT | TCATT | TTA |
| | | CTG | 23 | 22.284 | | 713 | | 05 | | | | | | CTC |
| | | CTT | 23 | 25.303 | | | | | | | | | | CTT |
| | | TTA | 42 | 54.367 | | | | | | | | | | CTG |
| | | TTG | 57 | 55.773 | | | | | | | | | | CTA |
| GAG_L_ | E_L_D | CTA | 31 | 26.056 | 5 | 33.1162 | 39.0913020 | 3.56852966 | 2.276434327 | 184 | 1.45383203 | 1.5:GAGTT | 2.2:GAGC | CTG |
| GAT | | CTC | 13 | 10.625 | | 9109112 | 3874892 | 56747936e- | 7830406e-07 | | 98781115 | GGAT | TGGAT | TTA |
| | | CTG | 45 | 20.814 | | 552 | | 06 | | | | | | TTG |
| | | CTT | 23 | 23.633 | | | | | | | | | | CTA |
| | | TTA | 38 | 50.779 | | | | | | | | | | CTT |
| | | TTG | 34 | 52.093 | | | | | | | | | | CTC |
| GAG_L_ | E_L_S | CTA | 28 | 17.418 | 5 | 46.0180 | 47.4141868 | 9.00568694 | 4.677348915 | 123 | 1.73462788 | 2.5:GAGTT | 2.0:GAGC | CTT |
| TCT | | CTC | 14 | 7.103 | | 2504267 | 4364153 | 5033207e- | 776447e-09 | | 09054805 | GTCT | TTTCT | TTA |
| | | CTG | 6 | 13.913 | | 857 | | 09 | | | | | | CTA |
| | | CTT | 32 | 15.798 | | | | | | | | | | TTG |
| | | TTA | 29 | 33.945 | | | | | | | | | | CTC |
| | | TTG | 14 | 34.823 | | | | | | | | | | CTG |
| GAG_L_ | E_L_C | CTA | 12 | 8.496 | 5 | 47.6188 | 81.1087905 | 4.24869506 | 4.918500768 | 60 | 2.29112915 | 3.4:GAGCT | 5.5:GAGC | CTC |
| TGT | | CTC | 19 | 3.465 | | 1360587 | 4656228 | 0927305e- | 555583e-16 | | 74071124 | GTGT | TCTGT | CTA |
| | | CTG | 2 | 6.787 | | 48 | | 09 | | | | | | TTA |
| | | CTT | 8 | 7.707 | | | | | | | | | | TTG |
| | | TTA | 11 | 16.558 | | | | | | | | | | CTT |
| | | TTG | 8 | 16.987 | | | | | | | | | | CTG |
| GAG_R_ | E_R_L | AGA | 8 | 21.336 | 5 | 83.4197 | 227.371767 | 1.61393619 | 3.912813396 | 45 | 4.45922393 | 3.1:GAGC | 11.7:GAGC | CGG |
| CTG | | AGG | 8 | 9.761 | | 0197450 | 38538028 | 38107453e- | 1766e-47 | | 6683471 | GACTG | GGCTG | AGG |
| | | CGA | 1 | 3.073 | | 13 | | 16 | | | | | | AGA |
| | | CGC | 3 | 2.663 | | | | | | | | | | CGT |
| | | CGG | 22 | 1.878 | | | | | | | | | | CGC |
| | | CGT | 3 | 6.288 | | | | | | | | | | CGA |
| GAG_R_ | E_R_W | AGA | 6 | 18.017 | 5 | 57.7995 | 121.397095 | 3.45962078 | 1.587721550 | 38 | 3.71231093 | 3.0:GAGA | 8.0:GAGC | CGC |
| TGG | | AGG | 4 | 8.242 | | 7221063 | 8844032 | 62551156e- | 0420795e-24 | | 3766096 | GATGG | GCTGG | CGT |
| | | CGA | 2 | 2.595 | | 796 | | 11 | | | | | | AGA |
| | | CGC | 18 | 2.249 | | | | | | | | | | AGG |
| | | CGG | 1 | 1.586 | | | | | | | | | | CGA |
| | | CGT | 7 | 5.310 | | | | | | | | | | CGG |
| GAG_S_ | E_S_N | AGC | 47 | 18.253 | 5 | 45.4763 | 57.9859693 | 1.16079765 | 3.166497683 | 162 | 1.64667747 | 1.6:GAGTC | 2.6:GAGA | AGC |
| AAT | | AGT | 33 | 26.439 | | 4736172 | 1343502 | 63085564e- | 238478e-11 | | 36356822 | TAAT | GCAAT | AGT |
| | | TCA | 25 | 33.894 | | 9374 | | 08 | | | | | | TCT |
| | | TCC | 19 | 25.437 | | | | | | | | | | TCA |
| | | TCG | 12 | 15.787 | | | | | | | | | | TCC |
| | | TCT | 26 | 42.189 | | | | | | | | | | TCG |
| GAG_S_ | E_S_A | AGC | 8 | 7.211 | 5 | 43.6379 | 50.2261270 | 2.74313593 | 1.245723108 | 64 | 1.81423673 | 5.0:GAGTC | 3.4:GAGT | TCG |
| GCT | | AGT | 10 | 10.445 | | 9250577 | 9183408 | 02360783e- | 8709542e-09 | | 40545333 | CGCT | CGGCT | TCT |
| | | TCA | 3 | 13.390 | | 493 | | 08 | | | | | | AGT |
| | | TCC | 2 | 10.049 | | | | | | | | | | AGC |
| | | TCG | 21 | 6.237 | | | | | | | | | | TCA |
| | | TCT | 20 | 16.667 | | | | | | | | | | TCC |
| GAG_S_ | E_S_Y | AGC | 6 | 7.887 | 5 | 31.1662 | 44.9812794 | 8.68523721 | 1.463647405 | 70 | 1.86650526 | 1.8:GAGTC | 3.4:GAGT | TCG |
| TAT | | AGT | 13 | 11.424 | | 3718444 | 43410884 | 8279651e- | 3462986e-08 | | 6643758 | CTAT | CGTAT | TCT |
| | | TCA | 9 | 14.646 | | 8313 | | 06 | | | | | | AGT |
| | | TCC | 6 | 10.991 | | | | | | | | | | TCA |
| | | TCG | 23 | 6.822 | | | | | | | | | | TCC |
| | | TCT | 13 | 18.230 | | | | | | | | | | AGC |
| GAG_V_ | E_V_W | GTA | 4 | 7.101 | 3 | 32.6230 | 41.3657647 | 3.86759527 | 5.469418190 | 33 | 2.72787978 | 6.6:GAGG | 3.2:GAGG | GTG |
| TGG | | GTC | 1 | 6.649 | | 7019258 | 20759366 | 26544793e- | 292964e-09 | | 2348297 | TCTGG | TGTGG | GTT |
| | | GTG | 21 | 6.473 | | 5516 | | 07 | | | | | | GTA |
| | | GTT | 7 | 12.777 | | | | | | | | | | GTC |
| GAT_F_ | D_F_K | TTC | 109 | 64.574 | 1 | 50.5509 | 51.4655749 | 1.16112285 | 7.286362570 | 159 | 1.74863171 | 1.9:GATTT | 1.7:GATTT | TTC |
| AAG | | TTT | 50 | 94.426 | | 2779760 | 2166983 | 06657451e- | 840747e-13 | | 93406067 | TAAG | CAAG | TTT |
| | | | | | | 554 | | 12 | | | | | | |
| GAT_G_ | D_G_G | GGA | 4 | 13.422 | 3 | 28.6411 | 35.8892190 | 2.66400918 | 7.903303976 | 60 | 1.74218878 | 3.4:GATG | 3.0:GATG | GGT |
| GGC | | GGC | 9 | 11.864 | | 1021556 | 2793636 | 6601589e- | 678835e-08 | | 75014093 | GAGGC | GGGGC | GGG |
| | | GGG | 22 | 7.453 | | 929 | | 06 | | | | | | GGC |
| | | GGT | 25 | 27.262 | | | | | | | | | | GGA |
| GAT_G_ | D_G_F | GGA | 48 | 36.910 | 3 | 44.0976 | 49.9753958 | 1.43876595 | 8.086154735 | 165 | 1.60000998 | 1.8:GATG | 2.2:GATG | GGA |
| TTT | | GGC | 29 | 32.625 | | 8781924 | 475915 | 35210326e- | 467642e-11 | | 4322213 | GTTTT | GGTTT | GGG |
| | | GGG | 46 | 20.495 | | 773 | | 09 | | | | | | GGT |
| | | GGT | 42 | 74.970 | | | | | | | | | | GGC |
| GAT_I_ | D_I_K | ATA | 81 | 86.111 | 2 | 48.1825 | 51.9752852 | 3.44583399 | 5.172615571 | 309 | 1.43616389 | 1.5:GATAT | 1.7:GATAT | ATC |
| AAA | | ATC | 133 | 79.781 | | 4012022 | 84295836 | 1963921e- | 198624e-12 | | 29312315 | TAAA | CAAA | ATT |
| | | ATT | 95 | 143.108 | | 912 | | 11 | | | | | | ATA |
| GAT_I_ | D_I_N | ATA | 48 | 46.539 | 2 | 27.9916 | 29.2078678 | 8.35027268 | 4.545609159 | 167 | 1.43052192 | 1.6:GATAT | 1.6:GATAT | ATC |
| AAC | | ATC | 71 | 43.118 | | 0291095 | 07847705 | 7233924e- | 014489e-07 | | 25523156 | TAAC | CAAC | ATT |
| | | ATT | 48 | 77.343 | | 005 | | 07 | | | | | | ATA |
| GAT_I_ | D_I_K | ATA | 47 | 59.637 | 2 | 34.5697 | 38.6855828 | 3.11362150 | 3.976787821 | 214 | 1.49242444 | 1.4:GATAT | 1.7:GATAT | ATC |
| AAG | | ATC | 95 | 55.253 | | 8845098 | 472755 | 08899247e- | 109751e-09 | | 56880957 | TAAG | CAAG | ATT |
| | | ATT | 72 | 99.110 | | 141 | | 08 | | | | | | ATA |
| GAT_L_ | D_L_K | CTA | 47 | 76.185 | 5 | 87.9864 | 87.9210432 | 1.77891778 | 1.836025994 | 538 | 1.40595628 | 2.3:GATCT | 1.6:GATTT | TTG |
| AAA | | CTC | 34 | 31.067 | | 1959078 | 7826965 | 4450194e- | 3540603e-17 | | 66419515 | TAAA | GAAA | TTA |
| | | CTG | 52 | 60.857 | | 412 | | 17 | | | | | | CTG |
| | | CTT | 30 | 69.102 | | | | | | | | | | CTA |
| | | TTA | 134 | 148.473 | | | | | | | | | | CTC |
| | | TTG | 241 | 152.314 | | | | | | | | | | CTT |
| GAT_L_ | D_L_N | CTA | 24 | 36.252 | 5 | 47.1110 | 47.7818978 | 5.39290227 | 3.935303094 | 256 | 1.46666346 | 2.1:GATCT | 1.6:GATTT | TTG |
| AAC | | CTC | 19 | 14.783 | | 3595664 | 1751615 | 5503992e- | 3219055e-09 | | 3060866 | GAAC | GAAC | TTA |
| | | CTG | 14 | 28.958 | | 494 | | 09 | | | | | | CTA |
| | | CTT | 18 | 32.881 | | | | | | | | | | CTC |
| | | TTA | 64 | 70.649 | | | | | | | | | | CTT |
| | | TTG | 117 | 72.477 | | | | | | | | | | CTG |
| GAT_L_ | D_L_K | CTA | 32 | 50.271 | 5 | 67.3537 | 68.3826091 | 3.63809249 | 2.223577315 | 355 | 1.44190305 | 2.3:GATCT | 1.6:GATTT | TTG |
| AAG | | CTC | 20 | 20.500 | | 6533502 | 8055431 | 69811595e- | 1379489e-13 | | 02945913 | TAAG | GAAG | TTA |
| | | CTG | 25 | 40.157 | | 019 | | 13 | | | | | | CTA |
| | | CTT | 20 | 45.597 | | | | | | | | | | CTG |
| | | TTA | 93 | 97.970 | | | | | | | | | | CTT |
| | | TTG | 165 | 100.505 | | | | | | | | | | CTC |
| GAT_L_ | D_L_S | CTA | 12 | 14.586 | 5 | 49.2589 | 78.0393061 | 1.96458728 | 2.157022227 | 103 | 1.79468524 | 2.6:GATCT | 4.4:GATCT | TTG |
| AGC | | CTC | 26 | 5.948 | | 5873845 | 773889 | 5425801e- | 116615e-15 | | 71770545 | TAGC | CAGC | CTC |
| | | CTG | 7 | 11.651 | | 429 | | 09 | | | | | | TTA |
| | | CTT | 5 | 13.230 | | | | | | | | | | CTA |
| | | TTA | 20 | 28.425 | | | | | | | | | | CTG |
| | | TTG | 33 | 29.161 | | | | | | | | | | CTT |
| GAT_L_ | D_L_C | CTA | 30 | 10.621 | 5 | 32.2927 | 42.7094507 | 5.19849283 | 4.231551848 | 75 | 1.85046461 | 2.1:GATCT | 2.8:GATCT | CTA |
| TGC | | CTC | 4 | 4.331 | | 8550614 | 3682768 | 0061062e- | 6371756e-08 | | 4780177 | GTGC | ATGC | TTA |
| | | CTG | 4 | 8.484 | | 9286 | | 06 | | | | | | TTG |
| | | CTT | 8 | 9.633 | | | | | | | | | | CTT |
| | | TTA | 17 | 20.698 | | | | | | | | | | CTG |
| | | TTG | 12 | 21.233 | | | | | | | | | | CTC |
| GAT_L_ | D_L_F | CTA | 17 | 29.454 | 5 | 57.8875 | 73.8774612 | 3.31810964 | 1.595193262 | 208 | 1.57329067 | 1.8:GATCT | 2.5:GATCT | CTT |
| TTC | | CTC | 12 | 12.011 | | 0544023 | 0398918 | 37616376e- | 2098474e-14 | | 23397868 | GTTC | TTTC | TTA |
| | | CTG | 13 | 23.528 | | 824 | | 11 | | | | | | TTG |
| | | CTT | 67 | 26.716 | | | | | | | | | | CTA |
| | | TTA | 53 | 57.402 | | | | | | | | | | CTG |
| | | TTG | 46 | 58.887 | | | | | | | | | | CTC |
| GAT_P_ | D_P_Q | CCA | 21 | 37.889 | 3 | 37.0556 | 36.1447602 | 4.47825556 | 6.978789776 | 93 | 1.78426781 | 3.7:GATCC | 1.8:GATCC | CCT |
| CAA | | CCC | 4 | 14.926 | | 7350309 | 666282 | 6425187e- | 394897e-08 | | 8048624 | CCAA | TCAA | CCA |
| | | CCG | 16 | 11.431 | | 8404 | | 08 | | | | | | CCG |
| | | CCT | 52 | 28.754 | | | | | | | | | | CCC |
| GAT_P_ | D_P_H | CCA | 9 | 24.037 | 3 | 32.9249 | 35.3540397 | 3.34016324 | 1.025482539 | 59 | 2.06580244 | 2.7:GATCC | 2.1:GATCC | CCT |
| CAT | | CCC | 5 | 9.469 | | 9251227 | 74819306 | 13744955e- | 7431961e-07 | | 84631325 | ACAT | TCAT | CCA |
| | | CCG | 6 | 7.252 | | 561 | | 07 | | | | | | CCG |
| | | CCT | 39 | 18.242 | | | | | | | | | | CCC |
| GAT_V_ | D_V_K | GTA | 29 | 42.174 | 3 | 42.3095 | 49.2461056 | 3.44883064 | 1.156204739 | 196 | 1.54315704 | 1.5:GATGT | 2.0:GATGT | GTC |
| AAG | | GTC | 78 | 39.489 | | 9071015 | 5149896 | 2473037e- | 3165924e-10 | | 84650834 | TAAG | CAAG | GTT |
| | | GTG | 37 | 38.447 | | 517 | | 09 | | | | | | GTG |
| | | GTT | 52 | 75.889 | | | | | | | | | | GTA |
| GAT_V_ | D_V_V | GTA | 15 | 20.011 | 3 | 28.9759 | 35.5417573 | 2.26568318 | 9.359569566 | 93 | 1.74759867 | 1.6:GATGT | 2.2:GATGT | GTG |
| GTG | | GTC | 14 | 18.737 | | 1028500 | 4960228 | 3493441e- | 191827e-08 | | 56182127 | TGTG | GGTG | GTT |
| | | GTG | 41 | 18.243 | | 755 | | 06 | | | | | | GTA |
| | | GTT | 23 | 36.009 | | | | | | | | | | GTC |
| GCA_G_ | A_G_Q | GGA | 4 | 6.935 | 3 | 42.5211 | 52.8903531 | 3.11003818 | 1.934746734 | 31 | 3.08946675 | 7.0:GCAG | 3.6:GCAG | GGC |
| CAG | | GGC | 22 | 6.130 | | 5912553 | 5493904 | 42646685e- | 7329835e-11 | | 13887186 | GTCAG | GCCAG | GGA |
| | | GGG | 3 | 3.851 | | 496 | | 09 | | | | | | GGG |
| | | GGT | 2 | 14.085 | | | | | | | | | | GGT |
| GCA_L_ | A_L_A | CTA | 6 | 6.514 | 5 | 37.2539 | 55.9737064 | 5.32679170 | 8.228509312 | 46 | 2.38440857 | 3.0:GCACT | 4.0:GCACT | CTG |
| GCG | | CTC | 1 | 2.656 | | 5812484 | 3250873 | 0264022e- | 897271e-11 | | 78948303 | TGCG | GGCG | TTA |
| | | CTG | 21 | 5.203 | | 6704 | | 07 | | | | | | TTG |
| | | CTT | 2 | 5.908 | | | | | | | | | | CTA |
| | | TTA | 10 | 12.695 | | | | | | | | | | CTT |
| | | TTG | 6 | 13.023 | | | | | | | | | | CTC |
| GCA_S_ | A_S_T | AGC | 39 | 14.422 | 5 | 36.8265 | 49.3560547 | 6.48857281 | 1.876804729 | 128 | 1.61082685 | 1.6:GCATC | 2.7:GCAA | AGC |
| ACA | | AGT | 17 | 20.890 | | 7087140 | 4771468 | 6900233e- | 8787636e-09 | | 92638415 | GACA | GCACA | TCT |
| | | TCA | 21 | 26.781 | | 598 | | 07 | | | | | | TCC |
| | | TCC | 21 | 20.098 | | | | | | | | | | TCA |
| | | TCG | 8 | 12.474 | | | | | | | | | | AGT |
| | | TCT | 22 | 33.335 | | | | | | | | | | TCG |
| GCA_V_ | A_V_Q | GTA | 25 | 8.177 | 3 | 37.2347 | 45.5296485 | 4.10413645 | 7.139902509 | 38 | 2.66601351 | 3.7:GCAGT | 3.1:GCAG | GTA |
| CAG | | GTC | 3 | 7.656 | | 2971577 | 9206956 | 51645335e- | 555135e-10 | | 4081875 | TCAG | TACAG | GTG |
| | | GTG | 6 | 7.454 | | 8535 | | 08 | | | | | | GTT |
| | | GTT | 4 | 14.713 | | | | | | | | | | GTC |
| GCA_V_ | A_V_S | GTA | 20 | 7.101 | 3 | 28.0324 | 31.9264899 | 3.57556554 | 5.423519293 | 33 | 2.29435060 | 6.6:GCAGT | 2.8:GCAG | GTA |
| TCC | | GTC | 1 | 6.649 | | 2271439 | 95346575 | 9937698e- | 502566e-07 | | 7664937 | CTCC | TATCC | GTT |
| | | GTG | 2 | 6.473 | | 171 | | 06 | | | | | | GTG |
| | | GTT | 10 | 12.777 | | | | | | | | | | GTC |
| GCC_A_ | A_A_I | GCA | 4 | 15.030 | 3 | 34.2474 | 38.2193937 | 1.75665751 | 2.539764934 | 51 | 2.06824126 | 3.8:GCCGC | 2.5:GCCG | GCC |
| ATC | | GCC | 29 | 11.394 | | 2649222 | 8809799 | 01418362e- | 5000957e-08 | | 45591532 | AATC | CCATC | GCT |
| | | GCG | 2 | 5.831 | | 9295 | | 07 | | | | | | GCA |
| | | GCT | 16 | 18.746 | | | | | | | | | | GCG |
| GCC_A_ | A_A_A | GCA | 12 | 25.639 | 3 | 40.0251 | 37.0859693 | 1.05250316 | 4.412642962 | 87 | 1.75740041 | 9.9:GCCGC | 1.8:GCCG | GCT |
| GCT | | GCC | 16 | 19.436 | | 6228151 | 97448466 | 1054687e- | 192927e-08 | | 986658 | GGCT | CTGCT | GCC |
| | | GCG | 1 | 9.947 | | 3744 | | 08 | | | | | | GCA |
| | | GCT | 58 | 31.978 | | | | | | | | | | GCG |
| GCC_G_ | A_G_G | GGA | 4 | 14.093 | 3 | 41.7494 | 34.1377814 | 4.53467718 | 1.852837975 | 63 | 1.82892825 | 15.7:GCCG | 1.8:GCCG | GGT |
| GGT | | GGC | 8 | 12.457 | | 1817543 | 0638699 | 3522818e- | 6591188e-07 | | 23512247 | GGGGT | GTGGT | GGC |
| | | GGG | 0 | 7.825 | | 96 | | 09 | | | | | | GGA |
| | | GGT | 51 | 28.625 | | | | | | | | | | GGG |
| GCC_K_ | A_K_K | AAA | 69 | 101.949 | 1 | 24.8968 | 25.3088543 | 6.04802120 | 4.884613461 | 176 | 1.45762644 | 1.5:GCCA | 1.4:GCCA | AAG |
| AAG | | AAG | 107 | 74.051 | | 8048870 | 1143259 | 068721e-07 | 727177e-07 | | 56706434 | AAAAG | AGAAG | AAA |
| | | | | | | 9762 | | | | | | | | |
| GCC_L_ | A_L_F | CTA | 6 | 7.222 | 5 | 43.1393 | 57.4648153 | 3.46232392 | 4.055692812 | 51 | 2.22371991 | 4.8:GCCTT | 3.7:GCCCT | CTT |
| TTC | | CTC | 2 | 2.945 | | 9159587 | 1827524 | 3190074e- | 296156e-11 | | 73479016 | GTTC | TTTC | TTA |
| | | CTG | 3 | 5.769 | | 761 | | 08 | | | | | | CTA |
| | | CTT | 24 | 6.551 | | | | | | | | | | TTG |
| | | TTA | 13 | 14.075 | | | | | | | | | | CTG |
| | | TTG | 3 | 14.439 | | | | | | | | | | CTC |
| GCC_L_ | A_L_F | CTA | 12 | 14.444 | 5 | 43.3252 | 65.7222488 | 3.17451183 | 7.936911516 | 102 | 1.70835407 | 2.9:GCCCT | 4.1:GCCCT | TTA |
| TTT | | CTC | 24 | 5.890 | | 8108985 | 639211 | 61560456e- | 119991e-13 | | 5942903 | GTTT | CTTT | CTC |
| | | CTG | 4 | 11.538 | | 214 | | 08 | | | | | | TTG |
| | | CTT | 17 | 13.101 | | | | | | | | | | CTT |
| | | TTA | 26 | 28.149 | | | | | | | | | | CTA |
| | | TTG | 19 | 28.877 | | | | | | | | | | CTG |
| GCC_S_ | A_S_T | AGC | 36 | 11.155 | 5 | 80.1517 | 89.9549385 | 7.80029538 | 6.867381488 | 99 | 2.21529620 | 5.2:GCCTC | 3.2:GCCA | AGC |
| ACC | | AGT | 25 | 16.157 | | 3747076 | 5365255 | 4790536e- | 711143e-18 | | 95771844 | TACC | GCACC | AGT |
| | | TCA | 8 | 20.713 | | 7 | | 16 | | | | | | TCC |
| | | TCC | 21 | 15.545 | | | | | | | | | | TCA |
| | | TCG | 4 | 9.648 | | | | | | | | | | TCT |
| | | TCT | 5 | 25.782 | | | | | | | | | | TCG |
| GCC_S_ | A_S_I | AGC | 47 | 9.915 | 5 | 103.000 | 160.902464 | 1.23167151 | 6.356360885 | 88 | 2.93568669 | 4.6:GCCTC | 4.7:GCCA | AGC |
| ATC | | AGT | 7 | 14.362 | | 0036103 | 3257372 | 01867901e- | 492482e-33 | | 65684993 | AATC | GCATC | TCT |
| | | TCA | 4 | 18.412 | | 0034 | | 20 | | | | | | TCC |
| | | TCC | 11 | 13.818 | | | | | | | | | | AGT |
| | | TCG | 2 | 8.576 | | | | | | | | | | TCA |
| | | TCT | 17 | 22.918 | | | | | | | | | | TCG |
| GCG_A_ | A_A_S | GCA | 7 | 8.841 | 3 | 38.5199 | 61.9573827 | 2.19354008 | 2.243670690 | 30 | 3.22865567 | 3.7:GCGG | 5.0:GCGG | GCG |
| AGT | | GCC | 3 | 6.702 | | 5730046 | 84344645 | 25032887e- | 0378534e-13 | | 8046206 | CTAGT | CGAGT | GCA |
| | | GCG | 17 | 3.430 | | 461 | | 08 | | | | | | GCT |
| | | GCT | 3 | 11.027 | | | | | | | | | | GCC |
| GCG_L_ | A_L_E | CTA | 6 | 7.080 | 5 | 54.9068 | 109.965794 | 1.36421747 | 4.166099967 | 50 | 2.71626077 | 6.4:GCGCT | 6.9:GCGCT | CTC |
| GAG | | CTC | 20 | 2.887 | | 9823321 | 28782584 | 04512548e- | 70383e-22 | | 47061003 | TGAG | CGAG | TTA |
| | | CTG | 5 | 5.656 | | 529 | | 10 | | | | | | TTG |
| | | CTT | 1 | 6.422 | | | | | | | | | | CTA |
| | | TTA | 10 | 13.799 | | | | | | | | | | CTG |
| | | TTG | 8 | 14.156 | | | | | | | | | | CTT |
| GCG_L_ | A_L_G | CTA | 2 | 6.797 | 5 | 41.6827 | 65.1094993 | 6.82852837 | 1.063628399 | 48 | 2.58383296 | 3.4:GCGCT | 4.2:GCGCT | CTG |
| GGA | | CTC | 2 | 2.772 | | 4458061 | 0225205 | 6685487e- | 562051e-12 | | 47944582 | AGGA | GGGA | TTG |
| | | CTG | 23 | 5.430 | | 6216 | | 08 | | | | | | TTA |
| | | CTT | 3 | 6.165 | | | | | | | | | | CTT |
| | | TTA | 8 | 13.247 | | | | | | | | | | CTC |
| | | TTG | 10 | 13.589 | | | | | | | | | | CTA |
| GCG_S_ | A_S_A | AGC | 2 | 2.817 | 5 | 38.7385 | 50.3752370 | 2.68071765 | 1.161177606 | 25 | 3.20942622 | 10.5:GCGT | 4.2:GCGA | AGT |
| GCC | | AGT | 17 | 4.080 | | 1638125 | 0255552 | 26179934e- | 5862873e-09 | | 45673977 | CAGCC | GTGCC | TCT |
| | | TCA | 0 | 5.231 | | 535 | | 07 | | | | | | AGC |
| | | TCC | 1 | 3.925 | | | | | | | | | | TCG |
| | | TCG | 1 | 2.436 | | | | | | | | | | TCC |
| | | TCT | 4 | 6.511 | | | | | | | | | | TCA |
| GCG_T_ | A_T_T | ACA | 2 | 24.313 | 3 | 92.3348 | 91.7560090 | 6.90244531 | 9.190755335 | 80 | 2.61405847 | 12.2:GCGA | 2.5:GCGA | ACT |
| ACC | | ACC | 6 | 16.949 | | 0966500 | 5038786 | 206069e-20 | 486977e-20 | | 9740813 | CAACC | CTACC | ACC |
| | | ACG | 4 | 11.221 | | 07 | | | | | | | | ACG |
| | | ACT | 68 | 27.517 | | | | | | | | | | ACA |
| GCT_A_ | A_A_A | GCA | 18 | 37.427 | 3 | 36.9034 | 37.3727583 | 4.82294344 | 3.837185254 | 127 | 1.66405908 | 2.1:GCTGC | 1.7:GCTGC | GCT |
| GCC | | GCC | 23 | 28.373 | | 6213276 | 50513124 | 83484256e- | 585222e-08 | | 85853912 | AGCC | TGCC | GCC |
| | | GCG | 7 | 14.520 | | 699 | | 08 | | | | | | GCA |
| | | GCT | 79 | 46.680 | | | | | | | | | | GCG |
| GCT_A_ | A_A_A | GCA | 32 | 76.621 | 3 | 82.5251 | 81.1259822 | 8.81663674 | 1.759926450 | 260 | 1.64705933 | 2.4:GCTGC | 1.7:GCTGC | GCT |
| GCT | | GCC | 52 | 58.086 | | 1149334 | 7476815 | 5395354e- | 202247e-17 | | 42201214 | AGCT | TGCT | GCC |
| | | GCG | 14 | 29.727 | | 325 | | 18 | | | | | | GCA |
| | | GCT | 162 | 95.566 | | | | | | | | | | GCG |
| GCT_A_ | A_A_G | GCA | 41 | 70.727 | 3 | 38.7372 | 36.4493892 | 1.97297902 | 6.016726269 | 240 | 1.41613471 | 2.1:GCTGC | 1.4:GCTGC | GCT |
| GGT | | GCC | 61 | 53.618 | | 5604293 | 4308222 | 7263867e- | 5278e-08 | | 08134836 | GGGT | TGGT | GCC |
| | | GCG | 13 | 27.440 | | 931 | | 08 | | | | | | GCA |
| | | GCT | 125 | 88.215 | | | | | | | | | | GCG |
| GCT_A_ | A_A_W | GCA | 10 | 16.503 | 3 | 29.5115 | 43.5345620 | 1.74826127 | 1.894959623 | 56 | 2.02653381 | 1.7:GCTGC | 3.4:GCTGC | GCG |
| TGG | | GCC | 11 | 12.511 | | 9775376 | 9257341 | 60462643e- | 6140917e-09 | | 0318722 | ATGG | GTGG | GCT |
| | | GCG | 22 | 6.403 | | 719 | | 06 | | | | | | GCC |
| | | GCT | 13 | 20.583 | | | | | | | | | | GCA |
| GCT_A_ | A_A_L | GCA | 32 | 56.877 | 3 | 54.8185 | 52.4542883 | 7.50632775 | 2.396521475 | 193 | 1.64161877 | 2.4:GCTGC | 1.6:GCTGC | GCT |
| TTG | | GCC | 18 | 43.118 | | 2944935 | 2340451 | 2445391e- | 6037353e-11 | | 87436765 | CTTG | GTTG | GCG |
| | | GCG | 35 | 22.066 | | 7776 | | 12 | | | | | | GCA |
| | | GCT | 108 | 70.939 | | | | | | | | | | GCC |
| GCT_G_ | A_G_Q | GGA | 12 | 12.080 | 3 | 32.8400 | 38.3763518 | 3.48080666 | 2.352649706 | 54 | 2.00514955 | 2.7:GCTGG | 2.6:GCTG | GGC |
| CAG | | GGC | 28 | 10.677 | | 6535756 | 4356957 | 3748456e- | 033494e-08 | | 42226365 | TCAG | GCCAG | GGA |
| | | GGG | 5 | 6.707 | | 193 | | 07 | | | | | | GGT |
| | | GGT | 9 | 24.536 | | | | | | | | | | GGG |
| GCT_G_ | A_G_G | GGA | 17 | 34.226 | 3 | 52.2933 | 48.0984677 | 2.59351958 | 2.029174112 | 153 | 1.66211261 | 4.8:GCTGG | 1.6:GCTG | GGT |
| GGT | | GGC | 21 | 30.252 | | 3108821 | 0098589 | 3092138e- | 247e-10 | | 32823854 | GGGT | GTGGT | GGC |
| | | GGG | 4 | 19.004 | | 7805 | | 11 | | | | | | GGA |
| | | GGT | 111 | 69.518 | | | | | | | | | | GGG |
| GCT_G_ | A_G_V | GGA | 2 | 16.106 | 3 | 47.9477 | 42.7403753 | 2.18474921 | 2.794030370 | 72 | 1.96977495 | 8.1:GCTGG | 1.8:GCTG | GGT |
| GTC | | GGC | 7 | 14.236 | | 0723954 | 0343509 | 9079959e- | 052986e-09 | | 41476555 | AGTC | GTGTC | GGC |
| | | GGG | 3 | 8.943 | | 9786 | | 10 | | | | | | GGG |
| | | GGT | 60 | 32.714 | | | | | | | | | | GGA |
| GCT_G_ | A_G_V | GGA | 9 | 26.844 | 3 | 68.3509 | 63.9792394 | 9.62319278 | 8.292393294 | 120 | 1.95987061 | 5.0:GCTGG | 1.8:GCTG | GGT |
| GTT | | GGC | 10 | 23.727 | | 1696581 | 88393695 | 847116e-15 | 113863e-14 | | 14431523 | GGTT | GTGTT | GGC |
| | | GGG | 3 | 14.905 | | 435 | | | | | | | | GGA |
| | | GGT | 98 | 54.524 | | | | | | | | | | GGG |
| GCT_L_ | A_L_K | CTA | 27 | 43.332 | 5 | 60.8416 | 65.9615214 | 8.14234397 | 7.079307148 | 306 | 1.54912620 | 1.6:GCTCT | 1.7:GCTTT | TTG |
| AAA | | CTC | 19 | 17.670 | | 8658649 | 4656762 | 775908e-12 | 335749e-13 | | 90132325 | TAAA | GAAA | TTA |
| | | CTG | 23 | 34.614 | | 578 | | | | | | | | CTA |
| | | CTT | 24 | 39.304 | | | | | | | | | | CTT |
| | | TTA | 64 | 84.448 | | | | | | | | | | CTG |
| | | TTG | 149 | 86.632 | | | | | | | | | | CTC |
| GCT_L_ | A_L_N | CTA | 21 | 21.666 | 5 | 35.8980 | 37.8124029 | 9.95473643 | 4.115208714 | 153 | 1.55460084 | 2.2:GCTCT | 1.8:GCTTT | TTG |
| AAC | | CTC | 6 | 8.835 | | 3908248 | 5492329 | 4933137e- | 9168235e-07 | | 00774964 | GAAC | GAAC | TTA |
| | | CTG | 8 | 17.307 | | 1084 | | 07 | | | | | | CTA |
| | | CTT | 10 | 19.652 | | | | | | | | | | CTT |
| | | TTA | 32 | 42.224 | | | | | | | | | | CTG |
| | | TTG | 76 | 43.316 | | | | | | | | | | CTC |
| GCT_L_ | A_L_K | CTA | 14 | 33.844 | 5 | 85.2233 | 88.5289643 | 6.75825024 | 1.368543760 | 239 | 1.70244626 | 3.1:GCTCT | 1.9:GCTTT | TTG |
| AAG | | CTC | 11 | 13.801 | | 6599174 | 9220335 | 0710555e- | 9979315e-17 | | 66381404 | TAAG | GAAG | TTA |
| | | CTG | 17 | 27.035 | | 686 | | 17 | | | | | | CTG |
| | | CTT | 10 | 30.698 | | | | | | | | | | CTA |
| | | TTA | 57 | 65.958 | | | | | | | | | | CTC |
| | | TTG | 130 | 67.664 | | | | | | | | | | CTT |
| GCT_L_ | A_L_I | CTA | 12 | 22.516 | 5 | 35.3273 | 37.3891997 | 1.29445771 | 5.004216436 | 159 | 1.59313446 | 1.9:GCTCT | 1.7:GCTTT | TTG |
| ATT | | CTC | 13 | 9.182 | | 2353839 | 9254596 | 33907067e- | 828705e-07 | | 81854367 | AATT | GATT | TTA |
| | | CTG | 12 | 17.986 | | 528 | | 06 | | | | | | CTC |
| | | CTT | 12 | 20.422 | | | | | | | | | | CTT |
| | | TTA | 33 | 43.880 | | | | | | | | | | CTG |
| | | TTG | 77 | 45.015 | | | | | | | | | | CTA |
| GCT_R_ | A_R_R | AGA | 8 | 14.698 | 5 | 29.3219 | 39.0603973 | 2.00472688 | 2.309279145 | 31 | 2.56794163 | 4.2:GCTCG | 3.7:GCTCG | CGT |
| CGT | | AGG | 3 | 6.724 | | 8543451 | 28023186 | 75147163e- | 7032612e-07 | | 55428595 | ACGT | TCGT | AGA |
| | | CGA | 0 | 2.117 | | 657 | | 05 | | | | | | AGG |
| | | CGC | 2 | 1.835 | | | | | | | | | | CGG |
| | | CGG | 2 | 1.294 | | | | | | | | | | CGC |
| | | CGT | 16 | 4.332 | | | | | | | | | | CGA |
| GCT_S_ | A_S_K | AGC | 13 | 20.845 | 5 | 37.4844 | 44.9927219 | 4.78883414 | 1.455828638 | 185 | 1.52590133 | 1.6:GCTAG | 2.1:GCTTC | TCC |
| AAG | | AGT | 22 | 30.192 | | 2207485 | 58286765 | 4392263e- | 019195e-08 | | 31081934 | CAAG | CAAG | TCT |
| | | TCA | 29 | 38.707 | | 826 | | 07 | | | | | | TCA |
| | | TCC | 61 | 29.048 | | | | | | | | | | AGT |
| | | TCG | 21 | 18.029 | | | | | | | | | | TCG |
| | | TCT | 39 | 48.179 | | | | | | | | | | AGC |
| GCT_S_ | A_S_T | AGC | 41 | 13.070 | 5 | 65.7414 | 81.5450458 | 7.86446267 | 3.985756440 | 116 | 1.93728105 | 3.5:GCTTC | 3.1:GCTA | AGC |
| ACC | | AGT | 10 | 18.931 | | 3846350 | 0092268 | 1304969e- | 8663274e-16 | | 94209233 | AACC | GCACC | TCT |
| | | TCA | 7 | 24.270 | | 843 | | 13 | | | | | | TCC |
| | | TCC | 25 | 18.214 | | | | | | | | | | AGT |
| | | TCG | 6 | 11.304 | | | | | | | | | | TCA |
| | | TCT | 27 | 30.210 | | | | | | | | | | TCG |
| GCT_S_ | A_S_T | AGC | 24 | 18.253 | 5 | 35.4691 | 38.9733370 | 1.21269567 | 2.404363997 | 162 | 1.50623398 | 2.6:GCTTC | 2.0:GCTTC | TCC |
| ACT | | AGT | 17 | 26.439 | | 7929707 | 7837965 | 95822978e- | 039414e-07 | | 79182252 | GACT | CACT | TCT |
| | | TCA | 30 | 33.894 | | 765 | | 06 | | | | | | TCA |
| | | TCC | 51 | 25.437 | | | | | | | | | | AGC |
| | | TCG | 6 | 15.787 | | | | | | | | | | AGT |
| | | TCT | 34 | 42.189 | | | | | | | | | | TCG |
| GCT_S_ | A_S_M | AGC | 5 | 12.845 | 5 | 43.3526 | 53.0356698 | 3.13421760 | 3.307108006 | 114 | 1.72137555 | 2.6:GCTAG | 2.5:GCTTC | TCC |
| ATG | | AGT | 11 | 18.605 | | 3811886 | 3366308 | 41337134e- | 200493e-10 | | 0484876 | CATG | CATG | TCT |
| | | TCA | 16 | 23.852 | | 5954 | | 08 | | | | | | TCA |
| | | TCC | 45 | 17.900 | | | | | | | | | | AGT |
| | | TCG | 7 | 11.110 | | | | | | | | | | TCG |
| | | TCT | 30 | 29.689 | | | | | | | | | | AGC |
| GCT_S_ | A_S_I | AGC | 5 | 14.648 | 5 | 41.0359 | 42.2224020 | 9.22735303 | 5.310464274 | 130 | 1.54911101 | 3.2:GCTTC | 2.1:GCTTC | TCC |
| ATT | | AGT | 21 | 21.216 | | 1025214 | 9879181 | 9377363e- | 027886e-08 | | 53909318 | GATT | CATT | TCT |
| | | TCA | 17 | 27.199 | | 307 | | 08 | | | | | | AGT |
| | | TCC | 43 | 20.412 | | | | | | | | | | TCA |
| | | TCG | 4 | 12.669 | | | | | | | | | | AGC |
| | | TCT | 40 | 33.856 | | | | | | | | | | TCG |
| GCT_T_ | A_T_T | ACA | 8 | 70.811 | 3 | 242.314 | 231.464108 | 3.00593536 | 6.671963484 | 233 | 2.35354733 | 8.9:GCTAC | 2.3:GCTAC | ACT |
| ACC | | ACC | 33 | 49.364 | | 5292188 | 37042345 | 3544477e- | 339983e-50 | | 1654003 | AACC | TACC | ACC |
| | | ACG | 4 | 32.681 | | 6844 | | 52 | | | | | | ACA |
| | | ACT | 188 | 80.143 | | | | | | | | | | ACG |
| GCT_T_ | A_T_L | ACA | 22 | 36.773 | 3 | 29.7333 | 31.6858691 | 1.57025620 | 6.095133790 | 121 | 1.65523667 | 1.7:GCTAC | 1.7:GCTAC | ACT |
| TTG | | ACC | 17 | 25.636 | | 9038516 | 6833709 | 55190318e- | 999681e-07 | | 73884144 | ATTG | TTTG | ACA |
| | | ACG | 11 | 16.972 | | 893 | | 06 | | | | | | ACC |
| | | ACT | 71 | 41.619 | | | | | | | | | | ACG |
| GCT_V_ | A_V_F | GTA | 5 | 18.935 | 3 | 41.7675 | 39.0520304 | 4.49462884 | 1.692167659 | 88 | 1.76838613 | 3.8:GCTGT | 1.8:GCTGT | GTT |
| TTC | | GTC | 16 | 17.730 | | 7512672 | 224692 | 46770786e- | 557919e-08 | | 14048395 | ATTC | TTTC | GTC |
| | | GTG | 6 | 17.262 | | 246 | | 09 | | | | | | GTG |
| | | GTT | 61 | 34.073 | | | | | | | | | | GTA |
| GGA_E_ | G_E_* | GAA | 0 | 11.881 | 1 | 40.8086 | 39.4563523 | 1.67888138 | 3.354746405 | 17 | 3.32096190 | 23.8:GGAG | 3.3:GGAG | GAG |
| TGA | | GAG | 17 | 5.119 | | 5202991 | 8961085 | 99211265e- | 774033e-10 | | 5271227 | AATGA | AGTGA | GAA |
| | | | | | | 2054 | | 10 | | | | | | |
| GGA_L_ | G_L_T | CTA | 7 | 9.063 | 5 | 24.6030 | 38.9165859 | 0.00016620 | 2.468434997 | 64 | 1.60817243 | 2.1:GGACT | 4.1:GGAC | TTA |
| ACT | | CTC | 15 | 3.696 | | 0150459 | 6775969 | 3378377925 | 46359e-07 | | 14160122 | TACT | TCACT | TTG |
| | | CTG | 4 | 7.240 | | 7632 | | | | | | | | CTC |
| | | CTT | 4 | 8.220 | | | | | | | | | | CTA |
| | | TTA | 18 | 17.662 | | | | | | | | | | CTT |
| | | TTG | 16 | 18.119 | | | | | | | | | | CTG |
| GGA_L_ | G_L_Q | CTA | 8 | 6.514 | 5 | 35.9081 | 51.3869914 | 9.90841751 | 7.205338473 | 46 | 2.38175484 | 3.0:GGACT | 3.8:GGAC | CTG |
| CAG | | CTC | 3 | 2.656 | | 6725305 | 122624 | 8450867e- | 839713e-10 | | 4142991 | TCAG | TGCAG | CTA |
| | | CTG | 20 | 5.203 | | 2895 | | 07 | | | | | | TTA |
| | | CTT | 2 | 5.908 | | | | | | | | | | TTG |
| | | TTA | 7 | 12.695 | | | | | | | | | | CTC |
| | | TTG | 6 | 13.023 | | | | | | | | | | CTT |
| GGA_L_ | G_L_A | CTA | 8 | 8.355 | 5 | 32.5435 | 46.8552249 | 4.63625207 | 6.080956046 | 59 | 1.99146223 | 1.9:GGATT | 3.4:GGAC | CTG |
| GCC | | CTC | 3 | 3.407 | | 3033637 | 7218369 | 4148128e- | 6681e-09 | | 31544347 | GGCC | TGGCC | TTG |
| | | CTG | 23 | 6.674 | | 212 | | 06 | | | | | | TTA |
| | | CTT | 7 | 7.578 | | | | | | | | | | CTA |
| | | TTA | 9 | 16.282 | | | | | | | | | | CTT |
| | | TTG | 9 | 16.704 | | | | | | | | | | CTC |
| GGA_L_ | G_L_C | CTA | 5 | 4.956 | 5 | 41.9373 | 41.3236954 | 6.06478659 | 8.070911163 | 35 | 2.39781787 | 7.9:GGACT | 2.7:GGATT | TTA |
| TGC | | CTC | 0 | 2.021 | | 8352681 | 7046006 | 8671358e- | 438775e-08 | | 16926877 | GTGC | ATGC | CTA |
| | | CTG | 0 | 3.959 | | 5225 | | 08 | | | | | | TTG |
| | | CTT | 2 | 4.496 | | | | | | | | | | CTT |
| | | TTA | 26 | 9.659 | | | | | | | | | | CTG |
| | | TTG | 2 | 9.909 | | | | | | | | | | CTC |
| GGA_R_ | G_R_H | AGA | 4 | 8.535 | 5 | 49.8929 | 146.762480 | 1.45747071 | 6.524097268 | 18 | 6.64793089 | 5.0:GGAC | 14.6:GGAC | CGG |
| CAC | | AGG | 2 | 3.904 | | 6955093 | 90984762 | 01792221e- | 29795e-30 | | 0805834 | GTCAC | GGCAC | AGA |
| | | CGA | 1 | 1.229 | | 134 | | 09 | | | | | | AGG |
| | | CGC | 0 | 1.065 | | | | | | | | | | CGA |
| | | CGG | 11 | 0.751 | | | | | | | | | | CGT |
| | | CGT | 0 | 2.515 | | | | | | | | | | CGC |
| GGA_R_ | G_R_Q | AGA | 2 | 14.224 | 5 | 37.9453 | 43.7395107 | 3.86984082 | 2.616068032 | 30 | 2.78353562 | 7.1:GGAA | 3.2:GGAA | AGG |
| CAG | | AGG | 21 | 6.507 | | 4389192 | 65850525 | 6181235e- | 6896903e-08 | | 07294066 | GACAG | GGCAG | CGT |
| | | CGA | 1 | 2.049 | | 7976 | | 07 | | | | | | CGC |
| | | CGC | 2 | 1.776 | | | | | | | | | | AGA |
| | | CGG | 1 | 1.252 | | | | | | | | | | CGG |
| | | CGT | 3 | 4.192 | | | | | | | | | | CGA |
| GGA_T_ | G_T_K | ACA | 28 | 27.352 | 3 | 30.8913 | 36.2780622 | 8.96003425 | 6.540221625 | 90 | 1.58702194 | 2.2:GGAA | 2.5:GGAA | ACG |
| AAA | | ACC | 17 | 19.068 | | 9521465 | 02430476 | 4185827e- | 271933e-08 | | 23358451 | CTAAA | CGAAA | ACA |
| | | ACG | 31 | 12.624 | | 401 | | 07 | | | | | | ACC |
| | | ACT | 14 | 30.957 | | | | | | | | | | ACT |
| GGC_G_ | G_G_P | GGA | 21 | 7.382 | 3 | 26.5092 | 32.7036855 | 7.46049702 | 3.719130361 | 33 | 2.53184190 | 4.1:GGCG | 2.8:GGCG | GGA |
| CCA | | GGC | 4 | 6.525 | | 6520549 | 9540804 | 4720439e- | 0155597e-07 | | 3168642 | GGCCA | GACCA | GGT |
| | | GGG | 1 | 4.099 | | 372 | | 06 | | | | | | GGC |
| | | GGT | 7 | 14.994 | | | | | | | | | | GGG |
| GGC_L_ | G_L_C | CTA | 1 | 5.239 | 5 | 67.9293 | 159.896118 | 2.76229401 | 1.041590829 | 37 | 4.48117924 | 5.2:GGCCT | 9.4:GGCCT | CTC |
| TGT | | CTC | 20 | 2.137 | | 4611343 | 95204274 | 825302e-13 | 3242084e-32 | | 5210491 | ATGT | CTGT | TTA |
| | | CTG | 3 | 4.185 | | 928 | | | | | | | | TTG |
| | | CTT | 4 | 4.752 | | | | | | | | | | CTT |
| | | TTA | 5 | 10.211 | | | | | | | | | | CTG |
| | | TTG | 4 | 10.475 | | | | | | | | | | CTA |
| GGC_Q_ | G_Q_K | CAA | 30 | 49.861 | 1 | 22.8098 | 24.9583842 | 1.78843465 | 5.858121895 | 73 | 1.77499875 | 1.7:GGCC | 1.9:GGCC | CAG |
| AAA | | CAG | 43 | 23.139 | | 8503402 | 74937547 | 82571686e- | 717873e-07 | | 16763859 | AAAAA | AGAAA | CAA |
| | | | | | | 4642 | | 06 | | | | | | |
| GGC_R_ | G_R_R | AGA | 1 | 6.638 | 5 | 40.1222 | 60.9640246 | 1.41096109 | 7.681577436 | 14 | 5.49225367 | 6.6:GGCA | 6.1:GGCC | CGT |
| CGT | | AGG | 0 | 3.037 | | 3431708 | 5321832 | 45252585e- | 644162e-12 | | 0566476 | GACGT | GTCGT | CGC |
| | | CGA | 0 | 0.956 | | 1 | | 07 | | | | | | AGA |
| | | CGC | 1 | 0.829 | | | | | | | | | | CGG |
| | | CGG | 0 | 0.584 | | | | | | | | | | CGA |
| | | CGT | 12 | 1.956 | | | | | | | | | | AGG |
| GGC_R_ | G_R_G | AGA | 15 | 18.966 | 5 | 31.3852 | 39.7739657 | 7.86149742 | 1.658586252 | 40 | 2.15986353 | 5.5:GGCC | 3.4:GGCC | CGT |
| GGT | | AGG | 3 | 8.676 | | 4239589 | 7734867 | 0716145e- | 7251132e-07 | | 59364717 | GAGGT | GTGGT | AGA |
| | | CGA | 0 | 2.731 | | 3123 | | 06 | | | | | | AGG |
| | | CGC | 2 | 2.367 | | | | | | | | | | CGC |
| | | CGG | 1 | 1.670 | | | | | | | | | | CGG |
| | | CGT | 19 | 5.590 | | | | | | | | | | CGA |
| GGC_R_ | G_R_C | AGA | 1 | 5.690 | 5 | 25.9705 | 40.8797391 | 9.04165909 | 9.922554367 | 12 | 3.94277114 | 5.7:GGCA | 7.3:GGCC | CGA |
| TGC | | AGG | 0 | 2.603 | | 6561026 | 3392494 | 708182e-05 | 212886e-08 | | 5527697 | GATGC | GATGC | CGT |
| | | CGA | 6 | 0.819 | | 0614 | | | | | | | | CGG |
| | | CGC | 1 | 0.710 | | | | | | | | | | CGC |
| | | CGG | 1 | 0.501 | | | | | | | | | | AGA |
| | | CGT | 3 | 1.677 | | | | | | | | | | AGG |
| GGC_S_ | G_S_R | AGC | 2 | 4.056 | 5 | 32.9003 | 44.7348406 | 3.93879391 | 1.642581493 | 36 | 2.57810648 | 3.1:GGCTC | 3.5:GGCTC | TCC |
| AGG | | AGT | 2 | 5.875 | | 7600208 | 16807126 | 1557698e- | 7878728e-08 | | 17991814 | TAGG | CAGG | TCA |
| | | TCA | 6 | 7.532 | | 587 | | 06 | | | | | | TCT |
| | | TCC | 20 | 5.653 | | | | | | | | | | TCG |
| | | TCG | 3 | 3.508 | | | | | | | | | | AGT |
| | | TCT | 3 | 9.375 | | | | | | | | | | AGC |
| GGC_V_ | G_V_G | GTA | 16 | 4.734 | 3 | 26.6554 | 34.2875682 | 6.95249611 | 1.722705767 | 22 | 3.20787882 | 4.4:GGCGT | 3.4:GGCG | GTA |
| GGG | | GTC | 1 | 4.432 | | 3320217 | 5696101 | 1072808e- | 5268895e-07 | | 7319401 | CGGG | TAGGG | GTT |
| | | GTG | 2 | 4.315 | | 6606 | | 06 | | | | | | GTG |
| | | GTT | 3 | 8.518 | | | | | | | | | | GTC |
| GGG_G_ | G_G_I | GGA | 2 | 6.264 | 3 | 39.6780 | 53.8389115 | 1.24679898 | 1.214423175 | 28 | 3.63729163 | 3.5:GGGG | 3.8:GGGG | GGC |
| ATA | | GGC | 21 | 5.536 | | 4295157 | 93949184 | 83886008e- | 0197565e-11 | | 92497987 | GGATA | GCATA | GGT |
| | | GGG | 1 | 3.478 | | 6664 | | 08 | | | | | | GGA |
| | | GGT | 4 | 12.722 | | | | | | | | | | GGG |
| GGG_G_ | G_G_L | GGA | 0 | 4.027 | 3 | 48.9630 | 63.3227290 | 1.32831638 | 1.145689314 | 18 | 4.92136446 | 8.2:GGGG | 4.8:GGGG | GGC |
| CTC | | GGC | 17 | 3.559 | | 2354275 | 5302022 | 3349689e- | 498539e-13 | | 0835655 | GTCTC | GCCTC | GGT |
| | | GGG | 0 | 2.236 | | 809 | | 10 | | | | | | GGG |
| | | GGT | 1 | 8.179 | | | | | | | | | | GGA |
| GGG_I_ | G_I_Y | ATA | 7 | 11.147 | 2 | 27.8711 | 32.4959545 | 8.86884379 | 8.781993771 | 40 | 2.34400286 | 2.6:GGGA | 2.5:GGGA | ATC |
| TAC | | ATC | 26 | 10.328 | | 0242613 | 62124346 | 6088281e- | 374553e-08 | | 43315447 | TTTAC | TCTAC | ATT |
| | | ATT | 7 | 18.525 | | 36 | | 07 | | | | | | ATA |
| GGG_L_ | G_L_T | CTA | 2 | 4.956 | 5 | 49.5906 | 79.1566592 | 1.68048837 | 1.259659022 | 35 | 3.62502271 | 4.0:GGGCT | 4.9:GGGC | CTT |
| ACG | | CTC | 2 | 2.021 | | 9246446 | 669063 | 3599869e- | 0257256e-15 | | 52083014 | GACG | TTACG | TTG |
| | | CTG | 1 | 3.959 | | 2215 | | 09 | | | | | | TTA |
| | | CTT | 22 | 4.496 | | | | | | | | | | CTC |
| | | TTA | 3 | 9.659 | | | | | | | | | | CTA |
| | | TTG | 5 | 9.909 | | | | | | | | | | CTG |
| GGG_L_ | G_L_F | CTA | 3 | 7.788 | 5 | 50.6285 | 75.4863456 | 1.03046547 | 7.363978073 | 55 | 2.64079176 | 2.6:GGGCT | 4.2:GGGC | CTG |
| TTC | | CTC | 3 | 3.176 | | 4927650 | 1313683 | 9283889e- | 040801e-15 | | 3595358 | ATTC | TGTTC | CTT |
| | | CTG | 26 | 6.221 | | 825 | | 09 | | | | | | TTG |
| | | CTT | 9 | 7.064 | | | | | | | | | | TTA |
| | | TTA | 7 | 15.179 | | | | | | | | | | CTC |
| | | TTG | 7 | 15.571 | | | | | | | | | | CTA |
| GGG_R_ | G_R_N | AGA | 10 | 18.492 | 5 | 34.2591 | 58.1190740 | 2.11419429 | 2.972480118 | 39 | 2.64202402 | 2.1:GGGA | 5.3:GGGC | CGA |
| AAT | | AGG | 4 | 8.459 | | 8666471 | 7308829 | 2146368e- | 4047836e-11 | | 03204757 | GGAAT | GAAAT | AGA |
| | | CGA | 14 | 2.663 | | 076 | | 06 | | | | | | CGC |
| | | CGC | 5 | 2.308 | | | | | | | | | | CGT |
| | | CGG | 2 | 1.628 | | | | | | | | | | AGG |
| | | CGT | 4 | 5.450 | | | | | | | | | | CGG |
| GGG_S_ | G_S_Q | AGC | 23 | 6.986 | 5 | 51.5291 | 60.1177555 | 6.73766903 | 1.149224218 | 62 | 2.35072007 | 9.7:GGGTC | 3.3:GGGA | AGC |
| CAA | | AGT | 19 | 10.119 | | 8183963 | 2774759 | 9660678e- | 7225931e-11 | | 097688 | CCAA | GCCAA | AGT |
| | | TCA | 8 | 12.972 | | 311 | | 10 | | | | | | TCT |
| | | TCC | 1 | 9.735 | | | | | | | | | | TCA |
| | | TCG | 2 | 6.042 | | | | | | | | | | TCG |
| | | TCT | 9 | 16.147 | | | | | | | | | | TCC |
| GGG_T_ | G_T_T | ACA | 7 | 7.902 | 3 | 30.6859 | 43.0718474 | 9.89846730 | 2.376058984 | 26 | 2.83386616 | 4.5:GGGA | 4.1:GGGA | ACG |
| ACC | | ACC | 2 | 5.508 | | 0554894 | 9725026 | 6244563e- | 7990184e-09 | | 338933 | CTACC | CGACC | ACA |
| | | ACG | 15 | 3.647 | | 0916 | | 07 | | | | | | ACT |
| | | ACT | 2 | 8.943 | | | | | | | | | | ACC |
| GGT_A_ | G_A_N | GCA | 16 | 27.996 | 3 | 31.2060 | 35.9428382 | 7.69235317 | 7.699684036 | 95 | 1.72935443 | 2.2:GGTGC | 2.1:GGTG | GCC |
| AAC | | GCC | 45 | 21.224 | | 2627311 | 287277 | 2048897e- | 240479e-08 | | 39840388 | GAAC | CCAAC | GCT |
| | | GCG | 5 | 10.862 | | 093 | | 07 | | | | | | GCA |
| | | GCT | 29 | 34.918 | | | | | | | | | | GCG |
| GGT_A_ | G_A_I | GCA | 33 | 50.099 | 3 | 32.9087 | 36.0766515 | 3.36654944 | 7.214083639 | 170 | 1.47386485 | 1.9:GGTGC | 1.8:GGTG | GCC |
| ATT | | GCC | 69 | 37.979 | | 9052006 | 19474964 | 03860107e- | 374375e-08 | | 0548011 | GATT | CCATT | GCT |
| | | GCG | 10 | 19.437 | | 9815 | | 07 | | | | | | GCA |
| | | GCT | 58 | 62.485 | | | | | | | | | | GCG |
| GGT_A_ | G_A_A | GCA | 35 | 55.698 | 3 | 43.0833 | 40.4547160 | 2.36277967 | 8.534097196 | 189 | 1.47743399 | 3.6:GGTGC | 1.6:GGTG | GCT |
| GCT | | GCC | 40 | 42.224 | | 1098099 | 7590445 | 7590284e- | 031388e-09 | | 6213505 | GGCT | CTGCT | GCC |
| | | GCG | 6 | 21.609 | | 374 | | 09 | | | | | | GCA |
| | | GCT | 108 | 69.469 | | | | | | | | | | GCG |
| GGT_E_ | G_E_A | GAA | 8 | 20.966 | 1 | 23.7486 | 26.6306778 | 1.09772311 | 2.463016639 | 30 | 2.48349908 | 2.6:GGTG | 2.4:GGTG | GAG |
| GCG | | GAG | 22 | 9.034 | | 5057754 | 71702467 | 90352535e- | 949158e-07 | | 47055796 | AAGCG | AGGCG | GAA |
| | | | | | | 6222 | | 06 | | | | | | |
| GGT_F_ | G_F_K | TTC | 48 | 23.555 | 1 | 43.6019 | 42.7152318 | 4.02446014 | 6.331732983 | 58 | 2.23077731 | 3.4:GGTTT | 2.0:GGTTT | TTC |
| AAG | | TTT | 10 | 34.445 | | 1026570 | 3380463 | 58823923e- | 988645e-11 | | 07355127 | TAAG | CAAG | TTT |
| | | | | | | 0006 | | 11 | | | | | | |
| GGT_F_ | G_F_L | TTC | 42 | 23.149 | 1 | 25.6220 | 25.8479673 | 4.15266391 | 3.693934900 | 57 | 1.92154371 | 2.3:GGTTT | 1.8:GGTTT | TTC |
| TTG | | TTT | 15 | 33.851 | | 5244421 | 33799232 | 3050388e- | 549426e-07 | | 48824102 | TTTG | CTTG | TTT |
| | | | | | | 3615 | | 07 | | | | | | |
| GGT_G_ | G_G_I | GGA | 21 | 39.818 | 3 | 46.9063 | 46.2231835 | 3.63868218 | 5.084418732 | 178 | 1.64199120 | 2.0:GGTG | 1.6:GGTG | GGT |
| ATT | | GGC | 18 | 35.195 | | 8111249 | 6323652 | 4816721e- | 052398e-10 | | 32808117 | GCATT | GTATT | GGA |
| | | GGG | 13 | 22.109 | | 7414 | | 10 | | | | | | GGC |
| | | GGT | 126 | 80.877 | | | | | | | | | | GGG |
| GGT_G_ | G_G_G | GGA | 21 | 50.332 | 3 | 98.0764 | 90.4234499 | 4.02762466 | 1.776656879 | 225 | 1.78149997 | 5.6:GGTG | 1.7:GGTG | GGT |
| GGT | | GGC | 27 | 44.489 | | 7429732 | 9997599 | 9913965e- | 6921948e-19 | | 38840842 | GGGGT | GTGGT | GGC |
| | | GGG | 5 | 27.947 | | 68 | | 21 | | | | | | GGA |
| | | GGT | 172 | 102.232 | | | | | | | | | | GGG |
| GGT_G_ | G_G_V | GGA | 15 | 34.226 | 3 | 45.0807 | 43.8253709 | 8.89402378 | 1.643748146 | 153 | 1.66950979 | 2.3:GGTG | 1.6:GGTG | GGT |
| GTT | | GGC | 19 | 30.252 | | 9107352 | 8039373 | 8013594e- | 5639313e-09 | | 5096565 | GAGTT | GTGTT | GGC |
| | | GGG | 9 | 19.004 | | 131 | | 10 | | | | | | GGA |
| | | GGT | 110 | 69.518 | | | | | | | | | | GGG |
| GGT_G_ | G_G_L | GGA | 25 | 32.213 | 3 | 26.8603 | 32.0335612 | 6.29801181 | 5.148921773 | 144 | 1.38955053 | 1.8:GGTG | 2.2:GGTG | GGT |
| TTA | | GGC | 16 | 28.473 | | 0661820 | 5281672 | 7329132e- | 451713e-07 | | 57542064 | GCTTA | GGTTA | GGG |
| | | GGG | 39 | 17.886 | | 6934 | | 06 | | | | | | GGA |
| | | GGT | 64 | 65.429 | | | | | | | | | | GGC |
| GGT_G_ | G_G_F | GGA | 51 | 29.752 | 3 | 44.7333 | 44.7325859 | 1.05424573 | 1.054621724 | 133 | 1.67247494 | 2.2:GGTG | 1.8:GGTG | GGA |
| TTT | | GGC | 25 | 26.298 | | 1472369 | 5731221 | 53896801e- | 6376175e-09 | | 99893978 | GTTTT | GGTTT | GGG |
| | | GGG | 30 | 16.520 | | 729 | | 09 | | | | | | GGT |
| | | GGT | 27 | 60.430 | | | | | | | | | | GGC |
| GGT_I_ | G_I_K | ATA | 32 | 37.621 | 2 | 28.4913 | 31.6780142 | 6.50406818 | 1.321924342 | 135 | 1.56350018 | 1.6:GGTAT | 1.8:GGTAT | ATC |
| AAG | | ATC | 63 | 34.856 | | 3558947 | 81013652 | 812336e-07 | 8120703e-07 | | 2991456 | TAAG | CAAG | ATT |
| | | ATT | 40 | 62.523 | | 792 | | | | | | | | ATA |
| GGT_I_ | G_I_A | ATA | 13 | 26.474 | 2 | 29.3607 | 28.6242086 | 4.21100388 | 6.086001581 | 95 | 1.69857840 | 2.0:GGTAT | 1.6:GGTAT | ATT |
| GCC | | ATC | 12 | 24.528 | | 8915619 | 7924871 | 96165684e- | 503203e-07 | | 22083468 | CGCC | TGCC | ATA |
| | | ATT | 70 | 43.998 | | 7868 | | 07 | | | | | | ATC |
| GGT_I_ | G_I_G | ATA | 14 | 44.309 | 2 | 38.1915 | 31.7490318 | 5.09120035 | 1.275808052 | 159 | 1.38125401 | 3.2:GGTAT | 1.4:GGTAT | ATT |
| GGT | | ATC | 43 | 41.053 | | 0441565 | 13555803 | 6158559e- | 051736e-07 | | 76926957 | AGGT | TGGT | ATC |
| | | ATT | 102 | 73.638 | | 873 | | 09 | | | | | | ATA |
| GGT_K_ | G_K_K | AAA | 69 | 112.375 | 1 | 39.2374 | 39.7916211 | 3.75275457 | 2.825546551 | 194 | 1.56529459 | 1.6:GGTA | 1.5:GGTA | AAG |
| AAG | | AAG | 125 | 81.625 | | 3592151 | 764002 | 48975857e- | 8163467e-10 | | 66461997 | AAAAG | AGAAG | AAA |
| | | | | | | 233 | | 10 | | | | | | |
| GGT_L_ | G_L_K | CTA | 11 | 24.781 | 5 | 43.8545 | 42.2696165 | 2.47918163 | 5.194867351 | 175 | 1.47358171 | 2.8:GGTCT | 1.7:GGTTT | TTG |
| AAA | | CTC | 12 | 10.106 | | 2579784 | 1417214 | 6842857e- | 9988685e-08 | | 82630029 | TAAA | GAAA | TTA |
| | | CTG | 13 | 19.796 | | 1426 | | 08 | | | | | | CTG |
| | | CTT | 8 | 22.478 | | | | | | | | | | CTC |
| | | TTA | 48 | 48.295 | | | | | | | | | | CTA |
| | | TTG | 83 | 49.545 | | | | | | | | | | CTT |
| GGT_L_ | G_L_F | CTA | 13 | 19.117 | 5 | 41.7823 | 49.6636017 | 6.51909970 | 1.623763467 | 135 | 1.60382275 | 2.0:GGTTT | 2.4:GGTCT | CTT |
| TTC | | CTC | 12 | 7.796 | | 1372480 | 61917725 | 1062626e- | 3119465e-09 | | 34205767 | GTTC | TTTC | TTA |
| | | CTG | 12 | 15.271 | | 993 | | 08 | | | | | | TTG |
| | | CTT | 42 | 17.340 | | | | | | | | | | CTA |
| | | TTA | 37 | 37.256 | | | | | | | | | | CTG |
| | | TTG | 19 | 38.220 | | | | | | | | | | CTC |
| GGT_P_ | G_P_Q | CCA | 6 | 15.889 | 3 | 44.8246 | 54.8252359 | 1.00815800 | 7.481641044 | 39 | 2.39725361 | 12.5:GGTC | 4.0:GGTCC | CCG |
| CAG | | CCC | 0 | 6.259 | | 7066600 | 5842684 | 0785647e- | 559504e-12 | | 83228117 | CCCAG | GCAG | CCT |
| | | CCG | 19 | 4.794 | | 1154 | | 09 | | | | | | CCA |
| | | CCT | 14 | 12.058 | | | | | | | | | | CCC |
| GGT_P_ | G_P_R | CCA | 3 | 11.407 | 3 | 33.3219 | 39.1130765 | 2.75443416 | 1.642519076 | 28 | 2.41390218 | 6.9:GGTCC | 3.6:GGTCC | CCC |
| CGT | | CCC | 16 | 4.494 | | 2605286 | 33205856 | 1138596e- | 4045587e-08 | | 69379547 | GCGT | CCGT | CCT |
| | | CCG | 0 | 3.442 | | 8726 | | 07 | | | | | | CCA |
| | | CCT | 9 | 8.657 | | | | | | | | | | CCG |
| GGT_R_ | G_R_R | AGA | 6 | 14.224 | 5 | 45.8251 | 69.9232605 | 9.85792269 | 1.063174518 | 30 | 3.74191833 | 4.1:GGTCG | 4.8:GGTC | CGT |
| CGT | | AGG | 2 | 6.507 | | 2066963 | 0329065 | 4518181e- | 4158417e-13 | | 36065043 | ACGT | GTCGT | AGA |
| | | CGA | 0 | 2.049 | | 896 | | 09 | | | | | | AGG |
| | | CGC | 1 | 1.776 | | | | | | | | | | CGG |
| | | CGG | 1 | 1.252 | | | | | | | | | | CGC |
| | | CGT | 20 | 4.192 | | | | | | | | | | CGA |
| GGT_R_ | G_R_G | AGA | 18 | 19.914 | 5 | 32.9450 | 38.3977256 | 3.85924127 | 3.138968083 | 42 | 1.95553548 | 5.7:GGTCG | 3.2:GGTC | CGT |
| GGC | | AGG | 2 | 9.110 | | 1223316 | 40242726 | 419016e-06 | 2689716e-07 | | 2389202 | AGGC | GTGGC | AGA |
| | | CGA | 0 | 2.868 | | 229 | | | | | | | | CGC |
| | | CGC | 2 | 2.486 | | | | | | | | | | AGG |
| | | CGG | 1 | 1.753 | | | | | | | | | | CGG |
| | | CGT | 19 | 5.869 | | | | | | | | | | CGA |
| GGT_S_ | G_S_S | AGC | 5 | 8.451 | 5 | 36.6976 | 37.5051375 | 6.88628965 | 4.743214367 | 75 | 1.77513141 | 5.9:GGTTC | 2.2:GGTTC | TCA |
| TCG | | AGT | 6 | 12.240 | | 2432896 | 30102616 | 7594723e- | 7387296e-07 | | 96490464 | CTCG | ATCG | TCT |
| | | TCA | 35 | 15.692 | | 867 | | 07 | | | | | | AGT |
| | | TCC | 2 | 11.776 | | | | | | | | | | TCG |
| | | TCG | 5 | 7.309 | | | | | | | | | | AGC |
| | | TCT | 22 | 19.532 | | | | | | | | | | TCC |
| GGT_S_ | G_S_L | AGC | 8 | 18.253 | 5 | 46.8892 | 42.3524658 | 5.98458691 | 4.998051964 | 162 | 1.51829355 | 2.9:GGTA | 1.6:GGTTC | TCT |
| TTG | | AGT | 9 | 26.439 | | 6181632 | 0955737 | 3129825e- | 764922e-08 | | 91056144 | GTTTG | TTTG | TCA |
| | | TCA | 39 | 33.894 | | 002 | | 09 | | | | | | TCC |
| | | TCC | 31 | 25.437 | | | | | | | | | | AGT |
| | | TCG | 6 | 15.787 | | | | | | | | | | AGC |
| | | TCT | 69 | 42.189 | | | | | | | | | | TCG |
| GGT_T_ | G_T_N | ACA | 26 | 35.254 | 3 | 37.1986 | 44.9273627 | 4.17685514 | 9.587500782 | 116 | 1.77282224 | 1.6:GGTAC | 2.2:GGTA | ACC |
| AAC | | ACC | 54 | 24.576 | | 8292982 | 6597085 | 4736773e- | 7044e-10 | | 45910586 | TAAC | CCAAC | ACA |
| | | ACG | 11 | 16.271 | | 0016 | | 08 | | | | | | ACT |
| | | ACT | 25 | 39.900 | | | | | | | | | | ACG |
| GGT_T_ | G_T_F | ACA | 17 | 29.175 | 3 | 40.3619 | 38.7142873 | 8.92949341 | 1.995204674 | 96 | 1.72920887 | 4.1:GGTAC | 1.8:GGTA | ACT |
| TTC | | ACC | 5 | 20.339 | | 4606442 | 37105446 | 5091553e- | 522823e-08 | | 9310669 | CTTC | CTTTC | ACA |
| | | ACG | 14 | 13.465 | | 874 | | 09 | | | | | | ACG |
| | | ACT | 60 | 33.020 | | | | | | | | | | ACC |
| GGT_V_ | G_V_I | GTA | 11 | 26.036 | 3 | 34.0082 | 36.7801449 | 1.97328347 | 5.121531978 | 121 | 1.52941191 | 2.4:GGTGT | 2.0:GGTGT | GTC |
| ATC | | GTC | 49 | 24.379 | | 2394735 | 4936028 | 55320343e- | 830536e-08 | | 7367953 | AATC | CATC | GTT |
| | | GTG | 15 | 23.735 | | 8076 | | 07 | | | | | | GTG |
| | | GTT | 46 | 46.850 | | | | | | | | | | GTA |
| GGT_V_ | G_V_I | GTA | 14 | 39.377 | 3 | 55.1142 | 57.6889057 | 6.49134158 | 1.831643991 | 183 | 1.51347888 | 2.8:GGTGT | 2.0:GGTGT | GTC |
| ATT | | GTC | 74 | 36.870 | | 7843000 | 6563937 | 7394169e- | 0916626e-12 | | 0524835 | AATT | CATT | GTT |
| | | GTG | 24 | 35.897 | | 775 | | 12 | | | | | | GTG |
| | | GTT | 71 | 70.856 | | | | | | | | | | GTA |
| GGT_V_ | G_V_G | GTA | 20 | 37.656 | 3 | 45.8278 | 41.7677262 | 6.17023760 | 4.494297042 | 175 | 1.52151782 | 2.9:GGTGT | 1.5:GGTGT | GTT |
| GGT | | GTC | 40 | 35.258 | | 3136635 | 3204043 | 1472323e- | 11671e-09 | | 94396792 | GGGT | TGGT | GTC |
| | | GTG | 12 | 34.328 | | 807 | | 10 | | | | | | GTA |
| | | GTT | 103 | 67.758 | | | | | | | | | | GTG |
| GTA_A_ | V_A_Q | GCA | 10 | 9.725 | 3 | 28.2978 | 40.4270995 | 3.14500184 | 8.649937876 | 33 | 2.32297020 | 3.7:GTAGC | 4.0:GTAG | GCG |
| CAG | | GCC | 2 | 7.372 | | 5773915 | 6145659 | 18283243e- | 831974e-09 | | 05716586 | CCAG | CGCAG | GCA |
| | | GCG | 15 | 3.773 | | 4573 | | 06 | | | | | | GCT |
| | | GCT | 6 | 12.130 | | | | | | | | | | GCC |
| GTA_A_ | V_A_V | GCA | 7 | 12.672 | 3 | 29.9982 | 46.0820311 | 1.38121770 | 5.448226036 | 43 | 2.32997505 | 1.8:GTAGC | 3.9:GTAG | GCG |
| GTT | | GCC | 8 | 9.607 | | 6429470 | 22135234 | 8980713e- | 933693e-10 | | 5118617 | AGTT | CGGTT | GCT |
| | | GCG | 19 | 4.916 | | 4605 | | 06 | | | | | | GCC |
| | | GCT | 9 | 15.805 | | | | | | | | | | GCA |
| GTA_G_ | V_G_R | GGA | 8 | 10.290 | 3 | 42.6657 | 62.1855771 | 2.89788882 | 2.005308021 | 46 | 2.53166335 | 3.0:GTAG | 4.0:GTAG | GGG |
| AGA | | GGC | 8 | 9.095 | | 0874917 | 0854549 | 37201227e- | 9722085e-13 | | 79372385 | GTAGA | GGAGA | GGC |
| | | GGG | 23 | 5.714 | | 193 | | 09 | | | | | | GGA |
| | | GGT | 7 | 20.901 | | | | | | | | | | GGT |
| GTA_P_ | V_P_L | CCA | 9 | 13.037 | 3 | 38.4601 | 58.7410429 | 2.25841735 | 1.091864352 | 32 | 3.03445642 | 4.9:GTACC | 4.6:GTACC | CCG |
| CTG | | CCC | 3 | 5.136 | | 8423323 | 7776867 | 80393925e- | 314595e-12 | | 88485922 | TCTG | GCTG | CCA |
| | | CCG | 18 | 3.933 | | 919 | | 08 | | | | | | CCC |
| | | CCT | 2 | 9.894 | | | | | | | | | | CCT |
| GTA_P_ | V_P_Y | CCA | 12 | 17.111 | 3 | 28.7460 | 42.8226963 | 2.53218730 | 2.683829235 | 42 | 2.30870874 | 2.2:GTACC | 3.7:GTACC | CCG |
| TAC | | CCC | 5 | 6.741 | | 3274085 | 8708583 | 85794825e- | 712093e-09 | | 09652733 | TTAC | GTAC | CCA |
| | | CCG | 19 | 5.163 | | 0254 | | 06 | | | | | | CCT |
| | | CCT | 6 | 12.986 | | | | | | | | | | CCC |
| GTA_R_ | V_R_N | AGA | 41 | 42.199 | 5 | 32.6318 | 48.2337672 | 4.45303644 | 3.182275778 | 89 | 1.58299412 | 2.6:GTACG | 3.6:GTAC | AGA |
| AAT | | AGG | 13 | 19.304 | | 1557145 | 7279858 | 8802433e- | 8086243e-09 | | 37039036 | CAAT | GAAAT | CGA |
| | | CGA | 22 | 6.078 | | 576 | | 06 | | | | | | AGG |
| | | CGC | 2 | 5.268 | | | | | | | | | | CGT |
| | | CGG | 4 | 3.715 | | | | | | | | | | CGG |
| | | CGT | 7 | 12.437 | | | | | | | | | | CGC |
| GTA_R_ | V_R_E | AGA | 24 | 29.397 | 5 | 36.3850 | 62.6470145 | 7.95401810 | 3.444843306 | 62 | 2.00863237 | 2.6:GTACG | 4.9:GTAC | AGA |
| GAG | | AGG | 9 | 13.448 | | 3509012 | 5329906 | 2438732e- | 4780977e-12 | | 41310355 | GGAG | GCGAG | CGC |
| | | CGA | 6 | 4.234 | | 8255 | | 07 | | | | | | AGG |
| | | CGC | 18 | 3.670 | | | | | | | | | | CGA |
| | | CGG | 1 | 2.588 | | | | | | | | | | CGT |
| | | CGT | 4 | 8.664 | | | | | | | | | | CGG |
| GTA_S_ | V_S_Y | AGC | 3 | 8.000 | 5 | 33.5145 | 48.7050910 | 2.97401551 | 2.549589123 | 71 | 1.83095877 | 2.7:GTAA | 3.5:GTATC | TCG |
| TAT | | AGT | 7 | 11.587 | | 5151702 | 3495874 | 1021691e- | 9288088e-09 | | 72363738 | GCTAT | GTAT | TCT |
| | | TCA | 14 | 14.855 | | 111 | | 06 | | | | | | TCA |
| | | TCC | 8 | 11.148 | | | | | | | | | | TCC |
| | | TCG | 24 | 6.919 | | | | | | | | | | AGT |
| | | TCT | 15 | 18.490 | | | | | | | | | | AGC |
| GTA_T_ | V_T_R | ACA | 2 | 6.686 | 3 | 47.6390 | 73.4426899 | 2.54142782 | 7.813289785 | 22 | 4.73255904 | 9.3:GTAAC | 5.5:GTAA | ACG |
| CGA | | ACC | 0 | 4.661 | | 5377189 | 9451039 | 82059887e- | 217982e-16 | | 126049 | CCGA | CGCGA | ACT |
| | | ACG | 17 | 3.086 | | 679 | | 10 | | | | | | ACA |
| | | ACT | 3 | 7.567 | | | | | | | | | | ACC |
| GTC_G_ | V_G_K | GGA | 14 | 15.659 | 3 | 32.2908 | 45.1187547 | 4.54445500 | 8.730311804 | 70 | 1.90308159 | 2.0:GTCGG | 3.1:GTCG | GGG |
| AAA | | GGC | 7 | 13.841 | | 6410393 | 4909798 | 3354668e- | 938842e-10 | | 69154518 | CAAA | GGAAA | GGT |
| | | GGG | 27 | 8.695 | | 377 | | 07 | | | | | | GGA |
| | | GGT | 22 | 31.806 | | | | | | | | | | GGC |
| GTC_I_ | V_I_N | ATA | 16 | 23.687 | 2 | 25.9548 | 29.8991681 | 2.31191861 | 3.217200547 | 85 | 1.76378876 | 1.6:GTCAT | 2.0:GTCAT | ATC |
| AAC | | ATC | 44 | 21.946 | | 6561482 | 29674948 | 84355857e- | 1591265e-07 | | 25572934 | TAAC | CAAC | ATT |
| | | ATT | 25 | 39.366 | | 4506 | | 06 | | | | | | ATA |
| GTC_I_ | V_I_K | ATA | 18 | 25.360 | 2 | 41.0242 | 47.3260941 | 1.23511521 | 5.287729449 | 91 | 1.97885534 | 2.0:GTCAT | 2.2:GTCAT | ATC |
| AAG | | ATC | 52 | 23.495 | | 0316673 | 69581 | 04937968e- | 545677e-11 | | 26601203 | TAAG | CAAG | ATT |
| | | ATT | 21 | 42.145 | | 657 | | 09 | | | | | | ATA |
| GTC_I_ | V_I_R | ATA | 14 | 24.802 | 2 | 25.4127 | 28.8608210 | 3.03170792 | 5.406949869 | 89 | 1.71062785 | 1.8:GTCAT | 2.0:GTCAT | ATC |
| AGA | | ATC | 45 | 22.979 | | 6885254 | 2387919 | 30560085e- | 874547e-07 | | 17540223 | AAGA | CAGA | ATT |
| | | ATT | 30 | 41.219 | | 0456 | | 06 | | | | | | ATA |
| GTC_L_ | V_L_F | CTA | 6 | 6.231 | 5 | 29.1286 | 39.6808555 | 2.18780313 | 1.731827775 | 44 | 2.22260132 | 2.5:GTCCT | 3.4:GTCCT | CTT |
| TTC | | CTC | 4 | 2.541 | | 6918381 | 4474282 | 35317333e- | 922706e-07 | | 34675475 | GTTC | TTTC | TTA |
| | | CTG | 2 | 4.977 | | 0743 | | 05 | | | | | | TTG |
| | | CTT | 19 | 5.651 | | | | | | | | | | CTA |
| | | TTA | 7 | 12.143 | | | | | | | | | | CTC |
| | | TTG | 6 | 12.457 | | | | | | | | | | CTG |
| GTC_R_ | V_R_T | AGA | 14 | 48.837 | 5 | 179.848 | 225.266256 | 5.76554297 | 1.105828392 | 103 | 3.79000345 | 14.1:GTCC | 3.8:GTCA | AGG |
| ACT | | AGG | 85 | 22.341 | | 2997860 | 52607208 | 9995669e- | 0983666e-46 | | 6617659 | GAACT | GGACT | AGA |
| | | CGA | 0 | 7.034 | | 3145 | | 37 | | | | | | CGT |
| | | CGC | 0 | 6.096 | | | | | | | | | | CGG |
| | | CGG | 1 | 4.299 | | | | | | | | | | CGC |
| | | CGT | 3 | 14.393 | | | | | | | | | | CGA |
| GTC_S_ | V_S_G | AGC | 5 | 3.268 | 5 | 34.8973 | 42.6049281 | 1.57730558 | 4.442968395 | 29 | 2.84101122 | 5.7:GTCTC | 3.6:GTCA | AGT |
| GGG | | AGT | 17 | 4.733 | | 6386022 | 26391556 | 68416065e- | 778805e-08 | | 345028 | GGGG | GTGGG | AGC |
| | | TCA | 3 | 6.068 | | 044 | | 06 | | | | | | TCA |
| | | TCC | 2 | 4.554 | | | | | | | | | | TCT |
| | | TCG | 0 | 2.826 | | | | | | | | | | TCC |
| | | TCT | 2 | 7.552 | | | | | | | | | | TCG |
| GTC_T_ | V_T_K | ACA | 24 | 28.264 | 3 | 40.3356 | 47.1088750 | 9.04466568 | 3.295118661 | 93 | 1.86241586 | 2.3:GTCAC | 2.3:GTCAC | ACC |
| AAG | | ACC | 46 | 19.703 | | 9454232 | 61056764 | 6691584e- | 753927e-10 | | 77186735 | TAAG | CAAG | ACA |
| | | ACG | 9 | 13.044 | | 7886 | | 09 | | | | | | ACT |
| | | ACT | 14 | 31.989 | | | | | | | | | | ACG |
| GTC_T_ | V_T_G | ACA | 19 | 32.518 | 3 | 38.7266 | 44.6034655 | 1.98324703 | 1.123397714 | 107 | 1.74767918 | 2.5:GTCAC | 2.2:GTCAC | ACC |
| GGT | | ACC | 50 | 22.670 | | 1281058 | 32230494 | 0371239e- | 2634421e-09 | | 50594606 | GGGT | CGGT | ACT |
| | | ACG | 6 | 15.008 | | 3376 | | 08 | | | | | | ACA |
| | | ACT | 32 | 36.804 | | | | | | | | | | ACG |
| GTG_E_ | V_E_A | GAA | 29 | 48.223 | 1 | 22.9069 | 25.4476639 | 1.70032008 | 4.545477156 | 69 | 1.81023988 | 1.7:GTGG | 1.9:GTGG | GAG |
| GCA | | GAG | 40 | 20.777 | | 9447924 | 56885332 | 14812525e- | 5454876e-07 | | 32589104 | AAGCA | AGGCA | GAA |
| | | | | | | 4435 | | 06 | | | | | | |
| GTG_G_ | V_G_I | GGA | 5 | 8.948 | 3 | 33.3510 | 51.9658542 | 2.71579838 | 3.045689745 | 40 | 2.65314762 | 1.8:GTGG | 4.0:GTGG | GGG |
| ATC | | GGC | 5 | 7.909 | | 0223523 | 1875498 | 89329995e- | 275462e-11 | | 0053344 | GTATC | GGATC | GGT |
| | | GGG | 20 | 4.968 | | 9775 | | 07 | | | | | | GGC |
| | | GGT | 10 | 18.175 | | | | | | | | | | GGA |
| GTG_L_ | V_L_Q | CTA | 7 | 7.222 | 5 | 43.5874 | 66.7665558 | 2.80873428 | 4.817789113 | 51 | 2.49520616 | 3.3:GTGCT | 4.2:GTGCT | CTG |
| CAG | | CTC | 1 | 2.945 | | 0400570 | 6878958 | 6234008e- | 652135e-13 | | 45279535 | TCAG | GCAG | TTA |
| | | CTG | 24 | 5.769 | | 255 | | 08 | | | | | | TTG |
| | | CTT | 2 | 6.551 | | | | | | | | | | CTA |
| | | TTA | 9 | 14.075 | | | | | | | | | | CTT |
| | | TTG | 8 | 14.439 | | | | | | | | | | CTC |
| GTG_P_ | V_P_H | CCA | 7 | 14.667 | 3 | 39.2459 | 62.8292040 | 1.53943149 | 1.460786987 | 36 | 3.09864287 | 2.9:GTGCC | 4.5:GTGCC | CCG |
| CAT | | CCC | 2 | 5.778 | | 4240462 | 6190534 | 49425013e- | 8983721e-13 | | 46408206 | CCAT | GCAT | CCT |
| | | CCG | 20 | 4.425 | | 841 | | 08 | | | | | | CCA |
| | | CCT | 7 | 11.131 | | | | | | | | | | CCC |
| GTG_R_ | V_R_S | AGA | 9 | 18.966 | 5 | 64.1545 | 168.669441 | 1.67808801 | 1.402719508 | 40 | 3.89359455 | 2.7:GTGCG | 10.8:GTGC | CGG |
| TCA | | AGG | 4 | 8.676 | | 8628445 | 709613 | 66908373e- | 1221756e-34 | | 41677146 | ATCA | GGTCA | AGA |
| | | CGA | 1 | 2.731 | | 384 | | 12 | | | | | | CGT |
| | | CGC | 2 | 2.367 | | | | | | | | | | AGG |
| | | CGG | 18 | 1.670 | | | | | | | | | | CGC |
| | | CGT | 6 | 5.590 | | | | | | | | | | CGA |
| GTG_S_ | V_S_F | AGC | 4 | 7.887 | 5 | 44.3876 | 64.3336380 | 1.93224199 | 1.540615074 | 70 | 2.02787582 | 2.6:GTGTC | 3.8:GTGTC | TCG |
| TTT | | AGT | 11 | 11.424 | | 6817335 | 1943922 | 96687728e- | 6335866e-12 | | 44358137 | TTTT | GTTT | TCC |
| | | TCA | 10 | 14.646 | | 372 | | 08 | | | | | | AGT |
| | | TCC | 12 | 10.991 | | | | | | | | | | TCA |
| | | TCG | 26 | 6.822 | | | | | | | | | | TCT |
| | | TCT | 7 | 18.230 | | | | | | | | | | AGC |
| GTG_T_ | V_T_R | ACA | 31 | 20.058 | 3 | 39.1961 | 33.6605048 | 1.57724949 | 2.336606403 | 66 | 1.82341745 | 5.7:GTGAC | 1.9:GTGA | ACA |
| AGA | | ACC | 26 | 13.983 | | 9561250 | 3633267 | 47201336e- | 335857e-07 | | 85862784 | TAGA | CCAGA | ACC |
| | | ACG | 5 | 9.257 | | 052 | | 08 | | | | | | ACG |
| | | ACT | 4 | 22.702 | | | | | | | | | | ACT |
| GTG_V_ | V_V_W | GTA | 21 | 6.670 | 3 | 31.4704 | 39.7172441 | 6.76653714 | 1.223174368 | 31 | 2.84678768 | 3.1:GTGGT | 3.1:GTGGT | GTA |
| TGG | | GTC | 2 | 6.246 | | 4552276 | 7059597 | 1519455e- | 595867e-08 | | 45524756 | CTGG | ATGG | GTT |
| | | GTG | 4 | 6.081 | | 393 | | 07 | | | | | | GTG |
| | | GTT | 4 | 12.003 | | | | | | | | | | GTC |
| GTT_E_ | V_E_C | GAA | 7 | 24.461 | 1 | 37.2018 | 41.3927448 | 1.06509989 | 1.245186695 | 35 | 2.80645400 | 3.5:GTTGA | 2.7:GTTGA | GAG |
| TGC | | GAG | 28 | 10.539 | | 9935782 | 593211 | 25469339e- | 4359976e-10 | | 6709004 | ATGC | GTGC | GAA |
| | | | | | | 011 | | 09 | | | | | | |
| GTT_F_ | V_F_K | TTC | 82 | 47.111 | 1 | 42.8742 | 43.5079988 | 5.83753720 | 4.222299737 | 116 | 1.81983585 | 2.0:GTTTT | 1.7:GTTTT | TTC |
| AAA | | TTT | 34 | 68.889 | | 0324737 | 59288854 | 7119363e- | 600827e-11 | | 63168981 | TAAA | CAAA | TTT |
| | | | | | | 028 | | 11 | | | | | | |
| GTT_F_ | V_F_N | TTC | 77 | 45.080 | 1 | 37.4246 | 38.0577826 | 9.50152718 | 6.868021383 | 111 | 1.77566938 | 1.9:GTTTT | 1.7:GTTTT | TTC |
| AAC | | TTT | 34 | 65.920 | | 1666274 | 0500118 | 2055685e- | 989614e-10 | | 44384408 | TAAC | CAAC | TTT |
| | | | | | | 081 | | 10 | | | | | | |
| GTT_G_ | V_G_G | GGA | 22 | 30.199 | 3 | 36.1618 | 33.0148816 | 6.92088907 | 3.197477833 | 135 | 1.55188550 | 3.3:GTTGG | 1.5:GTTGG | GGT |
| GGT | | GGC | 8 | 26.693 | | 7189174 | 0603794 | 7702467e- | 213983e-07 | | 77789075 | CGGT | TGGT | GGA |
| | | GGG | 12 | 16.768 | | 322 | | 08 | | | | | | GGG |
| | | GGT | 93 | 61.339 | | | | | | | | | | GGC |
| GTT_G_ | V_G_C | GGA | 24 | 9.172 | 3 | 29.1809 | 33.3289164 | 2.05171669 | 2.745095664 | 41 | 2.16043419 | 5.1:GTTGG | 2.6:GTTGG | GGA |
| TGC | | GGC | 8 | 8.107 | | 1835383 | 5461682 | 71065374e- | 76394e-07 | | 38852327 | GTGC | ATGC | GGT |
| | | GGG | 1 | 5.093 | | 7228 | | 06 | | | | | | GGC |
| | | GGT | 8 | 18.629 | | | | | | | | | | GGG |
| GTT_G_ | V_G_F | GGA | 47 | 23.041 | 3 | 30.4452 | 34.6688403 | 1.11227676 | 1.431171729 | 103 | 1.69433481 | 1.9:GTTGG | 2.0:GTTGG | GGA |
| TTT | | GGC | 11 | 20.366 | | 7507883 | 97210836 | 56261378e- | 4535943e-07 | | 74447868 | CTTT | ATTT | GGT |
| | | GGG | 14 | 12.794 | | 5728 | | 06 | | | | | | GGG |
| | | GGT | 31 | 46.800 | | | | | | | | | | GGC |
| GTT_I_ | V_I_N | ATA | 19 | 27.032 | 2 | 36.7589 | 42.4269497 | 1.04208948 | 6.124983329 | 97 | 1.87706018 | 1.8:GTTAT | 2.1:GTTAT | ATC |
| AAC | | ATC | 53 | 25.045 | | 0585422 | 9043945 | 40373302e- | 548578e-10 | | 9921175 | TAAC | CAAC | ATT |
| | | ATT | 25 | 44.924 | | 658 | | 08 | | | | | | ATA |
| GTT_I_ | V_I_A | ATA | 6 | 23.130 | 2 | 34.1356 | 30.9544255 | 3.86837510 | 1.898155944 | 83 | 1.72348345 | 3.9:GTTAT | 1.6:GTTAT | ATT |
| GCT | | ATC | 14 | 21.430 | | 9239167 | 83502207 | 01643324e- | 2249997e-07 | | 82166836 | AGCT | TGCT | ATC |
| | | ATT | 63 | 38.440 | | 931 | | 08 | | | | | | ATA |
| GTT_L_ | V_L_N | CTA | 12 | 33.278 | 5 | 41.1849 | 39.6224527 | 8.60910759 | 1.779402914 | 235 | 1.40507128 | 2.8:GTTCT | 1.8:GTTCT | TTG |
| AAT | | CTC | 24 | 13.570 | | 7574586 | 7242126 | 5420283e- | 709821e-07 | | 92423767 | AAAT | CAAT | TTA |
| | | CTG | 26 | 26.583 | | 1856 | | 08 | | | | | | CTG |
| | | CTT | 22 | 30.184 | | | | | | | | | | CTC |
| | | TTA | 54 | 64.854 | | | | | | | | | | CTT |
| | | TTG | 97 | 66.531 | | | | | | | | | | CTA |
| GTT_L_ | V_L_R | CTA | 9 | 20.108 | 5 | 40.1106 | 38.3825168 | 1.41855213 | 3.161145225 | 142 | 1.52076624 | 2.7:GTTCT | 1.7:GTTTT | TTG |
| AGA | | CTC | 11 | 8.200 | | 8101443 | 1841166 | 3881703e- | 863303e-07 | | 43454717 | GAGA | GAGA | TTA |
| | | CTG | 6 | 16.063 | | 105 | | 07 | | | | | | CTC |
| | | CTT | 8 | 18.239 | | | | | | | | | | CTA |
| | | TTA | 40 | 39.188 | | | | | | | | | | CTT |
| | | TTG | 68 | 40.202 | | | | | | | | | | CTG |
| GTT_L_ | V_L_I | CTA | 8 | 16.427 | 5 | 35.0491 | 51.9019819 | 1.47104603 | 5.650348924 | 116 | 1.54598932 | 2.1:GTTCT | 3.6:GTTCT | TTG |
| ATC | | CTC | 24 | 6.699 | | 5093756 | 7952069 | 41632884e- | 468496e-10 | | 64901032 | AATC | CATC | TTA |
| | | CTG | 9 | 13.122 | | 3915 | | 06 | | | | | | CTC |
| | | CTT | 18 | 14.899 | | | | | | | | | | CTT |
| | | TTA | 28 | 32.013 | | | | | | | | | | CTG |
| | | TTG | 29 | 32.841 | | | | | | | | | | CTA |
| GTT_R_ | V_R_H | AGA | 6 | 11.379 | 5 | 27.2828 | 40.6367589 | 5.02442162 | 1.110933337 | 24 | 2.78959598 | 5.2:GTTAG | 5.6:GTTCG | CGC |
| CAT | | AGG | 1 | 5.206 | | 5330283 | 463662 | 1843276e- | 2656627e-07 | | 5771993 | GCAT | CCAT | CGT |
| | | CGA | 3 | 1.639 | | 3573 | | 05 | | | | | | AGA |
| | | CGC | 8 | 1.420 | | | | | | | | | | CGA |
| | | CGG | 0 | 1.002 | | | | | | | | | | AGG |
| | | CGT | 6 | 3.354 | | | | | | | | | | CGG |
| GTT_R_ | V_R_R | AGA | 3 | 11.854 | 5 | 41.7005 | 62.5115695 | 6.77212276 | 3.674644484 | 25 | 3.92023212 | 4.0:GTTAG | 4.9:GTTCG | CGT |
| CGT | | AGG | 2 | 5.423 | | 5546283 | 51266476 | 3320859e- | 258823e-12 | | 20664906 | ACGT | TCGT | AGA |
| | | CGA | 1 | 1.707 | | 818 | | 08 | | | | | | CGC |
| | | CGC | 2 | 1.480 | | | | | | | | | | AGG |
| | | CGG | 0 | 1.044 | | | | | | | | | | CGA |
| | | CGT | 17 | 3.493 | | | | | | | | | | CGG |
| GTT_S_ | V_S_I | AGC | 5 | 10.253 | 5 | 30.1471 | 37.4042407 | 1.37969759 | 4.969565102 | 91 | 1.68791591 | 2.2:GTTTC | 2.4:GTTTC | TCC |
| ATC | | AGT | 13 | 14.851 | | 3080379 | 2095747 | 4109997e- | 256235e-07 | | 78857213 | GATC | CATC | TCT |
| | | TCA | 15 | 19.039 | | 5164 | | 05 | | | | | | TCA |
| | | TCC | 35 | 14.289 | | | | | | | | | | AGT |
| | | TCG | 4 | 8.868 | | | | | | | | | | AGC |
| | | TCT | 19 | 23.699 | | | | | | | | | | TCG |
| GTT_S_ | V_S_Q | AGC | 8 | 19.831 | 5 | 47.7823 | 43.2931049 | 3.93439009 | 3.222565407 | 176 | 1.40721580 | 3.6:GTTAG | 1.7:GTTTC | TCT |
| CAA | | AGT | 8 | 28.724 | | 9160868 | 1250396 | 6586785e- | 435378e-08 | | 64731262 | TCAA | TCAA | TCA |
| | | TCA | 38 | 36.824 | | 709 | | 09 | | | | | | TCC |
| | | TCC | 27 | 27.635 | | | | | | | | | | TCG |
| | | TCG | 18 | 17.152 | | | | | | | | | | AGT |
| | | TCT | 77 | 45.835 | | | | | | | | | | AGC |
| GTT_V_ | V_V_V | GTA | 10 | 30.985 | 3 | 41.4987 | 36.5356807 | 5.12545505 | 5.769121821 | 144 | 1.54906244 | 3.1:GTTGT | 1.5:GTTGT | GTT |
| GTT | | GTC | 38 | 29.013 | | 3520874 | 0599182 | 5341179e- | 0815245e-08 | | 78088684 | AGTT | TGTT | GTC |
| | | GTG | 14 | 28.247 | | 134 | | 09 | | | | | | GTG |
| | | GTT | 82 | 55.755 | | | | | | | | | | GTA |
| TAC_L_ | Y_L_N | CTA | 15 | 17.135 | 5 | 33.6315 | 40.9261924 | 2.81892863 | 9.710483875 | 121 | 1.52964890 | 3.1:TACCT | 3.0:TACCT | TTG |
| AAC | | CTC | 21 | 6.987 | | 1240578 | 8605032 | 5794649e- | 301592e-08 | | 0518691 | TAAC | CAAC | TTA |
| | | CTG | 11 | 13.687 | | 756 | | 06 | | | | | | CTC |
| | | CTT | 5 | 15.542 | | | | | | | | | | CTA |
| | | TTA | 25 | 33.393 | | | | | | | | | | CTG |
| | | TTG | 44 | 34.257 | | | | | | | | | | CTT |
| TAC_L_ | Y_L_I | CTA | 10 | 16.285 | 5 | 35.0567 | 55.6486309 | 1.46588562 | 9.599518678 | 115 | 1.52797719 | 1.6:TACCT | 3.8:TACCT | TTG |
| ATT | | CTC | 25 | 6.641 | | 9747331 | 67602884 | 15437001e- | 454947e-11 | | 11311428 | AATT | CATT | TTA |
| | | CTG | 13 | 13.009 | | 85 | | 06 | | | | | | CTC |
| | | CTT | 11 | 14.771 | | | | | | | | | | CTG |
| | | TTA | 25 | 31.737 | | | | | | | | | | CTT |
| | | TTG | 31 | 32.558 | | | | | | | | | | CTA |
| TAC_L_ | Y_L_A | CTA | 4 | 8.780 | 5 | 32.0972 | 47.1103197 | 5.68345665 | 5.394716003 | 62 | 2.00090523 | 2.2:TACCT | 3.4:TACCT | CTG |
| GCC | | CTC | 3 | 3.580 | | 8017628 | 17476806 | 8500531e- | 67274e-09 | | 08831943 | AGCC | GGCC | TTG |
| | | CTG | 24 | 7.013 | | 348 | | 06 | | | | | | TTA |
| | | CTT | 5 | 7.963 | | | | | | | | | | CTT |
| | | TTA | 13 | 17.110 | | | | | | | | | | CTA |
| | | TTG | 13 | 17.553 | | | | | | | | | | CTC |
| TAC_R_ | Y_R_Q | AGA | 12 | 20.388 | 5 | 70.1913 | 193.016690 | 9.35013645 | 8.849153921 | 43 | 4.16389469 | 2.9:TACCG | 11.1:TACC | CGG |
| CAG | | AGG | 5 | 9.327 | | 2352012 | 5092189 | 6009449e- | 666536e-40 | | 5873348 | ACAG | GGCAG | AGA |
| | | CGA | 1 | 2.936 | | 554 | | 14 | | | | | | AGG |
| | | CGC | 2 | 2.545 | | | | | | | | | | CGT |
| | | CGG | 20 | 1.795 | | | | | | | | | | CGC |
| | | CGT | 3 | 6.009 | | | | | | | | | | CGA |
| TAC_V_ | Y_V_K | GTA | 14 | 20.011 | 3 | 40.9187 | 50.4935922 | 6.80393068 | 6.271520952 | 93 | 1.95125712 | 1.9:TACGT | 2.5:TACGT | GTC |
| AAG | | GTC | 46 | 18.737 | | 3593037 | 26428305 | 860455e-09 | 670566e-11 | | 53893651 | TAAG | CAAG | GTT |
| | | GTG | 14 | 18.243 | | 35 | | | | | | | | GTG |
| | | GTT | 19 | 36.009 | | | | | | | | | | GTA |
| TAC_V_ | Y_V_G | GTA | 1 | 7.531 | 3 | 47.3802 | 60.8935405 | 2.88500115 | 3.787263014 | 35 | 3.21998737 | 7.5:TACGT | 3.6:TACGT | GTG |
| GGG | | GTC | 5 | 7.052 | | 2335708 | 47705456 | 7653471e- | 2059145e-13 | | 3685222 | AGGG | GGGG | GTC |
| | | GTG | 25 | 6.866 | | 0254 | | 10 | | | | | | GTT |
| | | GTT | 4 | 13.552 | | | | | | | | | | GTA |
| TAT_G_ | Y_G_F | GGA | 28 | 19.462 | 3 | 47.1818 | 56.5589479 | 3.17940819 | 3.191948204 | 87 | 2.04216001 | 2.3:TATGG | 2.9:TATGG | GGG |
| TTT | | GGC | 11 | 17.202 | | 5542076 | 88501004 | 54786863e- | 8620995e-12 | | 97448178 | TTTT | GTTT | GGA |
| | | GGG | 31 | 10.806 | | 27 | | 10 | | | | | | GGT |
| | | GGT | 17 | 39.530 | | | | | | | | | | GGC |
| TAT_L_ | Y_L_K | CTA | 21 | 35.968 | 5 | 70.7429 | 77.6953845 | 7.17777493 | 2.545258500 | 254 | 1.68221815 | 1.8:TATCT | 1.9:TATTT | TTG |
| AAA | | CTC | 15 | 14.668 | | 5451005 | 8864996 | 2180903e- | 4839572e-15 | | 06113123 | TAAA | GAAA | TTA |
| | | CTG | 22 | 28.732 | | 89 | | 14 | | | | | | CTG |
| | | CTT | 18 | 32.624 | | | | | | | | | | CTA |
| | | TTA | 44 | 70.097 | | | | | | | | | | CTT |
| | | TTG | 134 | 71.911 | | | | | | | | | | CTC |
| TAT_L_ | Y_L_L | CTA | 32 | 25.914 | 5 | 39.9613 | 47.2024715 | 1.52044148 | 5.166284444 | 183 | 1.51564269 | 2.1:TATCT | 2.2:TATCT | CTT |
| TTA | | CTC | 5 | 10.568 | | 0412709 | 5831482 | 40524406e- | 295324e-09 | | 3748388 | CTTA | TTTA | TTA |
| | | CTG | 18 | 20.701 | | 6966 | | 07 | | | | | | TTG |
| | | CTT | 52 | 23.505 | | | | | | | | | | CTA |
| | | TTA | 43 | 50.503 | | | | | | | | | | CTG |
| | | TTG | 33 | 51.810 | | | | | | | | | | CTC |
| TAT_L_ | Y_L_L | CTA | 17 | 22.374 | 5 | 51.7233 | 67.5096070 | 6.14744520 | 3.376717529 | 158 | 1.65744236 | 2.0:TATCT | 2.7:TATCT | CTT |
| TTG | | CTC | 9 | 9.124 | | 9407645 | 0542092 | 35903e-10 | 082173e-13 | | 55628092 | GTTG | TTTG | TTA |
| | | CTG | 9 | 17.873 | | 0376 | | | | | | | | TTG |
| | | CTT | 54 | 20.294 | | | | | | | | | | CTA |
| | | TTA | 40 | 43.604 | | | | | | | | | | CTG |
| | | TTG | 29 | 44.732 | | | | | | | | | | CTC |
| TAT_R_ | Y_R_R | AGA | 9 | 16.121 | 5 | 62.4966 | 178.604979 | 3.70087062 | 1.062562989 | 34 | 4.77826953 | 2.4:TATCG | 12.0:TATC | CGG |
| AGG | | AGG | 4 | 7.375 | | 5270561 | 88719342 | 0526198e- | 0951137e-36 | | 6436087 | TAGG | GGAGG | AGA |
| | | CGA | 1 | 2.322 | | 325 | | 12 | | | | | | AGG |
| | | CGC | 1 | 2.012 | | | | | | | | | | CGT |
| | | CGG | 17 | 1.419 | | | | | | | | | | CGC |
| | | CGT | 2 | 4.751 | | | | | | | | | | CGA |
| TAT_R_ | Y_R_G | AGA | 14 | 20.862 | 5 | 36.6155 | 49.5782841 | 7.15197104 | 1.690337264 | 44 | 2.40617410 | 3.7:TATCG | 3.6:TATCG | CGT |
| GGT | | AGG | 4 | 9.544 | | 5219825 | 162998 | 4596863e- | 399712e-09 | | 06968376 | GGGT | TGGT | AGA |
| | | CGA | 1 | 3.005 | | 4825 | | 07 | | | | | | AGG |
| | | CGC | 3 | 2.604 | | | | | | | | | | CGC |
| | | CGG | 0 | 1.837 | | | | | | | | | | CGA |
| | | CGT | 22 | 6.149 | | | | | | | | | | CGG |
| TCA_G_ | S_G_F | GGA | 30 | 17.896 | 3 | 38.7790 | 42.0967495 | 1.93312260 | 3.826865080 | 80 | 1.96243844 | 2.4:TCAGG | 2.4:TCAG | GGA |
| TTT | | GGC | 11 | 15.818 | | 9978368 | 48570216 | 11735558e- | 372529e-09 | | 19829708 | TTTT | GGTTT | GGG |
| | | GGG | 24 | 9.937 | | 406 | | 08 | | | | | | GGT |
| | | GGT | 15 | 36.349 | | | | | | | | | | GGC |
| TCA_Q_ | S_Q_P | CAA | 7 | 20.491 | 1 | 25.5918 | 28.0216462 | 4.21815554 | 1.199659913 | 30 | 2.52884244 | 2.9:TCACA | 2.4:TCACA | CAG |
| CCC | | CAG | 23 | 9.509 | | 5780192 | 85845698 | 24973535e- | 953086e-07 | | 2421435 | ACCC | GCCC | CAA |
| | | | | | | 854 | | 07 | | | | | | |
| TCA_S_ | S_S_E | AGC | 15 | 12.732 | 5 | 35.3161 | 42.2468159 | 1.30111484 | 5.250374298 | 113 | 1.64240123 | 2.5:TCATC | 2.6:TCATC | TCG |
| GAG | | AGT | 24 | 18.442 | | 6893670 | 902739 | 05826479e- | 146105e-08 | | 88111595 | CGAG | GGAG | AGT |
| | | TCA | 17 | 23.642 | | 865 | | 06 | | | | | | TCT |
| | | TCC | 7 | 17.743 | | | | | | | | | | TCA |
| | | TCG | 29 | 11.012 | | | | | | | | | | AGC |
| | | TCT | 21 | 29.428 | | | | | | | | | | TCC |
| TCC_E_ | S_E_R | GAA | 1 | 11.881 | 1 | 31.5182 | 33.0939472 | 1.97572136 | 8.781165129 | 17 | 3.38102034 | 11.9:TCCG | 3.1:TCCGA | GAG |
| CGC | | GAG | 16 | 5.119 | | 7401549 | 7018711 | 0484395e- | 057818e-09 | | 13039535 | AACGC | GCGC | GAA |
| | | | | | | 2725 | | 08 | | | | | | |
| TCC_L_ | S_L_F | CTA | 4 | 9.488 | 5 | 32.3366 | 41.8489276 | 5.09557478 | 6.319926037 | 67 | 1.97079272 | 2.4:TCCCT | 2.9:TCCCT | CTT |
| TTC | | CTC | 7 | 3.869 | | 0245862 | 0121851 | 9706772e- | 540431e-08 | | 24559953 | ATTC | TTTC | TTA |
| | | CTG | 4 | 7.579 | | 461 | | 06 | | | | | | TTG |
| | | CTT | 25 | 8.606 | | | | | | | | | | CTC |
| | | TTA | 15 | 18.490 | | | | | | | | | | CTG |
| | | TTG | 12 | 18.969 | | | | | | | | | | CTA |
| TCC_N_ | S_N_T | AAC | 86 | 46.821 | 1 | 54.4477 | 54.9720272 | 1.59634277 | 1.222574974 | 116 | 1.94807455 | 2.3:TCCAA | 1.8:TCCAA | AAC |
| ACT | | AAT | 30 | 69.179 | | 7578808 | 77662484 | 55078095e- | 7552338e-13 | | 6280247 | TACT | CACT | AAT |
| | | | | | | 6105 | | 13 | | | | | | |
| TCC_S_ | S_S_T | AGC | 97 | 27.154 | 5 | 146.082 | 210.882214 | 9.10272792 | 1.332144082 | 241 | 2.05814356 | 2.3:TCCTC | 3.6:TCCAG | AGC |
| ACT | | AGT | 18 | 39.332 | | 5968322 | 31999523 | 3224158e- | 319934e-43 | | 82482203 | AACT | CACT | TCT |
| | | TCA | 22 | 50.423 | | 254 | | 30 | | | | | | TCC |
| | | TCC | 30 | 37.841 | | | | | | | | | | TCA |
| | | TCG | 18 | 23.486 | | | | | | | | | | TCG |
| | | TCT | 56 | 62.763 | | | | | | | | | | AGT |
| TCC_S_ | S_S_E | AGC | 23 | 18.366 | 5 | 34.0534 | 38.0150109 | 2.32332123 | 3.747130933 | 163 | 1.50275837 | 2.1:TCCTC | 2.0:TCCAG | AGT |
| GAA | | AGT | 53 | 26.602 | | 9753951 | 5243964 | 16805244e- | 309858e-07 | | 22429758 | CGAA | TGAA | TCT |
| | | TCA | 26 | 34.104 | | 111 | | 06 | | | | | | TCA |
| | | TCC | 12 | 25.594 | | | | | | | | | | AGC |
| | | TCG | 13 | 15.885 | | | | | | | | | | TCG |
| | | TCT | 36 | 42.450 | | | | | | | | | | TCC |
| TCG_A_ | S_A_T | GCA | 7 | 6.778 | 3 | 30.8974 | 40.8812377 | 8.93376790 | 6.929669219 | 23 | 2.53951828 | 10.3:TCGG | 4.6:TCGGC | GCG |
| ACG | | GCC | 0 | 5.138 | | 5124799 | 67981865 | 2277777e- | 6948315e-09 | | 7886255 | CCACG | GACG | GCA |
| | | GCG | 12 | 2.630 | | 2162 | | 07 | | | | | | GCT |
| | | GCT | 4 | 8.454 | | | | | | | | | | GCC |
| TCG_S_ | S_S_R | AGC | 23 | 6.310 | 5 | 52.9653 | 63.8064891 | 3.41883439 | 1.981379944 | 56 | 2.26159981 | 7.3:TCGTC | 3.6:TCGA | AGC |
| AGA | | AGT | 3 | 9.139 | | 8762469 | 8303538 | 8338685e- | 7720155e-12 | | 2394971 | TAGA | GCAGA | TCA |
| | | TCA | 12 | 11.717 | | 922 | | 10 | | | | | | TCG |
| | | TCC | 6 | 8.793 | | | | | | | | | | TCC |
| | | TCG | 10 | 5.457 | | | | | | | | | | AGT |
| | | TCT | 2 | 14.584 | | | | | | | | | | TCT |
| TCG_T_ | S_T_Y | ACA | 2 | 8.509 | 3 | 49.2021 | 77.0837532 | 1.18140396 | 1.295464308 | 28 | 4.24934636 | 5.9:TCGAC | 5.1:TCGAC | ACG |
| TAC | | ACC | 1 | 5.932 | | 2510651 | 6896265 | 41251486e- | 8977584e-16 | | 2217466 | CTAC | GTAC | ACT |
| | | ACG | 20 | 3.927 | | 1545 | | 10 | | | | | | ACA |
| | | ACT | 5 | 9.631 | | | | | | | | | | ACC |
| TCT_F_ | S_F_K | TTC | 53 | 31.272 | 1 | 24.9792 | 25.4214856 | 5.79519015 | 4.607577625 | 77 | 1.75781114 | 1.9:TCTTT | 1.7:TCTTT | TTC |
| AAG | | TTT | 24 | 45.728 | | 0815209 | 56680723 | 0287654e- | 955305e-07 | | 45100537 | TAAG | CAAG | TTT |
| | | | | | | 4458 | | 07 | | | | | | |
| TCT_L_ | S_L_K | CTA | 30 | 43.049 | 5 | 75.6152 | 76.0780217 | 6.92147569 | 5.540965637 | 304 | 1.52782126 | 3.3:TCTCT | 1.7:TCTTT | TTG |
| AAA | | CTC | 17 | 17.555 | | 7406230 | 6943991 | 20665014e- | 349504e-15 | | 28931913 | TAAA | GAAA | TTA |
| | | CTG | 22 | 34.388 | | 785 | | 15 | | | | | | CTA |
| | | CTT | 12 | 39.047 | | | | | | | | | | CTG |
| | | TTA | 73 | 83.896 | | | | | | | | | | CTC |
| | | TTG | 150 | 86.066 | | | | | | | | | | CTT |
| TCT_L_ | S_L_K | CTA | 17 | 34.694 | 5 | 60.0825 | 52.5598094 | 1.16862051 | 4.141205080 | 245 | 1.46064057 | 3.9:TCTCT | 1.5:TCTTT | TTG |
| AAG | | CTC | 19 | 14.148 | | 8349875 | 25167145 | 59576313e- | 326172e-10 | | 01309122 | TAAG | GAAG | TTA |
| | | CTG | 17 | 27.714 | | 6314 | | 11 | | | | | | CTC |
| | | CTT | 8 | 31.469 | | | | | | | | | | CTG |
| | | TTA | 79 | 67.613 | | | | | | | | | | CTA |
| | | TTG | 105 | 69.363 | | | | | | | | | | CTT |
| TCT_R_ | S_R_T | AGA | 11 | 22.285 | 5 | 64.8092 | 142.816223 | 1.22764015 | 4.507404819 | 47 | 3.61096856 | 2.2:TCTCG | 7.9:TCTCG | CGC |
| ACA | | AGG | 6 | 10.194 | | 3712072 | 94465973 | 27124713e- | 6408696e-29 | | 7172898 | TACA | CACA | AGA |
| | | CGA | 4 | 3.209 | | 044 | | 12 | | | | | | AGG |
| | | CGC | 22 | 2.782 | | | | | | | | | | CGA |
| | | CGG | 1 | 1.962 | | | | | | | | | | CGT |
| | | CGT | 3 | 6.568 | | | | | | | | | | CGG |
| TCT_R_ | S_R_G | AGA | 14 | 22.285 | 5 | 34.3717 | 46.7680147 | 2.00775683 | 6.334996410 | 47 | 2.42861200 | 3.2:TCTCG | 3.3:TCTCG | CGT |
| GGT | | AGG | 5 | 10.194 | | 8608960 | 3594018 | 11523777e- | 659402e-09 | | 5147134 | AGGT | TGGT | AGA |
| | | CGA | 1 | 3.209 | | 736 | | 06 | | | | | | AGG |
| | | CGC | 1 | 2.782 | | | | | | | | | | CGG |
| | | CGG | 4 | 1.962 | | | | | | | | | | CGC |
| | | CGT | 22 | 6.568 | | | | | | | | | | CGA |
| TCT_S_ | S_S_P | AGC | 4 | 19.943 | 5 | 75.2369 | 64.2424150 | 8.30177517 | 1.609188337 | 177 | 1.65820733 | 5.0:TCTAG | 1.7:TCTTC | TCT |
| CCA | | AGT | 7 | 28.887 | | 3891077 | 3222692 | 8770996e- | 6118733e-12 | | 32926326 | CCCA | ACCA | TCA |
| | | TCA | 62 | 37.033 | | 01 | | 15 | | | | | | TCG |
| | | TCC | 14 | 27.792 | | | | | | | | | | TCC |
| | | TCG | 24 | 17.249 | | | | | | | | | | AGT |
| | | TCT | 66 | 46.096 | | | | | | | | | | AGC |
| TCT_S_ | S_S_A | AGC | 5 | 26.929 | 5 | 78.7935 | 79.4383037 | 1.50033169 | 1.099894043 | 239 | 1.61693720 | 5.4:TCTAG | 1.9:TCTTC | TCT |
| GCT | | AGT | 29 | 39.005 | | 1923904 | 067868 | 37091926e- | 6380759e-15 | | 94205763 | CGCT | TGCT | TCA |
| | | TCA | 37 | 50.005 | | 187 | | 15 | | | | | | TCC |
| | | TCC | 35 | 37.527 | | | | | | | | | | AGT |
| | | TCG | 14 | 23.291 | | | | | | | | | | TCG |
| | | TCT | 119 | 62.243 | | | | | | | | | | AGC |
| TCT_S_ | S_S_S | AGC | 22 | 40.562 | 5 | 50.6429 | 45.8168118 | 1.02348603 | 9.896384239 | 360 | 1.33913152 | 2.3:TCTAG | 1.3:TCTTC | TCT |
| TCA | | AGT | 26 | 58.753 | | 6245551 | 8163625 | 7530684e- | 150334e-09 | | 19063376 | TTCA | TTCA | TCA |
| | | TCA | 100 | 75.321 | | 4024 | | 09 | | | | | | TCC |
| | | TCC | 51 | 56.527 | | | | | | | | | | TCG |
| | | TCG | 36 | 35.083 | | | | | | | | | | AGT |
| | | TCT | 125 | 93.754 | | | | | | | | | | AGC |
| TCT_S_ | S_S_S | AGC | 30 | 54.872 | 5 | 110.804 | 100.865597 | 2.77000196 | 3.472153887 | 487 | 1.43885377 | 3.2:TCTAG | 1.6:TCTTC | TCT |
| TCT | | AGT | 25 | 79.479 | | 4423066 | 6976273 | 06508943e- | 053695e-20 | | 90906994 | TTCT | TTCT | TCC |
| | | TCA | 100 | 101.893 | | 365 | | 22 | | | | | | TCA |
| | | TCC | 101 | 76.468 | | | | | | | | | | TCG |
| | | TCG | 33 | 47.459 | | | | | | | | | | AGC |
| | | TCT | 198 | 126.829 | | | | | | | | | | AGT |
| TGC_A_ | C_A_D | GCA | 1 | 2.358 | 3 | 18.6989 | 32.1225537 | 0.00031551 | 4.931281339 | 8 | 5.22125200 | 3.6:TGCGC | 6.6:TGCGC | GCG |
| GAC | | GCC | 0 | 1.787 | | 4872271 | 95303546 | 5564549174 | 292999e-07 | | 3058486 | CGAC | GGAC | GCT |
| | | GCG | 6 | 0.915 | | 2714 | | 65 | | | | | | GCA |
| | | GCT | 1 | 2.940 | | | | | | | | | | GCC |
| TGC_R_ | C_R_E | AGA | 6 | 16.595 | 5 | 63.2793 | 173.713173 | 2.54795835 | 1.176820046 | 35 | 4.39316281 | 2.8:TGCAG | 11.6:TGCC | CGG |
| GAA | | AGG | 5 | 7.592 | | 7562986 | 08106347 | 6190585e- | 0722038e-35 | | 07751886 | AGAA | GGGAA | AGA |
| | | CGA | 2 | 2.390 | | 283 | | 12 | | | | | | AGG |
| | | CGC | 1 | 2.072 | | | | | | | | | | CGT |
| | | CGG | 17 | 1.461 | | | | | | | | | | CGA |
| | | CGT | 4 | 4.891 | | | | | | | | | | CGC |
| TGC_S_ | C_S_S | AGC | 21 | 4.056 | 5 | 48.9000 | 80.8798891 | 2.32613018 | 5.492143473 | 36 | 3.45265139 | 5.9:TGCAG | 5.2:TGCA | AGC |
| AGT | | AGT | 1 | 5.875 | | 4726534 | 0665548 | 8031796e- | 505034e-16 | | 7340153 | TAGT | GCAGT | TCT |
| | | TCA | 4 | 7.532 | | 075 | | 09 | | | | | | TCA |
| | | TCC | 3 | 5.653 | | | | | | | | | | TCG |
| | | TCG | 3 | 3.508 | | | | | | | | | | TCC |
| | | TCT | 4 | 9.375 | | | | | | | | | | AGT |
| TGG_A_ | W_A_A | GCA | 6 | 10.609 | 3 | 32.6388 | 52.9360075 | 3.83813989 | 1.891868904 | 36 | 2.77920713 | 2.0:TGGGC | 4.4:TGGG | GCG |
| GCA | | GCC | 4 | 8.043 | | 1574338 | 7842901 | 7941649e- | 0902343e-11 | | 46381246 | CGCA | CGGCA | GCT |
| | | GCG | 18 | 4.116 | | 3695 | | 07 | | | | | | GCA |
| | | GCT | 8 | 13.232 | | | | | | | | | | GCC |
| TGG_G_ | W_G_F | GGA | 4 | 10.514 | 3 | 25.3568 | 32.3939531 | 1.30028661 | 4.322641067 | 47 | 1.80890026 | 2.6:TGGG | 3.1:TGGG | GGT |
| TTC | | GGC | 4 | 9.293 | | 0909962 | 0215945 | 28092507e- | 3959026e-07 | | 38868865 | GATTC | GGTTC | GGG |
| | | GGG | 18 | 5.838 | | 3334 | | 05 | | | | | | GGC |
| | | GGT | 21 | 21.355 | | | | | | | | | | GGA |
| TGG_S_ | W_S_N | AGC | 23 | 7.324 | 5 | 31.2160 | 41.6514078 | 8.49046515 | 6.928907808 | 65 | 1.87236374 | 2.4:TGGTC | 3.1:TGGA | AGC |
| AAC | | AGT | 8 | 10.608 | | 9775660 | 8396645 | 0773429e- | 577932e-08 | | 3393983 | TAAC | GCAAC | TCA |
| | | TCA | 12 | 13.600 | | 7642 | | 06 | | | | | | TCG |
| | | TCC | 7 | 10.206 | | | | | | | | | | AGT |
| | | TCG | 8 | 6.334 | | | | | | | | | | TCT |
| | | TCT | 7 | 16.928 | | | | | | | | | | TCC |
| TGG_T_ | W_T_A | ACA | 8 | 12.764 | 3 | 31.0376 | 45.3108236 | 8.34665017 | 7.947062273 | 42 | 2.46351994 | 2.1:TGGAC | 3.6:TGGA | ACG |
| GCA | | ACC | 6 | 8.898 | | 6758718 | 8844089 | 1987353e- | 862598e-10 | | 45135227 | TGCA | CGGCA | ACA |
| | | ACG | 21 | 5.891 | | 3346 | | 07 | | | | | | ACT |
| | | ACT | 7 | 14.446 | | | | | | | | | | ACC |
| TGT_A_ | C_A_L | GCA | 5 | 9.136 | 3 | 24.8570 | 36.3894730 | 1.65400695 | 6.194864626 | 31 | 2.31599703 | 3.5:TGTGC | 3.9:TGTGC | GCG |
| CTT | | GCC | 2 | 6.926 | | 9567496 | 1737206 | 17194634e- | 477173e-08 | | 41988108 | CCTT | GCTT | GCT |
| | | GCG | 14 | 3.544 | | 1563 | | 05 | | | | | | GCA |
| | | GCT | 10 | 11.394 | | | | | | | | | | GCC |
| TGT_G_ | C_G_S | GGA | 3 | 9.172 | 3 | 30.6265 | 39.2950791 | 1.01874076 | 1.502966458 | 41 | 2.45261943 | 3.1:TGTGG | 3.0:TGTGG | GGC |
| TCC | | GGC | 24 | 8.107 | | 3952198 | 0807935 | 03757552e- | 2441697e-08 | | 0527976 | ATCC | CTCC | GGT |
| | | GGG | 3 | 5.093 | | 6846 | | 06 | | | | | | GGG |
| | | GGT | 11 | 18.629 | | | | | | | | | | GGA |
| TGT_N_ | C_N_D | AAC | 40 | 21.796 | 1 | 25.2469 | 25.4937517 | 5.04395006 | 4.438179152 | 54 | 1.94586983 | 2.3:TGTAA | 1.8:TGTAA | AAC |
| GAT | | AAT | 14 | 32.204 | | 4115866 | 17738327 | 4668597e- | 4621746e-07 | | 29389332 | TGAT | CGAT | AAT |
| | | | | | | 0594 | | 07 | | | | | | |
| TGT_P_ | C_P_V | CCA | 6 | 11.407 | 3 | 24.5786 | 35.1338941 | 1.89120704 | 1.141424068 | 28 | 2.75221050 | 2.2:TGTCC | 3.6:TGTCC | CCC |
| GTT | | CCC | 16 | 4.494 | | 1704168 | 0984883 | 5539058e- | 7422168e-07 | | 50617385 | TGTT | CGTT | CCA |
| | | CCG | 2 | 3.442 | | 6204 | | 05 | | | | | | CCT |
| | | CCT | 4 | 8.657 | | | | | | | | | | CCG |
| TGT_P_ | C_P_S | CCA | 5 | 12.222 | 3 | 34.4371 | 49.9896489 | 1.60187264 | 8.029834703 | 30 | 3.20549702 | 3.7:TGTCC | 3.9:TGTCC | CCC |
| TCA | | CCC | 19 | 4.815 | | 3289291 | 594401 | 0677404e- | 862732e-11 | | 19154844 | GTCA | CTCA | CCT |
| | | CCG | 1 | 3.688 | | 87 | | 07 | | | | | | CCA |
| | | CCT | 5 | 9.275 | | | | | | | | | | CCG |
| TTA_A_ | L_A_R | GCA | 61 | 30.354 | 3 | 40.8351 | 44.9589155 | 7.08729146 | 9.440606649 | 103 | 1.87474295 | 2.0:TTAGC | 2.0:TTAGC | GCA |
| AGA | | GCC | 13 | 23.011 | | 7967386 | 03477066 | 77819425e- | 688654e-10 | | 88029303 | TAGA | AAGA | GCT |
| | | GCG | 10 | 11.776 | | 081 | | 09 | | | | | | GCC |
| | | GCT | 19 | 37.859 | | | | | | | | | | GCG |
| TTA_A_ | L_A_F | GCA | 47 | 28.291 | 3 | 36.2851 | 36.5162052 | 6.51764067 | 5.824100243 | 96 | 1.80741571 | 2.4:TTAGC | 1.9:TTAGC | GCA |
| TTT | | GCC | 13 | 21.447 | | 6518844 | 512956 | 4333993e- | 005351e-08 | | 75741081 | TTTT | GTTT | GCG |
| | | GCG | 21 | 10.976 | | 6044 | | 08 | | | | | | GCT |
| | | GCT | 15 | 35.286 | | | | | | | | | | GCC |
| TTA_C_ | L_C_K | TGC | 33 | 15.058 | 1 | 33.9960 | 34.2869220 | 5.52227462 | 4.755668080 | 40 | 2.38615241 | 3.6:TTATG | 2.2:TTATG | TGC |
| AAG | | TGT | 7 | 24.942 | | 9659358 | 4615614 | 45917235e- | 085938e-09 | | 42715838 | TAAG | CAAG | TGT |
| | | | | | | 874 | | 09 | | | | | | |
| TTA_F_ | L_F_K | TTC | 72 | 45.080 | 1 | 26.4838 | 27.0686833 | 2.65755415 | 1.963532405 | 111 | 1.62926625 | 1.7:TTATT | 1.6:TTATT | TTC |
| AAA | | TTT | 39 | 65.920 | | 1491505 | 88094897 | 453881e-07 | 815934e-07 | | 28808823 | TAAA | CAAA | TTT |
| | | | | | | 5326 | | | | | | | | |
| TTA_G_ | L_G_H | GGA | 11 | 14.988 | 3 | 26.1885 | 33.4565434 | 8.70865261 | 2.580048313 | 67 | 1.80881277 | 1.8:TTAGG | 2.8:TTAGG | GGG |
| CAT | | GGC | 16 | 13.248 | | 3552930 | 3673933 | 0755225e- | 3649597e-07 | | 51575809 | TCAT | GCAT | GGT |
| | | GGG | 23 | 8.322 | | 868 | | 06 | | | | | | GGC |
| | | GGT | 17 | 30.442 | | | | | | | | | | GGA |
| TTA_I_ | L_I_N | ATA | 29 | 35.671 | 2 | 33.3706 | 37.5348022 | 5.67090303 | 7.070029989 | 128 | 1.65652332 | 1.6:TTAAT | 1.9:TTAAT | ATC |
| AAC | | ATC | 63 | 33.049 | | 6474554 | 3037545 | 89063374e- | 944562e-09 | | 83083847 | TAAC | CAAC | ATT |
| | | ATT | 36 | 59.281 | | 632 | | 08 | | | | | | ATA |
| TTA_I_ | L_I_K | ATA | 43 | 42.916 | 2 | 36.2301 | 38.2981016 | 1.35744235 | 4.826950982 | 154 | 1.51901420 | 1.8:TTAAT | 1.8:TTAAT | ATC |
| AAG | | ATC | 71 | 39.762 | | 5686998 | 7056091 | 65225935e- | 004029e-09 | | 28988018 | TAAG | CAAG | ATA |
| | | ATT | 40 | 71.322 | | 954 | | 08 | | | | | | ATT |
| TTA_P_ | L_P_R | CCA | 50 | 27.296 | 3 | 34.0965 | 32.7436822 | 1.89033174 | 3.647596119 | 67 | 1.91351802 | 5.4:TTACC | 1.8:TTACC | CCA |
| AGA | | CCC | 2 | 10.753 | | 7108606 | 538446 | 73552026e- | 0134545e-07 | | 95466208 | CAGA | AAGA | CCT |
| | | CCG | 4 | 8.236 | | 025 | | 07 | | | | | | CCG |
| | | CCT | 11 | 20.715 | | | | | | | | | | CCC |
| TTC_E_ | F_E_L | GAA | 5 | 18.171 | 1 | 28.5367 | 31.7044460 | 9.19383870 | 1.795107781 | 26 | 2.84364100 | 3.6:TTCGA | 2.7:TTCGA | GAG |
| CTC | | GAG | 21 | 7.829 | | 1690703 | 12241654 | 8134858e- | 2211043e-08 | | 32265607 | ACTC | GCTC | GAA |
| | | | | | | 8894 | | 08 | | | | | | |
| TTC_F_ | F_F_N | TTC | 67 | 37.770 | 1 | 37.6288 | 38.0911185 | 8.55681413 | 6.751675963 | 93 | 1.86557392 | 2.1:TTCTT | 1.8:TTCTT | TTC |
| AAT | | TTT | 26 | 55.230 | | 8027655 | 3996725 | 3533808e- | 71414e-10 | | 81473795 | TAAT | CAAT | TTT |
| | | | | | | 161 | | 10 | | | | | | |
| TTC_G_ | F_G_A | GGA | 2 | 4.474 | 3 | 33.8350 | 51.6750946 | 2.14655683 | 3.512767454 | 20 | 3.68998155 | 7.9:TTCGG | 5.2:TTCGG | GGG |
| GCG | | GGC | 0 | 3.955 | | 6411344 | 9643036 | 11012522e- | 530547e-11 | | 1622438 | CGCG | GGCG | GGT |
| | | GGG | 13 | 2.484 | | 2726 | | 07 | | | | | | GGA |
| | | GGT | 5 | 9.087 | | | | | | | | | | GGC |
| TTC_G_ | F_G_G | GGA | 7 | 21.251 | 3 | 44.4974 | 40.0992283 | 1.18322660 | 1.015132998 | 95 | 1.77414397 | 5.9:TTCGG | 1.7:TTCGG | GGT |
| GGT | | GGC | 13 | 18.784 | | 1056912 | 2888957 | 05756333e- | 0811976e-08 | | 06281443 | GGGT | TGGT | GGC |
| | | GGG | 2 | 11.800 | | 764 | | 09 | | | | | | GGA |
| | | GGT | 73 | 43.165 | | | | | | | | | | GGG |
| TTC_I_ | F_I_K | ATA | 24 | 35.113 | 2 | 45.2725 | 52.3500789 | 1.47639006 | 4.288691432 | 126 | 1.85176335 | 1.7:TTCAT | 2.1:TTCAT | ATC |
| AAG | | ATC | 68 | 32.532 | | 0192802 | 13783285 | 94067783e- | 571085e-12 | | 02341002 | TAAG | CAAG | ATT |
| | | ATT | 34 | 58.355 | | 147 | | 10 | | | | | | ATA |
| TTC_I_ | F_I_N | ATA | 43 | 50.440 | 2 | 29.5640 | 32.7363473 | 3.80404828 | 7.787400148 | 181 | 1.48221997 | 1.4:TTCAT | 1.7:TTCAT | ATC |
| AAT | | ATC | 80 | 46.733 | | 5962526 | 64005475 | 6929706e- | 03845e-08 | | 69326416 | TAAT | CAAT | ATT |
| | | ATT | 58 | 83.827 | | 1585 | | 07 | | | | | | ATA |
| TTC_L_ | F_L_T | CTA | 1 | 5.381 | 5 | 38.1470 | 54.2848923 | 3.52510708 | 1.831450741 | 38 | 2.66766748 | 5.4:TTCCT | 4.2:TTCCT | CTG |
| ACG | | CTC | 4 | 2.194 | | 4043584 | 94110486 | 561456e-07 | 1245249e-10 | | 4060965 | AACG | GACG | TTG |
| | | CTG | 18 | 4.298 | | 1724 | | | | | | | | TTA |
| | | CTT | 1 | 4.881 | | | | | | | | | | CTC |
| | | TTA | 7 | 10.487 | | | | | | | | | | CTT |
| | | TTG | 7 | 10.758 | | | | | | | | | | CTA |
| TTC_L_ | F_L_Y | CTA | 14 | 13.736 | 5 | 46.5566 | 80.9028881 | 6.99542926 | 5.431607692 | 97 | 1.80118387 | 1.6:TTCTT | 4.6:TTCCT | CTC |
| TAT | | CTC | 26 | 5.601 | | 6018864 | 3768674 | 6936029e- | 898021e-16 | | 15847095 | GTAT | CTAT | TTA |
| | | CTG | 9 | 10.972 | | 842 | | 09 | | | | | | TTG |
| | | CTT | 12 | 12.459 | | | | | | | | | | CTA |
| | | TTA | 19 | 26.769 | | | | | | | | | | CTT |
| | | TTG | 17 | 27.462 | | | | | | | | | | CTG |
| TTC_P_ | F_P_I | CCA | 22 | 35.037 | 3 | 35.4273 | 38.7209459 | 9.89568862 | 1.988735819 | 86 | 1.68456016 | 5.3:TTCCC | 2.4:TTCCC | CCC |
| ATT | | CCC | 33 | 13.802 | | 0010436 | 91366946 | 0106094e- | 8520597e-08 | | 64462353 | GATT | CATT | CCT |
| | | CCG | 2 | 10.571 | | 9706 | | 08 | | | | | | CCA |
| | | CCT | 29 | 26.590 | | | | | | | | | | CCG |
| TTC_R_ | F_R_M | AGA | 19 | 27.026 | 5 | 46.0541 | 88.7003047 | 8.85431711 | 1.259749214 | 57 | 2.38538998 | 2.7:TTCCG | 5.9:TTCCG | CGC |
| ATG | | AGG | 9 | 12.364 | | 8355333 | 5527831 | 8710294e- | 4604077e-17 | | 70262225 | TATG | CATG | AGA |
| | | CGA | 3 | 3.892 | | 002 | | 09 | | | | | | AGG |
| | | CGC | 20 | 3.374 | | | | | | | | | | CGT |
| | | CGG | 3 | 2.379 | | | | | | | | | | CGG |
| | | CGT | 3 | 7.965 | | | | | | | | | | CGA |
| TTC_R_ | F_R_V | AGA | 12 | 16.595 | 5 | 32.5447 | 42.5135036 | 4.63367104 | 4.636502643 | 35 | 2.39960762 | 4.8:TTCCG | 3.7:TTCCG | CGT |
| GTC | | AGG | 4 | 7.592 | | 4978769 | 7635169 | 8849248e- | 488522e-08 | | 8861654 | AGTC | TGTC | AGA |
| | | CGA | 0 | 2.390 | | 161 | | 06 | | | | | | AGG |
| | | CGC | 1 | 2.072 | | | | | | | | | | CGC |
| | | CGG | 0 | 1.461 | | | | | | | | | | CGG |
| | | CGT | 18 | 4.891 | | | | | | | | | | CGA |
| TTC_T_ | F_T_T | ACA | 9 | 20.058 | 3 | 40.7702 | 47.0559330 | 7.31556060 | 3.381682703 | 66 | 2.06014548 | 4.6:TTCAC | 2.6:TTCAC | ACC |
| ACC | | ACC | 36 | 13.983 | | 6056501 | 8426324 | 4357518e- | 925989e-10 | | 13568436 | GACC | CACC | ACT |
| | | ACG | 2 | 9.257 | | 424 | | 09 | | | | | | ACA |
| | | ACT | 19 | 22.702 | | | | | | | | | | ACG |
| TTG_A_ | L_A_K | GCA | 43 | 58.055 | 3 | 39.5191 | 45.4823541 | 1.34731836 | 7.307112300 | 197 | 1.54382854 | 1.4:TTGGC | 1.9:TTGGC | GCC |
| AAG | | GCC | 83 | 44.011 | | 4549730 | 3168187 | 3938697e- | 936298e-10 | | 72102897 | TAAG | CAAG | GCT |
| | | GCG | 21 | 22.524 | | 9935 | | 08 | | | | | | GCA |
| | | GCT | 50 | 72.410 | | | | | | | | | | GCG |
| TTG_A_ | L_A_V | GCA | 14 | 12.377 | 3 | 25.4087 | 33.3523008 | 1.26813842 | 2.714085477 | 42 | 2.00698600 | 3.1:TTGGC | 3.3:TTGGC | GCG |
| GTA | | GCC | 3 | 9.383 | | 8108892 | 649378 | 89543812e- | 293427e-07 | | 12089666 | CGTA | GGTA | GCA |
| | | GCG | 16 | 4.802 | | 3718 | | 05 | | | | | | GCT |
| | | GCT | 9 | 15.438 | | | | | | | | | | GCC |
| TTG_F_ | L_F_K | TTC | 61 | 37.364 | 1 | 24.6651 | 25.1776360 | 6.82076081 | 5.228500103 | 92 | 1.67525177 | 1.8:TTGTT | 1.6:TTGTT | TTC |
| AAA | | TTT | 31 | 54.636 | | 1738418 | 00569198 | 8308639e- | 845871e-07 | | 48721272 | TAAA | CAAA | TTT |
| | | | | | | 7177 | | 07 | | | | | | |
| TTG_G_ | L_G_R | GGA | 1 | 3.355 | 3 | 34.7561 | 42.8155522 | 1.37165580 | 2.693218386 | 15 | 4.06706032 | 13.6:TTGG | 4.4:TTGGG | GGC |
| CGA | | GGC | 13 | 2.966 | | 7224641 | 1577901 | 00802107e- | 940242e-09 | | 4824074 | GTCGA | CCGA | GGG |
| | | GGG | 1 | 1.863 | | 847 | | 07 | | | | | | GGA |
| | | GGT | 0 | 6.815 | | | | | | | | | | GGT |
| TTG_G_ | L_G_G | GGA | 9 | 21.922 | 3 | 42.0478 | 35.4101719 | 3.91938603 | 9.978512812 | 98 | 1.63491382 | 12.2:TTGG | 1.6:TTGGG | GGT |
| GGT | | GGC | 16 | 19.377 | | 6106218 | 65722526 | 1094367e- | 181827e-08 | | 89784637 | GGGGT | TGGT | GGC |
| | | GGG | 1 | 12.173 | | 074 | | 09 | | | | | | GGA |
| | | GGT | 72 | 44.528 | | | | | | | | | | GGG |
| TTG_R_ | L_R_R | AGA | 107 | 67.328 | 5 | 59.4187 | 48.8561150 | 1.60261844 | 2.374716094 | 142 | 1.63054105 | 16.8:TTGC | 1.6:TTGAG | AGA |
| AGA | | AGG | 21 | 30.800 | | 1797865 | 53301195 | 75019526e- | 3118415e-09 | | 56867457 | GCAGA | AAGA | AGG |
| | | CGA | 6 | 9.697 | | 251 | | 11 | | | | | | CGA |
| | | CGC | 0 | 8.405 | | | | | | | | | | CGT |
| | | CGG | 3 | 5.927 | | | | | | | | | | CGG |
| | | CGT | 5 | 19.843 | | | | | | | | | | CGC |
| TTG_R_ | L_R_S | AGA | 18 | 26.552 | 5 | 37.4600 | 40.9191316 | 4.84296128 | 9.742424648 | 56 | 2.07448894 | 4.7:TTGCG | 2.6:TTGAG | AGG |
| AGC | | AGG | 31 | 12.147 | | 9684611 | 8825175 | 2457307e- | 89357e-08 | | 7654107 | GAGC | GAGC | AGA |
| | | CGA | 1 | 3.824 | | 054 | | 07 | | | | | | CGC |
| | | CGC | 4 | 3.314 | | | | | | | | | | CGT |
| | | CGG | 0 | 2.337 | | | | | | | | | | CGA |
| | | CGT | 2 | 7.825 | | | | | | | | | | CGG |
| TTG_R_ | L_R_S | AGA | 10 | 24.181 | 5 | 43.1046 | 60.5801279 | 3.51885382 | 9.222113330 | 51 | 2.50617565 | 3.0:TTGCG | 3.6:TTGCG | CGT |
| TCC | | AGG | 8 | 11.062 | | 9646081 | 9335526 | 26854796e- | 92188e-12 | | 4751704 | CTCC | TTCC | AGA |
| | | CGA | 4 | 3.483 | | 573 | | 08 | | | | | | AGG |
| | | CGC | 1 | 3.019 | | | | | | | | | | CGA |
| | | CGG | 2 | 2.129 | | | | | | | | | | CGG |
| | | CGT | 26 | 7.127 | | | | | | | | | | CGC |
| TTG_S_ | L_S_K | AGC | 54 | 28.957 | 5 | 52.2399 | 56.6307482 | 4.81675865 | 6.025369190 | 257 | 1.53348458 | 2.1:TTGTC | 1.9:TTGAG | AGT |
| AAA | | AGT | 69 | 41.943 | | 5312212 | 023017 | 5050081e- | 305502e-11 | | 85040287 | GAAA | CAAA | AGC |
| | | TCA | 43 | 53.771 | | 2024 | | 10 | | | | | | TCT |
| | | TCC | 35 | 40.354 | | | | | | | | | | TCA |
| | | TCG | 12 | 25.045 | | | | | | | | | | TCC |
| | | TCT | 44 | 66.930 | | | | | | | | | | TCG |
| TTG_S_ | L_S_R | AGC | 16 | 3.042 | 5 | 41.7826 | 64.0050657 | 6.51822453 | 1.802226337 | 27 | 3.29917346 | 8.5:TTGTC | 5.3:TTGAG | AGC |
| CGA | | AGT | 1 | 4.406 | | 0196475 | 7943416 | 8931221e- | 6573123e-12 | | 7478398 | CCGA | CCGA | TCT |
| | | TCA | 4 | 5.649 | | 844 | | 08 | | | | | | TCA |
| | | TCC | 0 | 4.240 | | | | | | | | | | TCG |
| | | TCG | 2 | 2.631 | | | | | | | | | | AGT |
| | | TCT | 4 | 7.032 | | | | | | | | | | TCC |
| TTG_S_ | L_S_E | AGC | 40 | 24.788 | 5 | 56.8841 | 64.9508608 | 5.34280227 | 1.147352212 | 220 | 1.67470787 | 1.6:TTGTC | 2.0:TTGAG | AGT |
| GAA | | AGT | 73 | 35.904 | | 3505020 | 3286067 | 35483194e- | 2496002e-12 | | 31635254 | GGAA | TGAA | AGC |
| | | TCA | 31 | 46.030 | | 3206 | | 11 | | | | | | TCT |
| | | TCC | 24 | 34.544 | | | | | | | | | | TCA |
| | | TCG | 13 | 21.439 | | | | | | | | | | TCC |
| | | TCT | 39 | 57.294 | | | | | | | | | | TCG |
| TTG_S_ | L_S_G | AGC | 26 | 6.986 | 5 | 52.5979 | 66.1650786 | 4.06720562 | 6.422976282 | 62 | 2.18837281 | 12.1:TTGT | 3.7:TTGAG | AGC |
| GGC | | AGT | 13 | 10.119 | | 6669048 | 198016 | 6022017e- | 04882e-13 | | 1854458 | CGGGC | CGGC | AGT |
| | | TCA | 5 | 12.972 | | 5 | | 10 | | | | | | TCT |
| | | TCC | 8 | 9.735 | | | | | | | | | | TCC |
| | | TCG | 0 | 6.042 | | | | | | | | | | TCA |
| | | TCT | 10 | 16.147 | | | | | | | | | | TCG |
| TTG_T_ | L_T_K | ACA | 47 | 55.919 | 3 | 59.2329 | 66.4256951 | 8.57226048 | 2.485124346 | 184 | 1.65170312 | 2.1:TTGAC | 2.1:TTGAC | ACC |
| AAG | | ACC | 82 | 38.983 | | 9421671 | 0126049 | 447061e-13 | 737293e-14 | | 81606915 | TAAG | CAAG | ACA |
| | | ACG | 25 | 25.808 | | 835 | | | | | | | | ACT |
| | | ACT | 30 | 63.289 | | | | | | | | | | ACG |
| TTT_A_ | F_A_K | GCA | 45 | 69.549 | 3 | 46.8332 | 53.6615345 | 3.77141409 | 1.324938388 | 236 | 1.53629944 | 1.5:TTTGC | 1.9:TTTGC | GCC |
| AAA | | GCC | 99 | 52.724 | | 2610160 | 0541012 | 38681947e- | 5999494e-11 | | 5222163 | AAAA | CAAA | GCT |
| | | GCG | 24 | 26.983 | | 495 | | 10 | | | | | | GCA |
| | | GCT | 68 | 86.745 | | | | | | | | | | GCG |
| TTT_A_ | F_A_I | GCA | 34 | 58.350 | 3 | 51.0414 | 57.3367141 | 4.79362463 | 2.177873961 | 198 | 1.59284289 | 1.9:TTTGC | 2.0:TTTGC | GCC |
| ATT | | GCC | 87 | 44.235 | | 4594483 | 7479119 | 78696884e- | 170604e-12 | | 44492286 | GATT | CATT | GCT |
| | | GCG | 12 | 22.638 | | 625 | | 11 | | | | | | GCA |
| | | GCT | 65 | 72.777 | | | | | | | | | | GCG |
| TTT_F_ | F_F_K | TTC | 154 | 80.819 | 1 | 111.679 | 111.579378 | 4.20090512 | 4.417589270 | 199 | 2.04885787 | 2.6:TTTTT | 1.9:TTTTT | TTC |
| AAA | | TTT | 45 | 118.181 | | 0884147 | 06008312 | 1952221e- | 6388993e-26 | | 6167616 | TAAA | CAAA | TTT |
| | | | | | | 7501 | | 26 | | | | | | |
| TTT_F_ | F_F_N | TTC | 76 | 45.892 | 1 | 32.6158 | 33.2597125 | 1.12293363 | 8.063599982 | 113 | 1.70610433 | 1.8:TTTTT | 1.7:TTTTT | TTC |
| AAC | | TTT | 37 | 67.108 | | 8241571 | 8496911 | 12816693e- | 82159e-09 | | 96870728 | TAAC | CAAC | TTT |
| | | | | | | 158 | | 08 | | | | | | |
| TTT_F_ | F_F_K | TTC | 84 | 45.080 | 1 | 56.3584 | 56.5801443 | 6.03931175 | 5.395390256 | 111 | 1.98994334 | 2.4:TTTTT | 1.9:TTTTT | TTC |
| AAG | | TTT | 27 | 65.920 | | 5189592 | 6747516 | 7399961e- | 833026e-14 | | 06363636 | TAAG | CAAG | TTT |
| | | | | | | 602 | | 14 | | | | | | |
| TTT_F_ | F_F_N | TTC | 107 | 65.793 | 1 | 42.5636 | 43.4589421 | 6.84179515 | 4.329486755 | 162 | 1.66704832 | 1.7:TTTTT | 1.6:TTTTT | TTC |
| AAT | | TTT | 55 | 96.207 | | 8371171 | 44057445 | 6551465e- | 932981e-11 | | 88048688 | TAAT | AAT | TTT |
| | | | | | | 351 | | 11 | | | | | | |
| TTT_G_ | F_G_F | GGA | 66 | 38.476 | 3 | 57.4193 | 59.8091548 | 2.09118180 | 6.456815200 | 172 | 1.74713864 | 2.1:TTTGG | 1.9:TTTGG | GGA |
| TTT | | GGC | 27 | 34.009 | | 4613621 | 18803094 | 43250405e- | 415913e-13 | | 78195043 | TTTT | GTTT | GGG |
| | | GGG | 41 | 21.364 | | 085 | | 12 | | | | | | GGT |
| | | GGT | 38 | 78.151 | | | | | | | | | | GGC |
| TTT_L_ | F_L_K | CTA | 37 | 54.802 | 5 | 65.5091 | 64.2194500 | 8.78784571 | 1.626926272 | 387 | 1.39458339 | 2.6:TTTCT | 1.6:TTTTT | TTG |
| AAA | | CTC | 24 | 22.348 | | 0534241 | 8134486 | 7005689e- | 2189815e-12 | | 50251376 | TAAA | GAAA | TTA |
| | | CTG | 34 | 43.777 | | 652 | | 13 | | | | | | CTA |
| | | CTT | 19 | 49.707 | | | | | | | | | | CTG |
| | | TTA | 100 | 106.802 | | | | | | | | | | CTC |
| | | TTG | 173 | 109.564 | | | | | | | | | | CTT |
| TTT_L_ | F_L_N | CTA | 15 | 31.862 | 5 | 60.3844 | 57.7488362 | 1.01222884 | 3.543994433 | 225 | 1.55328312 | 2.8:TTTCT | 1.7:TTTTT | TTG |
| AAC | | CTC | 7 | 12.993 | | 6724548 | 7723571 | 94180918e- | 085979e-11 | | 15052536 | GAAC | GAAC | TTA |
| | | CTG | 9 | 25.451 | | 044 | | 11 | | | | | | CTT |
| | | CTT | 16 | 28.900 | | | | | | | | | | CTA |
| | | TTA | 72 | 62.094 | | | | | | | | | | CTG |
| | | TTG | 106 | 63.700 | | | | | | | | | | CTC |
| TTT_L_ | F_L_K | CTA | 19 | 40.641 | 5 | 79.3121 | 73.9440143 | 1.16881024 | 1.545013964 | 287 | 1.45385673 | 4.1:TTTCT | 1.7:TTTTT | TTG |
| AAG | | CTC | 17 | 16.573 | | 0773194 | 8701377 | 3085348e- | 1702368e-14 | | 80978666 | TAAG | GAAG | TTA |
| | | CTG | 25 | 32.465 | | 37 | | 15 | | | | | | CTG |
| | | CTT | 9 | 36.863 | | | | | | | | | | CTA |
| | | TTA | 79 | 79.204 | | | | | | | | | | CTC |
| | | TTG | 138 | 81.253 | | | | | | | | | | CTT |
| TTT_L_ | F_L_N | CTA | 25 | 46.447 | 5 | 48.0880 | 41.5967310 | 3.40789754 | 7.107584964 | 328 | 1.29976840 | 2.8:TTTCT | 1.4:TTTTT | TTG |
| AAT | | CTC | 22 | 18.941 | | 6187989 | 1307689 | 89537756e- | 09957e-08 | | 14269717 | TAAT | GAAT | TTA |
| | | CTG | 45 | 37.103 | | 671 | | 09 | | | | | | CTG |
| | | CTT | 15 | 42.129 | | | | | | | | | | CTA |
| | | TTA | 95 | 90.519 | | | | | | | | | | CTC |
| | | TTG | 126 | 92.861 | | | | | | | | | | CTT |
| TTT_L_ | F_L_T | CTA | 7 | 20.108 | 5 | 47.2016 | 40.6494683 | 5.16820878 | 1.104389165 | 142 | 1.56264731 | 3.2:TTTCT | 1.7:TTTCT | TTA |
| ACT | | CTC | 14 | 8.200 | | 7841334 | 397195 | 8130768e- | 0053284e-07 | | 91046426 | GACT | CACT | TTG |
| | | CTG | 5 | 16.063 | | 545 | | 09 | | | | | | CTC |
| | | CTT | 6 | 18.239 | | | | | | | | | | CTA |
| | | TTA | 57 | 39.188 | | | | | | | | | | CTT |
| | | TTG | 53 | 40.202 | | | | | | | | | | CTG |
| TTT_L_ | F_L_E | CTA | 27 | 45.031 | 5 | 37.0620 | 37.5276486 | 5.82040747 | 4.694130600 | 318 | 1.33798552 | 1.7:TTTCT | 1.5:TTTTT | TTG |
| GAA | | CTC | 15 | 18.363 | | 3041904 | 3302657 | 5557532e- | 9807075e-07 | | 01935547 | AGAA | GGAA | TTA |
| | | CTG | 26 | 35.971 | | 3836 | | 07 | | | | | | CTA |
| | | CTT | 26 | 40.845 | | | | | | | | | | CTT |
| | | TTA | 90 | 87.759 | | | | | | | | | | CTG |
| | | TTG | 134 | 90.030 | | | | | | | | | | CTC |
| TTT_L_ | F_L_F | CTA | 14 | 18.692 | 5 | 33.8882 | 40.1609868 | 2.50617824 | 1.385793202 | 132 | 1.56266123 | 2.5:TTTCT | 2.3:TTTCT | CTT |
| TTC | | CTC | 12 | 7.623 | | 1069883 | 45061 | 5630436e- | 2876635e-07 | | 04185414 | GTTC | TTTC | TTG |
| | | CTG | 6 | 14.932 | | 835 | | 06 | | | | | | TTA |
| | | CTT | 39 | 16.954 | | | | | | | | | | CTA |
| | | TTA | 28 | 36.428 | | | | | | | | | | CTC |
| | | TTG | 33 | 37.371 | | | | | | | | | | CTG |
| TTT_P_ | F_P_N | CCA | 31 | 46.037 | 3 | 37.6413 | 48.2124915 | 3.36644508 | 1.918904608 | 113 | 1.74587642 | 1.7:TTTCC | 2.5:TTTCC | CCC |
| AAT | | CCC | 45 | 18.136 | | 2810681 | 4783214 | 04376885e- | 1612617e-10 | | 42940095 | GAAT | CAAT | CCA |
| | | CCG | 8 | 13.890 | | 763 | | 08 | | | | | | CCT |
| | | CCT | 29 | 34.938 | | | | | | | | | | CCG |
| TTT_R_ | F_R_Q | AGA | 19 | 32.716 | 5 | 110.323 | 272.669482 | 3.50105553 | 7.475102052 | 69 | 3.70486998 | 9.6:TTTCG | 10.4:TTTC | CGG |
| CAG | | AGG | 8 | 14.966 | | 1850926 | 9282285 | 20780096e- | 475831e-57 | | 4251732 | TCAG | GGCAG | AGA |
| | | CGA | 6 | 4.712 | | 948 | | 22 | | | | | | AGG |
| | | CGC | 5 | 4.084 | | | | | | | | | | CGA |
| | | CGG | 30 | 2.880 | | | | | | | | | | CGC |
| | | CGT | 1 | 9.642 | | | | | | | | | | CGT |
| TTT_R_ | F_R_E | AGA | 16 | 23.233 | 5 | 37.1218 | 69.1461076 | 5.66184019 | 1.542718055 | 49 | 2.26988964 | 2.9:TTTCG | 6.4:TTTCG | AGA |
| GAG | | AGG | 5 | 10.628 | | 5851290 | 0503581 | 2422441e- | 7635178e-13 | | 7081225 | CGAG | GGAG | CGG |
| | | CGA | 7 | 3.346 | | 12 | | 07 | | | | | | CGT |
| | | CGC | 1 | 2.900 | | | | | | | | | | CGA |
| | | CGG | 13 | 2.045 | | | | | | | | | | AGG |
| | | CGT | 7 | 6.847 | | | | | | | | | | CGC |
| TTT_R_ | F_R_V | AGA | 4 | 16.595 | 5 | 50.0010 | 59.6256199 | 1.38508753 | 1.452418074 | 35 | 3.16003406 | 4.9:TTTCG | 3.4:TTTAG | AGG |
| GTG | | AGG | 26 | 7.592 | | 8733584 | 1251108 | 91347145e- | 6969981e-11 | | 1294116 | TGTG | GGTG | AGA |
| | | CGA | 2 | 2.390 | | 164 | | 09 | | | | | | CGG |
| | | CGC | 0 | 2.072 | | | | | | | | | | CGA |
| | | CGG | 2 | 1.461 | | | | | | | | | | CGT |
| | | CGT | 1 | 4.891 | | | | | | | | | | CGC |
| TTT_R_ | F_R_S | AGA | 21 | 29.397 | 5 | 53.8637 | 114.440282 | 2.23535458 | 4.716608291 | 62 | 2.54296681 | 2.1:TTTCG | 7.3:TTTCG | AGA |
| TCT | | AGG | 8 | 13.448 | | 9455115 | 74090633 | 63589472e- | 1280316e-23 | | 7388512 | ATCT | GTCT | CGG |
| | | CGA | 2 | 4.234 | | 356 | | 10 | | | | | | AGG |
| | | CGC | 7 | 3.670 | | | | | | | | | | CGC |
| | | CGG | 19 | 2.588 | | | | | | | | | | CGT |
| | | CGT | 5 | 8.664 | | | | | | | | | | CGA |
| TTT_S_ | F_S_K | AGC | 16 | 22.985 | 5 | 40.6521 | 40.1530385 | 1.10303076 | 1.390918500 | 204 | 1.53347003 | 2.0:TTTAG | 1.6:TTTTC | TCA |
| AAG | | AGT | 17 | 33.293 | | 1588164 | 7628567 | 44402926e- | 993783e-07 | | 40928389 | TAAG | CAAG | TCC |
| | | TCA | 59 | 42.682 | | 31 | | 07 | | | | | | TCT |
| | | TCC | 51 | 32.032 | | | | | | | | | | TCG |
| | | TCG | 29 | 19.880 | | | | | | | | | | AGT |
| | | TCT | 32 | 53.127 | | | | | | | | | | AGC |
| TTT_S_ | F_S_T | AGC | 12 | 15.211 | 5 | 32.8208 | 39.9112384 | 4.08466981 | 1.556196662 | 135 | 1.58728652 | 1.7:TTTAG | 2.2:TTTTC | TCC |
| ACT | | AGT | 13 | 22.032 | | 0681106 | 2309104 | 15059556e- | 0960933e-07 | | 82291564 | TACT | CACT | TCT |
| | | TCA | 20 | 28.245 | | 412 | | 06 | | | | | | TCA |
| | | TCC | 47 | 21.198 | | | | | | | | | | TCG |
| | | TCG | 15 | 13.156 | | | | | | | | | | AGT |
| | | TCT | 28 | 35.158 | | | | | | | | | | AGC |
| TTT_S_ | F_S_R | AGC | 29 | 9.465 | 5 | 36.1833 | 48.8241687 | 8.72891330 | 2.410680844 | 84 | 1.78263472 | 2.3:TTTAG | 3.1:TTTAG | AGC |
| AGG | | AGT | 6 | 13.709 | | 2228613 | 3100737 | 089871e-07 | 7761882e-09 | | 15323453 | TAGG | CAGG | TCA |
| | | TCA | 15 | 17.575 | | 066 | | | | | | | | TCT |
| | | TCC | 12 | 13.190 | | | | | | | | | | TCC |
| | | TCG | 9 | 8.186 | | | | | | | | | | TCG |
| | | TCT | 13 | 21.876 | | | | | | | | | | AGT |
| TTT_S_ | F_S_Q | AGC | 3 | 12.056 | 5 | 45.9655 | 46.7885753 | 9.22983303 | 6.274166715 | 107 | 1.77141171 | 4.0:TTTAG | 2.1:TTTTC | TCA |
| CAG | | AGT | 6 | 17.463 | | 8006460 | 59426716 | 7550147e- | 753652e-09 | | 1284881 | CCAG | ACAG | TCC |
| | | TCA | 47 | 22.387 | | 656 | | 09 | | | | | | TCT |
| | | TCC | 23 | 16.801 | | | | | | | | | | TCG |
| | | TCG | 6 | 10.427 | | | | | | | | | | AGT |
| | | TCT | 22 | 27.866 | | | | | | | | | | AGC |
| TTT_S_ | F_S_V | AGC | 28 | 9.577 | 5 | 31.2352 | 42.0478845 | 8.41692759 | 5.760433672 | 85 | 1.68718146 | 2.3:TTTAG | 2.9:TTTAG | AGC |
| GTA | | AGT | 6 | 13.872 | | 1904605 | 1820383 | 9230485e- | 2795666e-08 | | 8649225 | TGTA | CGTA | TCT |
| | | TCA | 14 | 17.784 | | 2638 | | 06 | | | | | | TCA |
| | | TCC | 12 | 13.347 | | | | | | | | | | TCC |
| | | TCG | 8 | 8.283 | | | | | | | | | | TCG |
| | | TCT | 17 | 22.136 | | | | | | | | | | AGT |
| TTT_V_ | F_V_T | GTA | 16 | 27.758 | 3 | 46.2990 | 56.5370520 | 4.89912544 | 3.226481827 | 129 | 1.81992008 | 1.7:TTTGT | 2.3:TTTGT | GTC |
| ACT | | GTC | 60 | 25.990 | | 0389394 | 514044 | 2420075e- | 0356095e-12 | | 8735407 | AACT | CACT | GTT |
| | | GTG | 15 | 25.304 | | 773 | | 10 | | | | | | GTA |
| | | GTT | 38 | 49.948 | | | | | | | | | | GTG |

[0411] The examples and embodiments described herein are for illustrative purposes only and various modifications or changes suggested to persons skilled in the art are to be included within the spirit and purview of this application and scope of the appended claims.

### REFERENCES

[0412] 1. Engineered dual selection for directed evolution of SpCas9 PAM specificity. Nat Commun. 2021 Jan. 13, which is incorporated by reference herein in its entirety.
[0413] 2. Superloser: A Plasmid Shuffling Vector for Saccharomyces cerevisiae with Exceedingly Low Background. G3 (Bethesda). 2019 Aug. 8, which is incorporated by reference herein in its entirety.
[0414] 3. Rapid and Efficient CRISPR/Cas9-Based Mating-Type Switching of Saccharomyces cerevisiae. G3 (Bethesda). 2018 Jan. 4, which is incorporated by reference herein in its entirety.
[0415] 4, Resetting the Yeast Epigenome with Human Nucleosomes, Cell. 2017 Dec. 14, which is incorporated by reference herein in its entirety.
[0416] 5. Low escape-rate genome safeguards with minimal molecular perturbation of Saccharomyces cerevisiae. Proc Natl Acad Sci USA. 2017 Feb. 21, which is incorporated by reference herein in its entirety.
[0417] 6. Circular permutation of a synthetic eukaryotic chromosome with the telomerator. Proc Natl Acad Sci USA. 2014 Dec. 2, which is incorporated by reference herein in its entirety.
[0418] 7. Multichange isothermal mutagenesis: a new strategy for multiple site-directed mutations in plasmid DNA. ACS Synth Biol. 2013 Aug. 16, which is incorporated by reference herein in its entirety.
[0419] 8. Pathway Engineering in yeast for synthesizing a complex polyketide: bikaverin, Nature Comms. 2020, which is incorporated by reference herein in its entirety.
[0420] 9. Emulsion-based directed evolution of enzymes and proteins in yeast. Methods Enzymol. 2020, which is incorporated by reference herein in its entirety.
[0421] 10. Phylogenetic debugging of a complete human biosynthetic pathway transplanted into yeast. Nucleic Acids Res. 2019, which is incorporated by reference herein in its entirety.
[0422] 11, A scalable peptide-GPCR language for engineering multicellular communication. Nature Comms. 2018., which is incorporated by reference herein in its entirety.
[0423] 12. Coupling Yeast Golden Gate and VEGAS for Efficient Assembly of the Violacein Pathway in Saccharomyces cerevisiae. Methods Mol Biol. 2018, which is incorporated by reference herein in its entirety.
[0424] 13. Yeast Golden Gate (yGG) for the Efficient Assembly of S. cerevisiae Transcription Units. ACS Synth Biol. 2015 Jul. 17, which is incorporated by reference herein in its entirety.
[0425] 14. Versatile genetic assembly system (VEGAS) to assemble pathways for expression in S. cerevisiae. Nucleic Acids Res. 2015 Jul. 27, which is incorporated by reference herein in its entirety.
[0426] 15. New Orthogonal Transcriptional Switches Derived from Tet Repressor Homologues for Saccharomyces cerevisiae Regulated by 2,4-Diacetylphloroglucinol and Other Ligands. ACS Synth Biol. 2016, which is incorporated by reference herein in its entirety.
[0427] 16. Intrinsic biocontainment: multiplex genome safeguards combine transcriptional and recombinational control of essential yeast genes. Proc Natl Acad Sci USA. 2015 Feb. 10, which is incorporated by reference herein in its entirety.
[0428] 17. Development of a tightly controlled off switch for Saccharomyces cerevisiae regulated by camphor, a low-cost natural product, G3. 2015, which is incorporated by reference herein in its entirety.
[0429] 18. A versatile platform for locus-scale genome rewriting and verification. Proc Natl Acad Sci USA. 2021 Mar. 9, which is incorporated by reference herein in its entirety.
[0430] 19. Technological challenges and milestones for writing genomes. Science. 2019 Oct. 18, which is incorporated by reference herein in its entirety.
[0431] 20. Design of a synthetic yeast genome. Science. 2017 Mar. 10, which is incorporated by reference herein in its entirety.
[0432] 21. RADOM, an efficient in vivo method for assembling designed DNA fragments up to 10 kb long in Saccharomyces cerevisiae. ACS Synth Biol. 2015 Mar. 20, which is incorporated by reference herein in its entirety.
[0433] 22. Design of a synthetic yeast genome. Science. 2017 Mar. 10, which is incorporated by reference herein in its entirety.
[0434] 23. Engineering the ribosomal DNA in a megabase synthetic chromosome. Science. 2017 Mar. 10, which is incorporated by reference herein in its entirety.
[0435] 24. Synthesis, debugging, and effects of synthetic chromosome consolidation: synVI and beyond. Science. 2017 Mar. 10, which is incorporated by reference herein in its entirety.
[0436] 25. “Perfect” designer chromosome V and behavior of a ring derivative. Science. 2017 Mar. 10, which is incorporated by reference herein in its entirety.
[0437] 26. Deep functional analysis of synII, a 770-kilobase synthetic yeast chromosome. Science. 2017 Mar. 10, which is incorporated by reference herein in its entirety.
[0438] 27. Bug mapping and fitness testing of chemically synthesized chromosome X. Science. 2017 Mar. 10, which is incorporated by reference herein in its entirety.
[0439] 28. qPCRTag Analysis-A High Throughput, Real Time PCR Assay for Sc2.0 Genotyping. J Vis Exp. 2015 May 25, which is incorporated by reference herein in its entirety.
[0440] 29. Total synthesis of a functional designer eukaryotic chromosome. Science. 2014 Apr. 4, which is incorporated by reference herein in its entirety.
[0441] 30. Total synthesis of Escherichia coli with a recoded genome. Nature. 2019 May, which is incorporated by reference herein in its entirety.
[0442] 31. Custom selenoprotein production enabled by laboratory evolution of recoded bacterial strains. Nat Biotechnol, 2018 August, which is incorporated by reference herein in its entirety.
[0443] 32. Design, synthesis and testing toward a 57-codon genome. Science. 2016 Aug., which is incorporated by reference herein in its entirety.
[0444] 33. Defining synonymous codon compression schemes by genome recoding. Nature. 2016 Nov. 3, which is incorporated by reference herein in its entirety.
[0445] 34. tRNA genes rapidly change in evolution to meet novel translational demands, eLife. 2013, which is incorporated by reference herein in its entirety.
[0446] 35. Retrotransposon Ty1 integration targets specifically positioned asymmetric nucleosomal DNA segments in tRNA hotspots. Genome Res. 2012, which is incorporated by reference herein in its entirety.
[0447] 36. TFIIIB Subunit Bdp1p is Required for Periodic Integration of the Ty1 Retrotransposon and Targeting of Isw2p to S. cerevisiae tDNAs, Genes Dev. 2005, which is incorporated by reference herein in its entirety.
[0448] 37. Local definition of Ty1 target preference by Long Terminal Repeats and clustered tRNA genes. Genome Research, 2004, which is incorporated by reference herein in its entirety.
[0449] 38. Interactions between tRNA genes, flanking genes and Ty elements: a genomic point of view. Genome Res. 2003, which is incorporated by reference herein in its entirety.
[0450] 39. The yeast retrotransposon uses the anticodon stem-loop of the initiator methionine tRNA as a primer for reverse transcription. R(NA. 1999, which is incorporated by reference herein in its entirety.
[0451] 40. Multiple molecular determinants for retrotransposition in a primer tRNA. Mol, Cell.

[0452] Biol. 1995, which is incorporated by reference herein in its entirety.
[0453] 41. Yeast retrotransposons and tRNAs. Trends Genet. 1993, which is incorporated by reference herein in its entirety.
[0454] 42. A rare tRNA-Arg(CCU) that regulates Ty1 element ribosomal frameshifting is essential for Ty1 retrotransposition in Saccharomyces cerevisiae. Genetics. 1993, which is incorporated by reference herein in its entirety.
[0455] 43. Hotspots for unselected Ty1 transposition events on yeast chromosome III are near tRNA genes and LTR sequences. Cell. 1993, which is incorporated by reference herein in its entirety.
[0456] 44. Initiator methionine tRNA is essential for Ty1 transposition in yeast. Proc. Natl. Acad. 1992, which is incorporated by reference herein in its entirety.
[0457] 45. Host genes that influence transposition in yeast: the abundance of a rare tRNA regulates Ty1 transposition frequency. Proc. Natl. Acad. Sci. 1990, which is incorporated by reference herein in its entirety.
[0458] 46. Future prospects for noncanonical amino acids in biological therapeutics. Curr Opin Biotechnol. 2019 Dec., which is incorporated by reference herein in its entirety.
[0459] 47. A Robust and Quantitative Reporter System To Evaluate Noncanonical Amino Acid Incorporation in Yeast. ACS Synth Biol. 2018 Sep. 21, which is incorporated by reference herein in its entirety.
[0460] 48. Directed Evolution of Heterologous tRNAs Leads to Reduced Dependence on Post-transcriptional Modifications. ACS Synth Biol. 2018 May 18, which is incorporated by reference herein in its entirety.
[0461] 49. Evolving Orthogonal Suppressor tRNAs To Incorporate Modified Amino Acids. ACS Synth Biol. 2017 Jan. 20, which is incorporated by reference herein in its entirety.
[0462] 50. Rapid and Inexpensive Evaluation of Nonstandard Amino Acid Incorporation in Escherichia coli. ACS Synth Biol. 2017 Jan. 20, which is incorporated by reference herein in its entirety.
[0463] 51. Addicting diverse bacteria to a noncanonical amino acid. Nat Chem Biol. 2016 Mar., which is incorporated by reference herein in its entirety.
[0464] 52. A switchable yeast display/secretion system. Protein Eng Des Sel. 2015 Oct., which is incorporated by reference herein in its entirety.
[0465] 53. Efficient genetic encoding of phosphoserine and its nonhydrolyzable analog. Nat Chem Biol. 2015 Jul., which is incorporated by reference herein in its entirety.
[0466] 54. Optimized orthogonal translation of unnatural amino acids enables spontaneous protein double-labelling and FRET, Nat Chem. 2014 May, which is incorporated by reference herein in its entirety.
[0467] 55, Encoding multiple unnatural amino acids via evolution of a quadruplet-decoding ribosome. Nature. 2010 Mar., which is incorporated by reference herein in its entirety.
[0468] 56. Evolved orthogonal ribosomes enhance the efficiency of synthetic genetic code expansion, Nat Biotechnol, 2007 Jul., which is incorporated by reference herein in its entirety.
[0469] 57. Ranked List Loss for Deep Metric Learning, IEEE Trans. Pattern Analysis and Machine Intelligence, 2021 Jan., which is incorporated by reference herein in its entirety.
[0470] 58. ProSelfLC: Progressive Self Label Correction for Training Robust Deep Neural Networks, CVPR 2021, which is incorporated by reference herein in its entirety.
[0471] 59. MAMBA: Multi-level Aggregation via Memory Bank for Video Object Detection, AAAI 2020, which is incorporated by reference herein in its entirety,
[0472] 60. DADA: Differentiable Automatic Data Augmentation, ECCV 2020, which is incorporated by reference herein in its entirety.
[0473] 61. Deep Metric Learning by Online Soft Mining and Class-Aware Attention, AAAI 2019, which is incorporated by reference herein in its entirety.
[0474] 62, Ranked List Loss for Deep Metric Learning, CVPR 2019, which is incorporated by reference herein in its entirety.
[0475] 63. Deep Metric Learning for Proteomics, IEEE Int. Conf. Machine Learning Applications, 2020, Sep., which is incorporated by reference herein in its entirety.
[0476] 64. Expanding the Vocabulary of a Protein: Application of Subword Algorithms to Protein Sequence Modelling, IEEE Eng. Med. Bio, 2020 Aug., which is incorporated by reference herein in its entirety.
[0477] 65. Low escape-rate genome safeguards with minimal molecular perturbation of Saccharomyces cerevisiae. Proc Natl Acad Sci USA. 2017, which is incorporated by reference herein in its entirety.
[0478] 66. Intrinsic biocontainment: Multiplex genome safeguards combine transcriptional and recombinational control of essential yeast genes. Proc Natl Acad Sci. 2015, which is incorporated by reference herein in its entirety.
[0479] 67. Freedom and Responsibility in Synthetic Genomics: The Sc2.0 Project. Genetics 2015, which is incorporated by reference herein in its entirety.
[0480] 68. Regulation of the Dot1 historic H3K79 methyltransferase by histone H4K16 acetylation. Science. 2021, which is incorporated by reference herein in its entirety. 69, Genetic interaction mapping informs integrative structure determination of molecular assemblies, Science. 2020, which is incorporated by reference herein in its entirety.
[0481] 70. Dissecting nucleosome function with a comprehensive histone H2A and H2B mutant library. G3. 2017, which is incorporated by reference herein in its entirety.
[0482] 71. Construction of comprehensive dosage-matching core histone mutant libraries for Saccharomyces cerevisiae. Genetics. 2017, which is incorporated by reference herein in its entirety.
[0483] 72. Interplay between histone 1-13 lysine 56 deacetylation and chromatin modifiers in the response to replicative DNA damage, Genetics. 2015, which is incorporated by reference herein in its entirety.
[0484] 73. A high-resolution view of histone modifications and transcription across distinct metabolic states in budding yeast. Nature Struct Molec Biol. 2014, which is incorporated by reference herein in its entirety.
[0485] 74. Identification of histone H3 and H4 residues that regulate chromosome segregation in budding yeast, Genetics. 2013, which is incorporated by reference herein in its entirety.
[0486] 75. Strain construction and screening methods for a yeast histone H3/H4 mutant library. In Randall H Morse (ed.), Chromatin Remodeling: Methods and Protocols, Methods in Molecular Biology. 2012, which is incorporated by reference herein in its entirety.
[0487] 76, Differential contributions of histone 1-13 and 1-14 residues to heterochromatin structure, Genetics. 2011, which is incorporated by reference herein in its entirety.
[0488] 77. A “Young” Lysine Residue in Histone H3 Attenuates Transcriptional Output in Saccharomyces cerevisiae. Genes Dev. 2011, which is incorporated by reference herein in its entirety.
[0489] 78. Yin and yang of histone 1-1213 roles in silencing and longevity: A tale of two arginines. Genetics. 2010, which is incorporated by reference herein in its entirety.
[0490] 79. Histone H3 Exerts Key Function in Mitotic Checkpoint Control. Mol, Cell Biol. 2009, which is incorporated by reference herein in its entirety.
[0491] 80. A comprehensive synthetic genetic interaction network governing yeast histone acetylation and deacetylation. Genes Dev. 2008, which is incorporated by reference herein in its entirety.
[0492] 81. Probing nucleosome function: A highly versatile library of synthetic histone 13 and H4 mutants. Cell. 2008, which is incorporated by reference herein in its entirety.
[0493] 82, The LRS and SIN domains: Two structurally equivalent but functionally distinct nucleosomal surfaces required for transcriptional silencing. Mol. Cell Biol. 2006, which is incorporated by reference herein in its entirety.
[0494] 83. The sirtuins Hst3 and Hst4p preserve genome integrity by controlling histone 1-13 lysine 56 deacetylation. Current Biology. 2006, which is incorporated by reference herein in its entirety.
[0495] 84. Insights into the Role of Histone H3 and Histone H4 Core Modifiable Residues in Saccharomyces cerevisiae. Mol. Cell Biol. 2005, which is incorporated by reference herein in its entirety.
[0496] 85, Regulated nucleosome mobility and the histone code, Nature Struct. Mol, Biol. 2004, which is incorporated by reference herein in its entirety.
[0497] 86. SPT10 and SPT21 are required for transcription of particular histone genes in Saccharomyces cerevisiae, Mol. Cell. Biol. 1994, which is incorporated by reference herein in its entirety,
[0498] 87, Engineered dual selection for directed evolution of SpCas9's PAM specificity. Nature Comms. in press. 2021, which is incorporated by reference herein in its entirety.
[0499] 88. CRISPR-Cas12a system in fission yeast for multiplex genomic editing and CRISPR interference. Nucleic Acids Res. 2020, which is incorporated by reference herein in its entirety.
[0500] 89. Construction of Designer Selectable Marker Deletions with a CRISR-Cas9 Toolbox in Schizosaccharomyces pombe and Optimized Design of Common Entry Vectors. G3. 2017, which is incorporated by reference herein in its entirety.
[0501] 90. Rapid and Efficient CRISPR/Cas9-Based Mating-Type Switching of Saccharomyces cerevisiae. G3 (Bethesda). 2017 Nov. 22, which is incorporated by reference herein in its entirety.
[0502] 91. Versatile Genetic Assembly System (VEGAS) to assemble pathways for expression in S. cerevisiae. Nucl Acids Res. 2015, which is incorporated by reference herein in its entirety.
[0503] 92. Yeast Golden Gate (yGG) for efficient assembly of Saccharomyces cerevisiae transcription units, ACS Synth Biol. 2015, which is incorporated by reference herein in its entirety.
[0504] 93. Circular permutation of a synthetic eukaryotic chromosome with the telomerator. Proc Natl Acad Sci USA. 2014, which is incorporated by reference herein in its entirety.
[0505] 94, RADOM, an Efficient In Vivo Method for Assembling Designed DNA Fragments up to 10 kb Long in Saccharomyces cerevisiae. ACS Synth Biol. 2014, which is incorporated by reference herein in its entirety.
[0506] 95. GeneDesign 3.0: an Updated Synthetic Biology Toolkit. Nucl Acids Res. 2010, which is incorporated by reference herein in its entirety.
[0507] 96, CloneQC: Lightweight sequence verification for synthetic biology. Nucl. Acids Res. 2010, which is incorporated by reference herein in its entirety.
[0508] 97. Automated Design of Assemblable, Modular, Synthetic Chromosomes. 8th International Conference, PPAM 2009, Wroclaw, Poland, Sep. 13-16, 2009, which is incorporated by reference herein in its entirety.
[0509] 98. GeneDesign: Rapid, Automated Design of Multikilobase Synthetic Genes. Genome Res. 2006, which is incorporated by reference herein in its entirety.
[0510] 99. A robust and quantitative report system to evaluate noncanonical amino aid incorporation in yeast. ACS Synth Biol. 2018 Sep. 21; 7(9): 2256-2269, which is incorporated by reference herein in its entirety.

1. A method comprising:
a) analyzing at least a portion of a genome of an organism to identify a first plurality of codons based on at least in part on a first local context of a codon-of-interest in the genome of the organism to be rewritten;
b) rewriting the first plurality of codons in the genome of the organism to a second codon, wherein the first plurality of codons and the second codon encode a first amino acid, and wherein the rewriting of the first plurality of codons modulates an occurrence of the first plurality of codons;
c) synthesizing a nucleic acid construct comprising the portion of the genome of the organism, wherein the first plurality of codons is rewritten to the second codon; and
d) introducing the nucleic acid construct into a cell of the organism to replace the portion of the genome of the organism.

2. (canceled)

3. The method of claim 1, wherein the modulating of the occurrence of the first plurality of codons comprises eliminating the occurrence of the first plurality of codons.

4. The method of claim 1, wherein the analyzing comprises identifying one or more synonymous codons with a least number of occurrences in the genome of the organism, wherein the first plurality of codons comprises the one or more synonymous codons with the least number of occurrences.

5. (canceled)

6. The method of claim 4, wherein the analyzing further comprises determining a number of occurrences of the first local context of the codon-of-interest, wherein the first local context of the codon-of-interest comprises
C₍ₙ₋₁₎−Cₙ−C₍ₙ₊₁₎, wherein
C₍ₙ₋₁₎ denotes a codon downstream of the codon-of-interest;
Cₙ denotes the codon-of-interest; and
C₍ₙ₊₁₎ denotes a codon upstream of the codon-of-interest.

7. (canceled)

8. The method of claim 6, the preceding, wherein the analyzing further comprises determining a relative synonymous codon usage (RSCU) of the codon-of-interest.

9. The method of claim 8, wherein the analyzing further comprises identifying the first plurality of codons based at least in part on a second local context of the codon-of-interest in the genome of the organism, wherein the second local context of the codon-of-interest comprises
C₍ₙ₋₁₎−AAₙ−C₍ₙ₊₁₎, wherein
C₍ₙ₋₁₎ denotes a codon downstream of the codon-of-interest;
AAₙ denotes an amino acid encoded by the codon-of-interest; and
C₍ₙ₊₁₎ denotes a codon upstream of the codon-of-interest.

10. (canceled)

11. The method of claim 9, wherein the analyzing further comprises determining a number of occurrences of the second local context of the codon-of-interest.

12. The method of claim 11, wherein the analyzing further comprises determining an expected number of occurrences of the first local context of the codon-of-interest, wherein the expected number of occurrences of the first local context of the codon-of-interest is determined as a product of: a number of occurrences of the second local context of the codon-of-interest, and the determined RCSU of the codon-of-interest.

13. (canceled)

14. The method of claim 1, wherein the analyzing comprises processing the at least the portion of the genome of the organism using a machine learning-based computer system, wherein the machine learning-based computer system comprises one or more storage units comprising, respectively, one or more storage devices included within respective storage arrays controlled by a respective one or more storage controllers; and one or more computer processing units, wherein the one or more computer processing units communicate with the one or more storage units over a communication interface.

15. (canceled)

16. The method of claim 1, wherein the analyzing further comprises identifying one or more statistically significant evolutionary signals, wherein the one or more statistically significant evolutionary signals comprise a negative evolutionary selection signal, a positive evolutionary selection signal, or a combination thereof;
wherein the negative selection signal comprises a frameshift, a ribosome stall, or a secondary RNA structure interfering with transcription or translation; and
wherein the positive selection signal comprises a regulatory element within an open reading frame (ORF).

17.-19. (canceled)

20. The method of claim 1, wherein the method further comprises reassigning the first plurality of codons to a second amino acid.

21. (canceled)

22. The method of claim 1, wherein the first amino acid comprises arginine, leucine, or serine.

23. (canceled)

24. The method of claim 1, wherein the first plurality of codons comprises CGA, CGG, or a combination thereof.

25. (canceled)

26. The method of claim 1, wherein the first plurality of codons comprises CTA, CTG, or a combination thereof.

27. (canceled)

28. The method of claim 1, wherein the first plurality of codons comprises AGT, AGC, TCG, TCA, or a combination thereof.

29. The method of claim 1, wherein the rewriting further comprises removing a plurality of tRNA molecules with anticodons that recognize the first plurality of codons, wherein the removing comprises deleting one or more genes that encode the plurality of tRNA molecules that recognize the first plurality of codons.

30. (canceled)

31. The method of claim 20, further comprising providing the cell (i) additional tRNA molecules that recognize the first plurality of codons and aminoacyl-tRNA synthetases (aaRSs) for charging the additional tRNA molecules with the second amino acid: (ii) a tRNA pre-charged with the second amino acid: or (iii) both (i) and (ii).

32. (canceled)

33. The method of claim 20, wherein the second amino acid comprises a non-canonical amino acid, wherein the non-canonical amino acid comprises an azide-containing ncAA, an alkene-containing ncAA, an alkyne-containing ncAA, p-azidophenylalanine, 2-aminoisobutyric acid (Aib), N6-[(propargyloxy)carbonyl]-L-lysine, O—4-allyl-L-tyrosine, or a combination thereof.

34. (canceled)

35. The method of claim 1, wherein the rewriting of the first plurality of codons comprises modulating one or more codons in the first plurality of codons, wherein the one or more codons are within 4 codons of each other.

36. The method of claim 1, wherein the rewriting of the first plurality of codons comprises modulating a codon fragment of one or more codons in the first plurality of codons, wherein the codon fragment comprises a trimer, a hexamer, a 9 mer, or a combination thereof.

37. (canceled)

38. A method of producing a polypeptide comprising a non-canonical amino acid (ncAA) or a population of polypeptide molecules comprising the ncAA in an organism, the method comprising:
rewriting a first codon encoding a first amino acid to a second codon encoding the first amino acid in a genome of the organism, wherein the rewriting comprises identifying the first codon based at least in part on a first local context of a codon-of-interest in the genome of the organism;
reassigning the first codon to encode the ncAA in the genome of the organism; and
introducing into the organism an aminoacyl-tRNA synthetase (aaRS)/tRNA pair engineered to recognize the first codon and incorporate the ncAA into an amino acid sequence of the polypeptide or the population of the polypeptide molecules.

39.-67. (canceled)

68. A cell or a population of cells comprising a genome, wherein a first plurality of codons in the genome of the organism is rewritten to a second codon, wherein the first plurality of codons and the second codon encode a first amino acid, and wherein an occurrence of the first plurality of codons is modulated responsive to being rewritten to the second codon, wherein the first plurality of codons is reassigned to a second amino acid.

69.-103. (canceled)

The application's sequence listing, which the Patent Office published only in electronic form, follows.

SEQUENCE LISTING (11812 sequences)

SEQ ID NO: 1 - DNA, 363 bp, Saccharomyces cerevisiae
atggtcaaattaacttcaatcgccgctggtgtcgctgccatcgctgctactgcttctgcaaccaccactctagctcaatctgacgaaagagtcaacttggtggaattgggtgtctacgtctctgatatcagagctcacttagcccaatactacatgttccaagccgcccacccaactgaaacctacccagtcgaagttgctgaagccgttttcaactacggtgacttcaccaccatgttgaccggtattgctccagaccaagtgaccagaatgatcaccggtgttccatggtactccagcagattaaagccagccatctccagtgctctatccaaggacggtatctacactatcgcaaactag

SEQ ID NO: 2 - DNA, 363 bp, Artificial Sequence
  Description of Artificial Sequence: Synthetic polynucleotide
atggtcaaattaacttctatcgccgctggtgtcgctgccatcgctgctactgcttctgcaaccaccactttggctcaatctgacgaaagagtcaacttggtggaattgggtgtctacgtctctgatatcagagctcacttagcccaatactacatgttccaagccgcccacccaactgaaacctacccagtcgaagttgctgaagccgttttcaactacggtgacttcaccaccatgttgaccggtattgctccagaccaagtgaccagaatgatcaccggtgttccatggtactccagcagattaaagccagccatctccagtgctttgtccaaggacggtatctacactatcgcaaactga

SEQ ID NO: 3 - DNA, 228 bp, Saccharomyces cerevisiae
atgccaattataggggtgccgaggtgccttataaaacccttttctgtgcctgtgacatttcctttttcggtcaaaaagaatatccgaattttagatttggaccctcgtacagaagcttattgtctaagcctgaattcagtctgctttaaacggcttccgcggaggaaatatttccatctcttgaattcgtacaacattaaacgtgtgttgggagtcgtatactgttag

SEQ ID NO: 4 - DNA, 228 bp, Artificial Sequence
  Description of Artificial Sequence: Synthetic polynucleotide
atgccaattataggggtgccgaggtgccttataaaacccttttctgtgcctgtgacatttcctttttctgtcaaaaagaatatcagaattttagatttggaccctcgtacagaagcttattgtttgagcttgaattctgtctgctttaaaagacttccgagaaggaaatatttccatctcttgaattcttacaacattaaacgtgtgttgggagtcgtatactgttga

SEQ ID NO: 5 - DNA, 1782 bp, Saccharomyces cerevisiae
atgtattcaattgttaaagagattattgtagatccttacaaaagactaaaatggggttttattccagtaaagcggcaggtggaagacctgccagatgacttaaattcaacagaaattgtcactatctccaacagtatccagagtcatgaaacagctgaaaatttcatcacgactacaagtgaaaaagatcaactacattttgagactagtagctatagtgaacataaagacaatgtgaacgttactagaagttatgaatatagagatgaagccgataggccatggtggagatttttcgatgaacaagagtatcggatcaatgaaaaggaaagatctcacaataaatggtatagttggttcaaacagggtacctctttcaaagaaaaaaaattattaattaaattggatgtccttttagccttttattcttgtattgcttattgggtgaaatatctggatacggttaatataaacaacgcttacgtttcgggaatgaaggaagatttaggctttcaaggtaatgatttggtgcatactcaagtaatgtacacagttggtaatattatatttcaattgccatttttgatttacctgaacaagctcccattaaactatgttttaccaagcctcgacttatgttggtcgcttttaaccgttggtgctgcatatgtcaattctgtaccacacttgaaagcaattaggtttttcattggggcttttgaagcgccaagttatttggcataccaatatttgtttggttccttttacaaacatgatgaaatggtgcgtcgttctgctttttactatttgggccagtatatcggtattctatccgctggtgggatccagtcagccgtatattcatcgttaaatggtgtaaatggtttagagggatggagatggaactttattattgacgctattgtgtctgtcgtagtgggccttattggattttactccctgccaggtgacccatacaactgttattctattttcttaactgatgatgaaattaggttggcgaggaaaagattaaaagaaaaccaaacaggtaaaagtgattttgaaacaaaagtattcgatattaaactgtggaaaacaattttcagtgattggaaaatatacattttaactttatggaatattttctgttggaatgacagtaatgtttcatctggggcatacctactatggttgaaatctttgaaaagatactctattcctaagctcaatcagttatccatgattactccgggtttaggtatggtttatttgatgcttactggtattattgcagataaattacactctcgttggtttgcgattatttttactcaggttttcaatatcattggtaactccatattagccgcttgggacgtcgcagaaggagccaaatggtttgcatttatgctgcaatgttttggttgggctatggctcctgttttatactcttggcaaaacgatatttgtcgccgagatgctcaaactagagctattactttagttacaatgaatattatggctcaatcatctaccgcatggataagtgttttggtttggaaaacagaagaagctcccaggtatttaaaggggtttactttcactgcatgttctgctttttgtctctccatttggacttttgttgtactctacttctataaacgtgatgaaaggaacaatgccaagaagaacggtattgtgctttataactctaaacatggtgtggaaaagccaacgtcaaaagacgttgaaaccttatcagtatctgatgaaaaataa

SEQ ID NO: 6 - DNA, 1782 bp, Artificial Sequence
  Description of Artificial Sequence: Synthetic polynucleotide
atgtattctattgttaaagagattattgtagatccttacaaaagattgaaatggggttttattccagtaaagagacaggtggaagacttaccagatgacttaaattctacagaaattgtcactatctccaacagtatccagagtcatgaaacagctgaaaatttcatcacgactacaagtgaaaaagatcaattgcattttgagactagtagctatagtgaacataaagacaatgtgaacgttactagaagttatgaatatagagatgaagccgataggccatggtggagatttttcgatgaacaagagtatagaatcaatgaaaaggaaagatctcacaataaatggtatagttggttcaaacagggtacctctttcaaagaaaaaaaattattaattaaattggatgtccttttagccttttattcttgtattgcttattgggtgaaatatttggatacggttaatataaacaacgcttacgtttctggaatgaaggaagatttaggctttcaaggtaatgatttggtgcatactcaagtaatgtacacagttggtaatattatatttcaattgccatttttgatttacttgaacaagctcccattaaactatgttttaccaagcctcgacttatgttggagtcttttaaccgttggtgctgcatatgtcaattctgtaccacacttgaaagcaattaggtttttcattggggcttttgaagcgccaagttatttggcataccaatatttgtttggttccttttacaaacatgatgaaatggtgcgtcgttctgctttttactatttgggccagtatatcggtattttatccgctggtgggatccagtctgccgtatattcttctttaaatggtgtaaatggtttagagggatggagatggaactttattattgacgctattgtgtctgtcgtagtgggccttattggattttactccttgccaggtgacccatacaactgttattctattttcttaactgatgatgaaattaggttggcgaggaaaagattaaaagaaaaccaaacaggtaaaagtgattttgaaacaaaagtattcgatattaaattatggaaaacaattttcagtgattggaaaatatacattttaactttatggaatattttctgttggaatgacagtaatgtttcttctggggcatacttgttatggttgaaatctttgaaaagatactctattcctaagctcaatcagttatccatgattactccgggtttaggtatggtttatttgatgcttactggtattattgcagataaattacactctcgttggtttgcgattatttttactcaggttttcaatatcattggtaactccatattagccgcttgggacgtcgcagaaggagccaaatggtttgcatttatgttacaatgttttggttgggctatggctcctgttttatactcttggcaaaacgatatttgtcgcagagatgctcaaactagagctattactttagttacaatgaatattatggctcaatcttctaccgcatggataagtgttttggtttggaaaacagaagaagctcccaggtatttaaaggggtttactttcactgcatgttctgctttttgtctctccatttggacttttgttgtactctacttctataaacgtgatgaaaggaacaatgccaagaagaacggtattgtgctttataactctaaacatggtgtggaaaagccaacgtccaaagacgttgaaaccttaagtgtatctgatgaaaaatga

SEQ ID NO: 7 - DNA, 387 bp, Saccharomyces cerevisiae
atgaacagtgctaccagtgagacaacaaccaatactggagctgctgagacaactaccagtactggagctgctgagacgaaaacagtagtcacctcttcaatttcaagattcaatcatgctgaaacacagacggcttccgcgaccgatgtgattggtcacagcagtagtgttgtttctgtatccgaaactggcaacaccaagagtctaataacttccgggttaagtactatgtcgcaacagcctcgtagcacaccagcaagtagcataataggatctagtactgcctctttagaaatctcaacctacgttggtattgccaatggtctgttgaccaataatggcataagtgtttttatttccaccgtattgctggcaatcgtatggtaa

SEQ ID NO: 8 - DNA, 387 bp, Artificial Sequence
  Description of Artificial Sequence: Synthetic polynucleotide
atgaacagtgctaccagtgagacaacaaccaatactggagctgctgagacaactaccagtactggagctgctgagacgaaaacagtagtcacctcttccatttctagattcaatcatgctgaaacacagacggcttccgcgaccgatgtgattggtcacagcagtagtgttgtttctgtatccgaaactggcaacaccaagagtttgataacttccgggttaagtactatgtctcaacagcctcgtagcacaccagcaagtagcataataggatctagtactgcctctttagaaatctccacctacgttggtattgccaatggtttattgaccaataatggcataagtgtttttatttccaccgtattgttggcaatcgtatggtga

SEQ ID NO: 9 - DNA, 381 bp, Saccharomyces cerevisiae
atggcaggtgaagcagtttcggaacacacaccagattcgcaggaagtaacagtaactagcgtagtttgttgcctcgattctgtggtggaaataggacaccatgtcgtgtattctgtggtaacgccgttaatagtagcagtgcttatagatacaatggctggagaagcagtcttagagcatacgtcagattcacaagaagaaattgtaactactgtggtttgctctgttgtccccttggtttgctttgttgtctccgtagtttgctttgttatctctgtggtagaaatagggcaccatgtggtatactctgttgtggcaccgctaacagtaacggtggccgtggaaacaattgcagaggagatggattcagtgcacacatga

SEQ ID NO: 10 - DNA, 381 bp, Artificial Sequence
  Description of Artificial Sequence: Synthetic polynucleotide
atggcaggtgaagcagtttctgaacacacaccagattctcaggaagtaacagtaactagcgtagtttgttgcctcgattctgtggtggaaataggacaccatgtcgtgtattctgtggtaacgccgttaatagtagcagtgcttatagatacaatggctggagaagcagtcttagagcatacgtctgattctcaagaagaaattgtaactactgtggtttgctctgttgtccccttggtttgctttgttgtctccgtagtttgctttgttatctctgtggtagaaatagggcaccatgtggtatactctgttgtggcaccgttaacagtaacggtggccgtggaaacaattgcagaggagatggattctgtgcacacatga

SEQ ID NO: 11 - DNA, 381 bp, Saccharomyces cerevisiae
atgacaggttactttttaccaccacaaacaagttcttacacgttcaggtttgctaaggtcgatgactctgcaattctatcagtcggtggcgacgttgcattcggatgctgtgcacaagagcaacctccaattacatccacaaactttacgattaatggtatcaagccatggcaaggaagattgcccgataacattgcagggactgtgtatatgtatgctggattctactgtccaatgaagattgtctactcaaacgctgtttcttggcatacactgccagttagcgtggaattgcctgatgttactactgttagcgatgattttgcagggcacgtttactcttttgacgatgacctaacagcccaattgtactatccctga

SEQ ID NO: 12 - DNA, 381 bp, Artificial Sequence
  Description of Artificial Sequence: Synthetic polynucleotide
atgacaggttactttttaccaccacaaacaagttcttacacgttcaggtttgctaaggtcgatgactctgcaattttaagtgtcggtggcgacgttgcattcggatgctgtgcacaagagcaacctccaattacatccacaaactttacgattaatggtatcaagccatggcaaggaagattgcccgataacattgcagggactgtgtatatgtatgctggattctactgtccaatgaagattgtctactctaacgctgtttcttggcatacattaccagttagcgtggaattgcctgatgttactactgttagcgatgattttgcagggcacgtttactcttttgacgatgacttgacagcccaattgtactatccctga

SEQ ID NO: 13 - DNA, 285 bp, Saccharomyces cerevisiae
atgaatccttttgcatcgctagaaggacaagataatatttcttctgttttttttttacatatgcaacaatttgaaagtcaggtcaaagacagattccggttccccatattcagattggagagaaaaacttttggcaactcatgttaccaagtcgagacgcttaaagttaagtgtcggccaagacacgcaaaatcttgtaatcttttaacgctgctcttcaaatcacggacgcaatcagtacttgtacctaattttggttttctaatattgaatagcgaaccatag

SEQ ID NO: 14 - DNA, 285 bp, Artificial Sequence
  Description of Artificial Sequence: Synthetic polynucleotide
atgaatccttttgcatctttggaaggacaagataatatttcttctgttttttttttacatatgcaacaatttgaaagtcaggtcaaagacagattcagattccccatattcagattggagagaaaaacttttggcaactcttgttaccaagtcgagacgcttaaagttaagtgtagaccaagacacgcaaaatcttgtaatcttttaacgcttctcttcaaaagcagaacgcaaagtgtacttgtacctaattttggttttttaatattgaatagcgaaccatga

SEQ ID NO: 15 - DNA, 291 bp, Saccharomyces cerevisiae
atgtgccctcgcacagttttgctcatcataaacattaatcattggttttatgataagaatatcgtaagaattattttaactttcagattagattccggccatatttctgacatttgttttattaataaaaatttggcgaatgctttgataactgctgatatttcattgttgaaaaggcatgatataagatgcacaaagtatattataacttattatcagagatataggaacaaagaaaaagggaaattcatatctctatgtaaaaataccattatttcctcttctgtttaa

SEQ ID NO: 16 - DNA, 291 bp, Artificial Sequence
  Description of Artificial Sequence: Synthetic polynucleotide
atgtgccctcgcacagttttgctcatcataaacattaatcattggttttatgataagaatatcgtaagaattattttaactttcagattagattccggccatatttctgacatttgttttattaataaaaatttggcgaatgctttgataactgctgatatttctttgttgaaaaggcatgatataagatgcacaaagtatattataacttattatcagagatataggaacaaagaaaaagggaaattcatatctttatgtaaaaataccattatttcctcttctgtttga

SEQ ID NO: 17 - DNA, 3969 bp, Saccharomyces cerevisiae
atgtctctggcacattattgtttactactagccatcgtcacattgctgggattaactaatgttgtctctgcgactacagcggcatgcctgccagcaaactcaaggaagaatggtatgaatgtaaacttttaccagtattcattgagagattcctccacatattcgaatgcagcatatatggcttatggatatgcctcaaaaactaaactgggttctgtcggaggacaaactgatatctcgattgattataatattccttgtgttagttcatcaggcacatttccttgtcctcaagaagatttatatggtaattggggatgcaaaggaattggtgcttgttctaataatccaataattgcatactggagtactgatttatttggtttctatactaccccaacaaacgtaaccctagaaatgacaggttattttttaccaccacagacgggttcttacacattcaagtttgctacagttgacgactctgcaattctatcagtcggtggtagcattgcgttcgaatgttgtgcacaagaacaacctcccatcacgtcgactaacttcaccatcaatggtatcaagccatggaatggaagtccccctgataatattacagggactgtctacatgtatgctggtttctattatccaatgaagattgtttactcaaatgccgttgcctggggtacacttccaattagtgtgacactaccagatggcactaccgttagtgatgactttgaagggtacgtatatacttttgacaacaatctaagccagccaaactgtaccattccagacccttcaaattatactgtcagtactaccataactacaacggaaccatggaccggtactttcacttctacatctactgaaatgaccaccgtcaccggtaccaacggcgttccaactgacgaaaccgtcattgtcatcagaactccaacaactgctagcaccatcataactacaactgagccatggaacagcacttttacctctacttctaccgaattgaccacagtcactggcaccaatggtgtacgaactgacgaaaccatcattgtaatcagaacaccaacaacagccactactgccataactacaactgagccatggaacagcacttttacctctacttctaccgaattgaccacagtcaccggtaccaatggtttgccaactgatgagaccatcattgtcatcagaacaccaacaacagccactactgccatgactacaactcagccatggaacgacacttttacctctacttctaccgaattgaccacagtcaccggtaccaatggtttgccaactgatgagaccatcattgtcatcagaacaccaacaacagccactactgccatgactacaactcagccatggaacgacacttttacctctacttctaccgaattgaccacagtcaccggtaccaatggtttgccaactgatgagaccatcattgtcatcagaacaccaacaacagccactactgccatgactacaactcagccatggaacgacacttttacctctacatccactgaaatcaccaccgtcaccggtaccaatggtttgccaactgatgagaccatcattgtcatcagaacaccaacaacagccactactgccatgactacaactcagccatggaacgacacttttacctctacatccactgaaatgaccaccgtcaccggtaccaacggtttgccaactgatgaaaccatcattgtcatcagaacaccaacaacagccactactgccataactacaactgagccatggaacagcacttttacctctacatccactgaaatgaccaccgtcaccggtaccaacggtttgccaactgatgaaaccatcattgtcatcagaacaccaacaacagccactactgccataactacaactcagccatggaacgacacttttacctctacatccactgaaatgaccaccgtcaccggtaccaacggtttgccaactgatgaaaccatcattgtcatcagaacaccaacaacagccactactgccatgactacaactcagccatggaacgacacttttacctctacatccactgaaatcaccaccgtcaccggtaccaacggtttgccaactgatgagaccatcattgtcatcagaacaccaacaacagccactactgccatgactacaactcagccatggaacgacacttttacctctacatccactgaaatgaccaccgtcaccggtaccaacggcgttccaactgacgaaaccgtcattgtcatcagaactccaactagtgaaggtctaatcagcaccaccactgaaccatggactggtactttcacctctacatccactgagatgaccaccgtcaccggtactaacggtcaaccaactgacgaaaccgtgattgttatcagaactccaaccagtgaaggtttggttacaactacaaccgagccatggaccggtactttcacctctacatctactgagatgaccaccatcactggaaccaacggtcaaccaactgatgaaactgtcattattgtcaaaactccaactactgccatctcatccagtttgtcatcttcttcaggacaaatcaccagctttatcacgtctgcgcgtccaattattaccccattctatcctagcaatggaacttctgtgatttcctcctcagtaatttcttcctcagacacttcttctctagtcatttcttcctcagtcacttcttctctagtcacttcttctccagtcatttcttcttcattcatttcttcccctgtcatttcttctacaacaacctccgcttctatactctctgaatcatctaaatcatccgtcattccaaccagtagttccacctctggttcttctgagagcgaaacgggttcagctagttctgcctcttcttcctcttctatctcttctgaatcaccaaagtctacatattcgtcttcatcattaccacctgttaccagtgcaacaacaagtcaggaaattacttcttcattaccacctgttaccactacaaaaacgagcgaacaaaccactttggttaccgtgacatcctgcgaatctcatgtgtgcactgaatctatctcctctgcgattgtttccacggccaccgttactgttagcggtgccacaacagagtataccacatggtgccctatttctaccacagagataacaaagcaaactacggagacaacaaagcaaaccaaggggacaacagagcaaaccacagaaacaacaaaacaaaccacagtagttacaatttcttcttgtgaatctgacgtatgctctaagactgcttctccagccattgtatctacaagcactgctactattaatggcgttaccacagaatacacaacatggtgtcctatttccaccacagaatcgaagcaacaaactacgctagttactgttacttcctgcggatctggtgtgtgttccgaaactacttcacctgccattgtttcgacggccacggctactgtgaatgatgttgttacggtctattctacatggaggccacagactacgaatgaacagtctgtcagctctaaaatgaacagtgctaccagtgagacaacaaccaatactggagctgctgagacaactaccagtactggagctgctgagacgaaaacagtagtcacctcttcaatttcaagattcaatcatgctgaaacacagacggcttccgcgaccgatgtgattggtcacagcagtagtgttgtttctgtatccgaaactggcaacaccaagagtctaacaagttccgggttgagtactatgtcgcaacagcctcgtagcacaccagcaagtagcatggtaggatctagtacagcttctttagaaatttcaacgtatgctggcagtgccaacagcttactggccggtagtggtttaagtgtcttcattgcgtccttattgctggcaattatttaa

SEQ ID NO: 18 - DNA, 3969 bp, Artificial Sequence
  Description of Artificial Sequence: Synthetic polynucleotide
atgtctttggcacattattgtttattattagccatcgtcacattgttgggattaactaatgttgtctctgcgactacagcggcatgcttaccagcaaacagcaggaagaatggtatgaatgtaaacttttaccagtattctttgagagattcctccacatattctaatgcagcatatatggcttatggatatgcctccaaaactaaattgggttctgtcggaggacaaactgatatctctattgattataatattccttgtgttagttcttctggcacatttccttgtcctcaagaagatttatatggtaattggggatgcaaaggaattggtgcttgttctaataatccaataattgcatactggagtactgatttatttggtttctatactaccccaacaaacgtaaccttagaaatgacaggttattttttaccaccacagacgggttcttacacattcaagtttgctacagttgacgactctgcaattttaagtgtcggtggtagcattgcgttcgaatgttgtgcacaagaacaacctcccatcacgtctactaacttcaccatcaatggtatcaagccatggaatggaagtccccctgataatattacagggactgtctacatgtatgctggtttctattatccaatgaagattgtttactctaatgccgttgcctggggtacacttccaattagtgtgacattaccagatggcactaccgttagtgatgactttgaagggtacgtatatacttttgacaacaatttgagccagccaaactgtaccattccagacccttccaattatactgtcagtactaccataactacaacggaaccatggaccggtactttcacttctacatctactgaaatgaccaccgtcaccggtaccaacggcgttccaactgacgaaaccgtcattgtcatcagaactccaacaactgctagcaccatcataactacaactgagccatggaacagcacttttacctctacttctaccgaattgaccacagtcactggcaccaatggtgtaagaactgacgaaaccatcattgtaatcagaacaccaacaacagccactactgccataactacaactgagccatggaacagcacttttacctctacttctaccgaattgaccacagtcaccggtaccaatggtttgccaactgatgagaccatcattgtcatcagaacaccaacaacagccactactgccatgactacaactcagccatggaacgacacttttacctctacttctaccgaattgaccacagtcaccggtaccaatggtttgccaactgatgagaccatcattgtcatcagaacaccaacaacagccactactgccatgactacaactcagccatggaacgacacttttacctctacttctaccgaattgaccacagtcaccggtaccaatggtttgccaactgatgagaccatcattgtcatcagaacaccaacaacagccactactgccatgactacaactcagccatggaacgacacttttacctctacatccactgaaatcaccaccgtcaccggtaccaatggtttgccaactgatgagaccatcattgtcatcagaacaccaacaacagccactactgccatgactacaactcagccatggaacgacacttttacctctacatccactgaaatgaccaccgtcaccggtaccaacggtttgccaactgatgaaaccatcattgtcatcagaacaccaacaacagccactactgccataactacaactgagccatggaacagcacttttacctctacatccactgaaatgaccaccgtcaccggtaccaacggtttgccaactgatgaaaccatcattgtcatcagaacaccaacaacagccactactgccataactacaactcagccatggaacgacacttttacctctacatccactgaaatgaccaccgtcaccggtaccaacggtttgccaactgatgaaaccatcattgtcatcagaacaccaacaacagccactactgccatgactacaactcagccatggaacgacacttttacctctacatccactgaaatcaccaccgtcaccggtaccaacggtttgccaactgatgagaccatcattgtcatcagaacaccaacaacagccactactgccatgactacaactcagccatggaacgacacttttacctctacatccactgaaatgaccaccgtcaccggtaccaacggcgttccaactgacgaaaccgtcattgtcatcagaactccaactagtgaaggtttgatcagcaccaccactgaaccatggactggtactttcacctctacatccactgagatgaccaccgtcaccggtactaacggtcaaccaactgacgaaaccgtgattgttatcagaactccaaccagtgaaggtttggttacaactacaaccgagccatggaccggtactttcacctctacatctactgagatgaccaccatcactggaaccaacggtcaaccaactgatgaaactgtcattattgtcaaaactccaactactgccatctcttccagtttgtcttcttcttctggacaaatcaccagctttatcacgtctgcgcgtccaattattaccccattctatcctagcaatggaacttctgtgatttcctcctctgtaatttcttccagtgacacttcttctttggtcatttcttcctctgtcacttcttctttggtcacttcttctccagtcatttcttcttctttcatttcttcccctgtcatttcttctacaacaacctccgcttctatactctctgaaagctctaaatcttccgtcattccaaccagtagttccacctctggttcttctgagagcgaaacgggttctgctagttctgcctcttcttcctcttctatctcttctgaatctccaaagtctacatattcttcttcttctttaccacctgttaccagtgcaacaacaagtcaggaaattacttcttctttaccacctgttaccactacaaaaacgagcgaacaaaccactttggttaccgtgacatcctgcgaatctcatgtgtgcactgaatctatctcctctgcgattgtttccacggccaccgttactgttagcggtgccacaacagagtataccacatggtgccctatttctaccacagagataacaaagcaaactacggagacaacaaagcaaaccaaggggacaacagagcaaaccacagaaacaacaaaacaaaccacagtagttacaatttcttcttgtgaatctgacgtatgctctaagactgcttctccagccattgtatctacaagcactgctactattaatggcgttaccacagaatacacaacatggtgtcctatttccaccacagaatccaagcaacaaactacgttagttactgttacttcctgcggatctggtgtgtgttccgaaactacttctcctgccattgtttccacggccacggctactgtgaatgatgttgttacggtctattctacatggaggccacagactacgaatgaacagtctgtcagctctaaaatgaacagtgctaccagtgagacaacaaccaatactggagctgctgagacaactaccagtactggagctgctgagacgaaaacagtagtcacctcttccatttctagattcaatcatgctgaaacacagacggcttccgcgaccgatgtgattggtcacagcagtagtgttgtttctgtatccgaaactggcaacaccaagagtttgacaagttccgggttgagtactatgtctcaacagcctcgtagcacaccagcaagtagcatggtaggatctagtacagcttctttagaaatttctacgtatgctggcagtgccaacagcttattagccggtagtggtttaagtgtcttcattgcgtccttattgttggcaattatttga

SEQ ID NO: 19 - DNA, 1374 bp, Saccharomyces cerevisiae
atgacaagcgaaccagagtttcagcaggcttacgatgagatcgtttcttctgtggaggattccaaaatttttgaaaaattcccacagtataaaaaagtgttacctattgtttctgtcccggagaggatcattcaattcagggtcacgtgggaaaatgataatggcgagcaagaagtggctcaaggatacagggtgcagttcaattcagccaagggcccttacaagggtggcctacgcttccacccatcagtgaacctgtctatcctaaaatttttgggttttgaacagatcttcaagaatgcgctcactgggctagatatgggcggtggtaagggtggcctgtgtgtggacttgaaaggcaagtctgacaacgagatcagaaggatttgttatgcgttcatgagagaactgagcaggcatattggtaaggacacagacgtgcccgcaggagatattggtgtcggtggccgtgaaattggctacctattcggcgcttacagatcatacaagaactcctgggaaggtgtgttgactggtaagggtttaaactggggtggctcacttatcaggccggaggccaccgggttcggcttagtttactatacgcaagcaatgatcgattatgcaacaaacggcaaggagtcgtttgagggcaaacgtgtgacaatctccggaagtggcaatgttgcgcaatatgcagctttgaaagtgatcgagctgggtggtattgtggtgtctttatccgattcgaaggggtgcatcatctctgagacgggcattacttctgagcaaattcacgatatcgcttccgccaagatccgtttcaagtcgttagaggaaatcgttgatgaatactctactttcagcgaaagtaagatgaagtacgttgcaggagcacgcccatggacgcatgtgagcaacgtcgacattgccttgccctgtgccacccaaaacgaggtcagtggtgacgaagccaaggccctagtggcatctggcgttaagttcgttgccgaaggtgctaacatgggttctacacccgaggctatttctgttttcgaaacagcgcgtagcactgcaaccaatgcaaaggatgcagtttggtttgggccaccaaaggcagctaacctgggcggcgtggcagtatccggtctggaaatggctcagaattctcaaaaagtaacttggactgccgagcgggtcgatcaagaactaaagaagataatgatcaactgcttcaacgactgcatacaggccgcacaagagtactctacggaaaaaaatacaaacaccttgccatcattggtcaagggggccaacattgccagcttcgtcatggtggctgacgcaatgcttgaccagggagacgttttttag

SEQ ID NO: 20 - DNA, 1374 bp, Artificial Sequence
  Description of Artificial Sequence: Synthetic polynucleotide
atgacaagcgaaccagagtttcagcaggcttacgatgagatcgtttcttctgtggaggattccaaaatttttgaaaaattcccacagtataaaaaagtgttacctattgtttctgtcccggagaggatcattcaattcagggtcacgtgggaaaatgataatggcgagcaagaagtggctcaaggatacagggtgcagttcaattctgccaagggcccttacaagggtggcttgcgcttccacccatctgtgaacttatctatcttgaaatttttgggttttgaacagatcttcaagaatgcgctcactgggttagatatgggcggtggtaagggtggcctctgtgtggacttgaaaggcaagtctgacaacgagatcagaaggatttgttatgcgttcatgagagaattgagcaggcatattggtaaggacacagacgtgcccgcaggagatattggtgtcggtggccgtgaaattggctaccttttcggcgcttacagatcttacaagaactcctgggaaggtgtgttgactggtaagggtttaaactggggtggctctcttatcaggccggaggccaccgggttcggcttagtttactatacgcaagcaatgatcgattatgcaacaaacggcaaggagtcttttgagggcaaacgtgtgacaatctccggaagtggcaatgttgcgcaatatgcagctttgaaagtgatcgagttaggtggtattgtggtgtctttatccgattctaaggggtgcatcatctctgagacgggcattacttctgagcaaattcacgatatcgcttccgccaagatccgtttcaagtctttagaggaaatcgttgatgaatactctactttcagcgaaagtaagatgaagtacgttgcaggagcacgcccatggacgcatgtgagcaacgtcgacattgccttgccctgtgccacccaaaacgaggtcagtggtgacgaagccaaggccttagtggcatctggcgttaagttcgttgccgaaggtgctaacatgggttctacacccgaggctatttctgttttcgaaacagcgcgtagcactgcaaccaatgcaaaggatgcagtttggtttgggccaccaaaggcagctaacttgggcggcgtggcagtatccggtttggaaatggctcagaattctcaaaaagtaacttggactgccgagagagtcgatcaagaattgaagaagataatgatcaactgcttcaacgactgcatacaggccgcacaagagtactctacggaaaaaaatacaaacaccttgccatctttggtcaagggggccaacattgccagcttcgtcatggtggctgacgcaatgcttgaccagggagacgttttttga

SEQ ID NO: 21 - DNA, 1254 bp, Saccharomyces cerevisiae
atgagagccttagcgtatttcggtaaaggtaacatcagattcaccaaccatttaaaggagccacatattgtggcgcccgatgagcttgtgattgatatcgaatggtgtggtatttgcggtacggacctgcatgagtacacagatggtcctatctttttcccagaagatggacacacacatgagattagtcataacccattgccacaggcgatgggccacgaaatggctggtaccgttttggaggtgggccctggtgtgaaaaacttgaaagtgggagacaaggtagttgtcgagcccacaggtacatgcagagaccggtatcgttggcccctgtcgccaaacgttgacaaggaatggtgcgctgcttgcaaaaagggctactataacatttgttcatatttggggctttgtggtgcgggtgtgcagagcggtggatttgcagaacgtgttgtgatgaacgaatctcactgctacaaagtaccggacttcgtgcccttagacgttgcagctttgattcaaccgttggctgtgtgctggcatgcaattagagtctgcgagttcaaagcaggctctacggctttgatcattggtgctggccccatcggactgggcacgatactggcgttgaacgctgcaggttgcaaggacatcgtcgtttcagagcctgccaaggtaagaagagaactggctgaaaaaatgggtgccagggtttacgacccaactgcgcacgctgccaaggagagcattgattatctgaggtcgattgctgatggtggagacggcttcgattacacatttgattgctccgggttggaagtcacattgaatgctgctattcagtgtctcactttcagaggcaccgcagtgaacttggccatgtggggccatcacaagatacagttttctccgatggacatcacattgcatgaaagaaagtacacagggtccatgtgctacacacaccacgattttgaggcagtaatagaagctttggaagaaggcaggattgacattgatagagcaagacatatgataacgggcagagtcaacattgaggacggccttgatggcgccatcatgaagctgataaacgagaaggagtctacaatcaagattattctgactccaaacaatcacggagagttgaacagggaagccgataatgagaagaaagaaatttccgagctgagcagtcggaaagatcaagaaagactacgagaatcaataaacgaggctaaactgcgtcacacatga

SEQ ID NO: 22 - DNA, 1254 bp, Artificial Sequence
  Description of Artificial Sequence: Synthetic polynucleotide
atgagagccttagcgtatttcggtaaaggtaacatcagattcaccaaccatttaaaggagccacatattgtggcgcccgatgagcttgtgattgatatcgaatggtgtggtatttgcggtacggacttgcatgagtacacagatggtcctatctttttcccagaagatggacacacacatgagattagtcataacccattgccacaggcgatgggccacgaaatggctggtaccgttttggaggtgggccctggtgtgaaaaacttgaaagtgggagacaaggtagttgtcgagcccacaggtacatgcagagacagatatcgttggcccttatctccaaacgttgacaaggaatggtgcgctgcttgcaaaaagggctactataacatttgttcttatttggggctttgtggtgcgggtgtgcagagcggtggatttgcagaacgtgttgtgatgaacgaatctcactgctacaaagtaccggacttcgtgcccttagacgttgcagctttgattcaaccgttggctgtgtgctggcatgcaattagagtctgcgagttcaaagcaggctctacggctttgatcattggtgctggccccatcggattgggcacgatattggcgttgaacgctgcaggttgcaaggacatcgtcgtttctgagcctgccaaggtaagaagagaattggctgaaaaaatgggtgccagggtttacgacccaactgcgcacgctgccaaggagagcattgattatttgaggtctattgctgatggtggagacggcttcgattacacatttgattgctccgggttggaagtcacattgaatgctgctattcagtgtctcactttcagaggcaccgcagtgaacttggccatgtggggccatcacaagatacagttttctccgatggacatcacattgcatgaaagaaagtacacagggtccatgtgctacacacaccacgattttgaggcagtaatagaagctttggaagaaggcaggattgacattgatagagcaagacatatgataacgggcagagtcaacattgaggacggccttgatggcgccatcatgaagttaataaacgagaaggagtctacaatcaagattattttgactccaaacaatcacggagagttgaacagggaagccgataatgagaagaaagaaatttccgagttgagcagtagaaaagatcaagaaagattaagagaaagtataaacgaggctaaattacgtcacacatga

SEQ ID NO: 23 - DNA, 1149 bp, Saccharomyces cerevisiae
atgagagctttggcatatttcaagaagggtgatattcacttcactaatgatatccctaggccagaaatccaaaccgacgatgaggttattatcgacgtctcttggtgtgggatttgtggctcggatcttcacgagtacttggatggtccaatcttcatgcctaaagatggagagtgccataaattatccaacgctgctttacctctggcaatgggccatgagatgtcaggaattgtttccaaggttggtcctaaagtgacaaaggtgaaggttggcgaccacgtggtcgttgatgctgccagcagttgtgcggacctgcattgctggccacactccaaattttacaattccaaaccatgtgatgcttgtcagaggggcagtgaaaatctatgtacccacgccggttttgtaggactaggtgtgatcagtggtggctttgctgaacaagtcgtagtctctcaacatcacattatcccggttccaaaggaaattcctctagatgtggctgctttagttgagcctctttctgtcacctggcatgctgttaagatttctggtttcaaaaaaggcagttcagccttggttcttggtgcaggtcccattgggttgtgtaccattttggtacttaagggaatgggggctagtaaaattgtagtgtctgaaattgcagagagaagaatagaaatggccaagaaactgggcgttgaggtgttcaatccctccaagcacggtcataaatctatagagatactacgtggtttgaccaagagccatgatgggtttgattacagttatgattgttctggtattcaagttactttcgaaacctctttgaaggcattaacattcaaggggacagccaccaacattgcagtttggggtccaaaacctgtcccattccaaccaatggatgtgactctccaagagaaagttatgactggttcgatcggctatgttgtcgaagacttcgaagaagttgttcgtgccatccacaacggagacatcgccatggaagattgtaagcaactaatcactggtaagcaaaggattgaggacggttgggaaaagggattccaagagttgatggatcacaaggaatccaacgttaagattctattgacgcctaacaatcacggtgaaatgaagtaa

SEQ ID NO: 24 - DNA, 1149 bp, Artificial Sequence
  Description of Artificial Sequence: Synthetic polynucleotide
atgagagctttggcatatttcaagaagggtgatattcacttcactaatgatatccctaggccagaaatccaaaccgacgatgaggttattatcgacgtctcttggtgtgggatttgtggcagtgatcttcacgagtacttggatggtccaatcttcatgcctaaagatggagagtgccataaattatccaacgctgctttacctttggcaatgggccatgagatgtctggaattgtttccaaggttggtcctaaagtgacaaaggtgaaggttggcgaccacgtggtcgttgatgctgccagcagttgtgcggacttgcattgctggccacactccaaattttacaattccaaaccatgtgatgcttgtcagaggggcagtgaaaatttatgtacccacgccggttttgtaggattaggtgtgatcagtggtggctttgctgaacaagtcgtagtctctcaacatcacattatcccggttccaaaggaaattcctttggatgtggctgctttagttgagcctctttctgtcacctggcatgctgttaagatttctggtttcaaaaaaggcagttctgccttggttcttggtgcaggtcccattgggttgtgtaccattttggtacttaagggaatgggggctagtaaaattgtagtgtctgaaattgcagagagaagaatagaaatggccaagaaattgggcgttgaggtgttcaatccctccaagcacggtcataaatctatagagatattacgtggtttgaccaagagccatgatgggtttgattacagttatgattgttctggtattcaagttactttcgaaacctctttgaaggcattaacattcaaggggacagccaccaacattgcagtttggggtccaaaacctgtcccattccaaccaatggatgtgactctccaagagaaagttatgactggttctatcggctatgttgtcgaagacttcgaagaagttgttcgtgccatccacaacggagacatcgccatggaagattgtaagcaattgatcactggtaagcaaaggattgaggacggttgggaaaagggattccaagagttgatggatcacaaggaatccaacgttaagattttattgacgcctaacaatcacggtgaaatgaagtga

SEQ ID NO: 25 - DNA, 639 bp, Saccharomyces cerevisiae
atgtgggaacaaagacgacaaaaggtagttttttccttgactatactggtaagatatcgtctaaaacaaagcatggccaagaaaatatcaaagaattcaagagctgctagacaatcggatgctcttgaaccagaggtaaaggatttaagtgaactacctagagctgaaaaaaccgatttgactaatattttgattagaacagcagccaagaatgaggcattgctggaagcaaagatatctaagaaagccaataaaagtaagaggggcaagaagttaaataaaaaggctctggaagacaaactggccaactctatttcatccatggacagggatcgtttagtgaaggccttgaattttaccaatcgtctggacggtaaaattgccaagtccatttctcgtgccaagtacattcaaaatacaagaaaggctggctgggatagcaccaatgagactataaaaaaagagctggcttttttgaacggagggttgtctgtgcaggcaaaaagtgctagtgaaggtaatgctgaaaaggaagatgaggagatcccagaagtttttgactctttagcagaggataacacagtgcagaagactcctacaaatagattcggtgtcctgccagacgatgttgaagaatag

SEQ ID NO: 26 - DNA, 639 bp, Artificial Sequence
  Description of Artificial Sequence: Synthetic polynucleotide
atgtgggaacaaagaagacaaaaggtagttttttccttgactatattagtaagatatcgtttgaaacaaagcatggccaagaaaatatccaagaattctagagctgctagacaatctgatgctcttgaaccagaggtaaaggatttaagtgaattacctagagctgaaaaaaccgatttgactaatattttgattagaacagcagccaagaatgaggcattgttggaagcaaagatatctaagaaagccaataaaagtaagaggggcaagaagttaaataaaaaggctttggaagacaaattggccaactctatttcttccatggacagggatcgtttagtgaaggccttgaattttaccaatcgtttagacggtaaaattgccaagtccatttctcgtgccaagtacattcaaaatacaagaaaggctggctgggatagcaccaatgagactataaaaaaagagttggcttttttgaacggagggttgtctgtgcaggcaaaaagtgctagtgaaggtaatgctgaaaaggaagatgaggagatcccagaagtttttgactctttagcagaggataacacagtgcagaagactcctacaaatagattcggtgtcttgccagacgatgttgaagaatga

SEQ ID NO: 27 - DNA, 1509 bp, Saccharomyces cerevisiae
atgaaattttctgcgtatttatggtggctgtttttgaatctagcgttggtgaaaggcacttcattgctatccaacgttacattagcggaagattctttctgggagcattttcaggcttacactaatacaaagcatttaaaccaagagtggatcacaagtgaagccgtcaacaatgaaggctctaaaatatatggtgcacaatggcgactatcacagggtcgattgcaaggatccgcatgggataaaggaatcgcagttcgaacaggcaatgccgcagctatgataggacatctcttggagacacctattaatgtttcagaaacggataccttggttgtccagtacgaaattaagttggacaattctttgacgtgcggcggtgcgtttattaagttaatgtctggtttcatgaatgttgaagcattaaaacactatgcacccgatacagagggtgtcgagttagtttttggtccggattattgtgctcctgaaataaatggcgtgcaatttgccatcaataaggttgacaagatcacacatgaatctaaactaagatatttgcaagagatgcccctgtcaaaattaactgatacctcgcaatctcatctgtatacgctcataatagatgaatcagcgcagtcttttcaaattcttatagacggtaagacggttatggtaagagaacatatcgaagacaagaaaaaggtcaattttgagccacccattacaccgcctttaatgattcctgatgtttcagtagcgaaaccgcatgattgggatgatcgcatccgaatcccagatcctgaggcggtgaagctcagtgatcgggatgaacgagacccattgatgattccacatccagatggcactgaaccaccagaatggaacagctccatccccgaatacattcttgacccaaatgctcaaaagccctcgtggtggaaggaacttgagcacggggaatggataccgcccatgattaaaaatcctctttgcactgcagaacgtggttgtggccagcagataccagggctgataaataatgccaagtacaaaggtccaggcgaactcaatgaaatcataaatcccaattacatgggggaatggcatccaccggaaattgaaaacccgctatactacgaagagcagcacccattgcgcatcgaaaacgttatcagtggtgtgatcctcgagttttggagtggatctccaaacatgttgataagcaacatttatgttggtaaaaatgtaacagaggcgcaaattattgggaataagacttggctgatgagagaccgcgcgtttagaggctccgatggccccacagaacgcaaattcatgaatagcagactaggaaatctacaaacaactttccataacgaaagagaatcccctaatccatttgaccgcattatagatcgcatattagagcaacctctgaaatttgtgcttactgcggccgtcgtgctcttgacgacgtcggttctttgttgtgtagtatttacatag

SEQ ID NO: 28 - DNA, 1509 bp, Artificial Sequence
  Description of Artificial Sequence: Synthetic polynucleotide
atgaaattttctgcgtatttatggtggttatttttgaatttggcgttggtgaaaggcacttctttgttatccaacgttacattagcggaagattctttctgggagcattttcaggcttacactaatacaaagcatttaaaccaagagtggatcacaagtgaagccgtcaacaatgaaggctctaaaatatatggtgcacaatggagattatctcagggtagattgcaaggatccgcatgggataaaggaatcgcagttagaacaggcaatgccgcagctatgataggacatctcttggagacacctattaatgtttctgaaacggataccttggttgtccagtacgaaattaagttggacaattctttgacgtgcggcggtgcgtttattaagttaatgtctggtttcatgaatgttgaagcattaaaacactatgcacccgatacagagggtgtcgagttagtttttggtccggattattgtgctcctgaaataaatggcgtgcaatttgccatcaataaggttgacaagatcacacatgaatctaaattgagatatttgcaagagatgcccttatccaaattaactgatacctctcaatctcatttatatacgctcataatagatgaaagtgcgcagtcttttcaaattcttatagacggtaagacggttatggtaagagaacatatcgaagacaagaaaaaggtcaattttgagccacccattacaccgcctttaatgattcctgatgtttctgtagcgaaaccgcatgattgggatgatcgcatcagaatcccagatcctgaggcggtgaagctcagtgatagagatgaaagagacccattgatgattccacatccagatggcactgaaccaccagaatggaacagctccatccccgaatacattcttgacccaaatgctcaaaagcccagctggtggaaggaacttgagcacggggaatggataccgcccatgattaaaaatcctctttgcactgcagaacgtggttgtggccagcagataccagggttgataaataatgccaagtacaaaggtccaggcgaactcaatgaaatcataaatcccaattacatgggggaatggcatccaccggaaattgaaaacccgttgtactacgaagagcagcacccattgcgcatcgaaaacgttatcagtggtgtgatcctcgagttttggagtggatctccaaacatgttgataagcaacatttatgttggtaaaaatgtaacagaggcgcaaattattgggaataagacttggttaatgagagaccgcgcgtttagaggctccgatggccccacagaacgcaaattcatgaatagcagattaggaaatttacaaacaactttccataacgaaagagaatcccctaatccatttgaccgcattatagatcgcatattagagcaacctttgaaatttgtgcttactgcggccgtcgtgctcttgacgacgtctgttctttgttgtgtagtatttacatga

SEQ ID NO: 29 - DNA, 2643 bp, Saccharomyces cerevisiae
atggaaatttccagttcaccatggaacgacggtggatacagcccctatgagagaaacagagtcgctgtatcaccattttcatcagcgttggaaggcgaagaacgaatagaaacctctcgatctttgggtgatcattgctttgaacctttgccatacgtgacgaattatctttctattttcgcgctttttggtaaagagatatttggtgacaagggaaatgtgagctcaagaaatgaatatttgctaaaaaaatactactctttgaaaaagccatttgtattgcgacataatgggcatgcgttgaagaatcccgacatgccactccagaggaatgacatattgcaaaccaatttcatggttgacaaatttctgaatcgtactgtgcggtcagtgaattttaataatttcaagataatatcagatatgcaaagtaaaagcggtcgaggaacaaagtcaggcacaaatcagaatcaaagtgccgacgctattcaaaatatttgtctaccatctataccgtcggcgttgccttatttccagtattataggaagctattgacagttaataccaaagaatgggatattttaaaactgcacagtttatgggtaccaaagctaaggaaggattttaaagatttttcgttgtatggtgataaaaactctttaaagccgatcgatagtcactatgatgaggataataccatgaagaaaaatttattttttgaaagatctccaagtcgacagactctagatggtaaagggtgtgcctctaaggggtatgacatttcttccggtaatatgattatcccatccctattttctgaagataagctgccggctttaacttatcattgttccgtagaattaaatggaaacatttacatatttgggggattgatgccatgctacagctatgaggaggatgcgccgatgctgaacgatttttttgtagacggaataaagaacttacctccgcctttactacctcaagtgattaataatccatcaatggtcaataatcctcatctttatgtcgcttctataccatcatgccggtttagcaaacctaaaatggggggttatataccgcctccattgctatgtgttcaaggatccaaattaacggaccgacatattttcttttatggcggatttgaaatcaggacagaaacccgtggtgatgaaaatgggaagtatcatctcaagaaaagattatatgtgaataacactggttacatactcgatattatgtcgttcaagttcactaaaatagatatcatagtacaaccttccaaatataatgcatatccgacaatgtcatcgaggtttggtcacttacaaatttctattgataatccaaataggagagctagcgttcattcttcaagcatgaacgaaattcataaaatggggagtgcttccatgaaacaaggtagcagcatcacttccgggcggcttgaaaaagcagcagtactttcatcattacctcataatactgtgcacacggttataatatttggtggttacagacaaaccggtgatgatcgttacgaagcaatgaatgatttgtggaagatagagatacccgtgatacgtcgcggtaaaaaaggttattgtaagttttcagagacagctaacgcgatactactgacgccaagcgaaaaggacaaatcggattggcccgaagaaagagccttttctgccttttctgttcatgggacttcgttaatggataggagttctcttgacatgagactattgaacaacttaaaaaaccattttgttttaaaaccgtcatatatatcacaggatcgcgttgttagtcctaaaccggttttccccatgatggttcatggcacgcatcaagatcttttcaatagtggctctgcggcacaagaatcgcccaaagctggtgcctcggccagcagcgcaagtgctgcgagctttgatcccgatatggacgataatttggaaaattatatagtcaatccagggagaaaatcgtcatctattccaatgactgcgatagggagacagagattaattttaagccaagagaagccagtaggtaaaactgttgtattgcatggtgggtctaacggtctcaacgttcttgatgatatgtggttgatggacttagagtgtgagacatggactccaatagagacatttgcaaaggcagattcgagcgaagacggtgatgaaaaattggatagtgtgaacgtaggtctcgttggccacagaatggaaagtattggacgaatatgtgtatgtataggtggtatggtacaagaggatgttgaccaattttactcggagaatgatgatgagcctcctcgaaaacgcaaggtcgatacattaccgttgggtggtaattttttgaacacaattgatttaagcacgcagtgttgggaagaacataaaattactctgtccaagaaggaagacgatgaggacagacaagatagcgaaaatgaagatacaaattcaaatatagtagttggtgtcggtggcacttctttgcaatgtgacaaaagtattattttgattggcggattgatatctagacggagcaatgtaaaagaaatatatttacatggtaccataacgaaaagtatttttcctagcgtaaatcctagtgcataa

SEQ ID NO: 30 - DNA, 2643 bp, Artificial Sequence
  Description of Artificial Sequence: Synthetic polynucleotide
atggaaatttccagttctccatggaacgacggtggatacagcccctatgagagaaacagagtcgctgtatctccattttcttctgcgttggaaggcgaagaaagaatagaaacctctcgttctttgggtgatcattgctttgaacctttgccatacgtgacgaattatctttctattttcgcgctttttggtaaagagatatttggtgacaagggaaatgtgagcagcagaaatgaatatttgttgaaaaaatactactctttgaaaaagccatttgtattgagacataatgggcatgcgttgaagaatcccgacatgccactccagaggaatgacatattgcaaaccaatttcatggttgacaaatttttgaatcgtactgtgagatctgtgaattttaataatttcaagataatatctgatatgcaaagtaaaagcggtagaggaacaaagtctggcacaaatcagaatcaaagtgccgacgctattcaaaatatttgtttgccatctataccgtctgcgttgccttatttccagtattataggaagttgttgacagttaataccaaagaatgggatattttaaaattacacagtttatgggtaccaaagttaaggaaggattttaaagatttttctttgtatggtgataaaaactctttaaagccgatcgatagtcactatgatgaggataataccatgaagaaaaatttattttttgaaagatctccaagtaggcagactttagatggtaaagggtgtgcctctaaggggtatgacatttcttccggtaatatgattatcccatccttattttctgaagataagttaccggctttaacttatcattgttccgtagaattaaatggaaacatttacatatttgggggattgatgccatgctacagctatgaggaggatgcgccgatgttgaacgatttttttgtagacggaataaagaacttacctccgcctttattgcctcaagtgattaataatccaagcatggtcaataatcctcatctttatgtcgcttctataccaagttgcagatttagcaaacctaaaatggggggttatataccgcctccattgttatgtgttcaaggatccaaattaacggacaggcatattttcttttatggcggatttgaaatcaggacagaaacccgtggtgatgaaaatgggaagtatcatctcaagaaaagattatatgtgaataacactggttacatactcgatattatgagtttcaagttcactaaaatagatatcatagtacaaccttccaaatataatgcatatccgacaatgtcttccaggtttggtcacttacaaatttctattgataatccaaataggagagctagcgttcattcttctagcatgaacgaaattcataaaatggggagtgcttccatgaaacaaggtagcagcatcacttccgggcgtcttgaaaaagcagcagtactttcttctttacctcataatactgtgcacacggttataatatttggtggttacagacaaaccggtgatgatcgttacgaagcaatgaatgatttgtggaagatagagatacccgtgatacgtcgcggtaaaaaaggttattgtaagttttctgagacagctaacgcgatattattgacgccaagcgaaaaggacaaatctgattggcccgaagaaagagccttttctgccttttctgttcatgggacttctttaatggataggagttctcttgacatgagattattgaacaacttaaaaaaccattttgttttaaaaccgagctatatatctcaggatcgcgttgttagtcctaaaccggttttccccatgatggttcatggcacgcatcaagatcttttcaatagtggctctgcggcacaagaaagtcccaaagctggtgcctctgccagcagcgcaagtgctgcgagctttgatcccgatatggacgataatttggaaaattatatagtcaatccagggagaaaatcttcttctattccaatgactgcgatagggagacagagattaattttaagccaagagaagccagtaggtaaaactgttgtattgcatggtgggtctaacggtctcaacgttcttgatgatatgtggttgatggacttagagtgtgagacatggactccaatagagacatttgcaaaggcagattctagcgaagacggtgatgaaaaattggatagtgtgaacgtaggtctcgttggccacagaatggaaagtattggaagaatatgtgtatgtataggtggtatggtacaagaggatgttgaccaattttactctgagaatgatgatgagcctcctagaaaacgcaaggtcgatacattaccgttgggtggtaattttttgaacacaattgatttaagcacgcagtgttgggaagaacataaaattactttatccaagaaggaagacgatgaggacagacaagatagcgaaaatgaagatacaaatagtaatatagtagttggtgtcggtggcacttctttgcaatgtgacaaaagtattattttgattggcggattgatatctagaagaagcaatgtaaaagaaatatatttacatggtaccataacgaaaagtatttttcctagcgtaaatcctagtgcatga

SEQ ID NO: 31 - DNA, 543 bp, Saccharomyces cerevisiae
atgccaccaccatcaagaagtagaataaacaaaacaagaacattaggaatagtgggtacagctatagcagtgttggtcacgtcctactatatatatcaaaaggtgacaagtgcaaaggaagataatggggcacgacctccagagggtgattcagtaaaagagaacaaaaaggcaaggaagagcaaatgtattataatgagcaagtcgatacaaggactgcccataaagtgggaggagtacgccgctgatgaagtggttttgctggtacctacgagccacactgatggatcaatgaaacaagccattggggatgcctttcgcaagacgaaaaacgaacacaaaatcatatattgcgatagcatggatggattatggtcatgtgtaagacggctaggtaaatttcagtgcatattgaactccagggacttcacaagtagtggtggtagcgatgcagcagtcgttcctgaagatataggcaggtttgtcaaatttgttgttgatagcgatgtagaggatgtgctgattgacactttatgcaattaa

SEQ ID NO: 32 - DNA, 543 bp, Artificial Sequence
  Description of Artificial Sequence: Synthetic polynucleotide
atgccaccaccatctagaagtagaataaacaaaacaagaacattaggaatagtgggtacagctatagcagtgttggtcacgtcctactatatatatcaaaaggtgacaagtgcaaaggaagataatggggcaagacctccagagggtgattctgtaaaagagaacaaaaaggcaaggaagagcaaatgtattataatgagcaagagtatacaaggattgcccataaagtgggaggagtacgccgctgatgaagtggttttgttagtacctacgagccacactgatggatccatgaaacaagccattggggatgcctttcgcaagacgaaaaacgaacacaaaatcatatattgcgatagcatggatggattatggtcttgtgtaagaagattaggtaaatttcagtgcatattgaactccagggacttcacaagtagtggtggtagcgatgcagcagtcgttcctgaagatataggcaggtttgtcaaatttgttgttgatagcgatgtagaggatgtgttgattgacactttatgcaattga

SEQ ID NO: 33 - DNA, 2142 bp, Saccharomyces cerevisiae
atgtcgccctctgccgtacaatcatcaaaactagaagaacagtcaagtgaaattgacaagttgaaagcaaaaatgtcccagtctgccgccactgcgcagcagaagaaggaacatgagtatgaacatttgacttcggtcaagatcgtgccacaacggcccatctcagatagactgcagcccgcaattgctacccactattctccacacttggacgggttgcaggactatcagcgcttgcacaaggagtctattgaagaccctgctaagttcttcggttctaaagctacccaatttttaaactggtctaagccattcgataaggtgttcatcccagaccctaaaacgggcaggccctccttccagaacaatgcatggttcctcaacggccaattaaacgcctgttacaactgtgttgacagacatgccttgaagactcctaacaagaaagccattattttcgaaggtgacgagcctggccaaggctattccattacctacaaggaactacttgaagaagtttgtcaagtggcacaagtgctgacttactctatgggcgttcgcaagggcgatactgttgccgtgtacatgcctatggtcccagaagcaatcataaccttgttggccatttcccgtatcggtgccattcactccgtagtctttgccgggttttcttccaactccttgagagatcgtatcaacgatggggactctaaagttgtcatcactacagatgaatccaacagaggtggtaaagtcattgagactaaaagaattgttgatgacgcgctaagagagaccccaggcgtgagacacgtcttggtttatagaaagaccaacaatccatctgttgctttccatgcccccagagatttggattgggcaacagaaaagaagaaatacaagacctactatccatgcacacccgttgattctgaggatccattattcttgttgtatacgtctggttctactggtgcccccaagggtgttcaacattctaccgcaggttacttgctgggagctttgttgaccatgcgctacacttttgacactcaccaagaagacgttttcttcacagctggagacattggctggattacaggccacacttatgtggtttatggtcccttactatatggttgtgccactttggtctttgaagggactcctgcgtacccaaattactcccgttattgggatattattgatgaacacaaagtcacccaattttatgttgcgccaactgctttgcgtttgttgaaaagagctggtgattcctacatcgaaaatcattccttaaaatctttgcgttgcttgggttcggtcggtgagccaattgctgctgaagtttgggagtggtactctgaaaaaataggtaaaaatgaaatccccattgtagacacctactggcaaacagaatctggttcgcatctggtcaccccgctggctggtggtgttacaccaatgaaaccgggttctgcctcattccccttcttcggtattgatgcagttgttcttgaccctaacactggtgaagaacttaacaccagccacgcagagggtgtccttgccgtcaaagctgcatggccatcatttgcaagaactatttggaaaaatcatgataggtatctagacacttatttgaacccttaccctggctactatttcactggtgatggtgctgcaaaggataaggatggttatatctggattttgggtcgtgtagacgatgtggtgaacgtctctggtcaccgtctgtctaccgctgaaattgaggctgctattatcgaagatccaattgtggccgagtgtgctgttgtcggattcaacgatgacttgactggtcaagcagttgctgcatttgtggtgttgaaaaacaaatctagttggtccaccgcaacagatgatgaattacaagatatcaagaagcatttggtctttactgttagaaaagacatcgggccatttgccgcaccaaaattgatcattttagtggatgacttgcccaagacaagatccggcaaaattatgagacgtattttaagaaaaatcctagcaggagaaagtgaccaactaggcgacgtttctacattgtcaaaccctggcattgttagacatctaattgattcggtcaagttgtaa

SEQ ID NO: 34 - DNA, 2142 bp, Artificial Sequence
  Description of Artificial Sequence: Synthetic polynucleotide
atgtctccctctgccgtacaatcttctaaattagaagaacagagcagtgaaattgacaagttgaaagcaaaaatgtcccagtctgccgccactgcgcagcagaagaaggaacatgagtatgaacatttgactagtgtcaagatcgtgccacaaagacccatcagtgatagattacagcccgcaattgctacccactattctccacacttggacgggttgcaggactatcagcgcttgcacaaggagtctattgaagaccctgctaagttcttcggttctaaagctacccaatttttaaactggtctaagccattcgataaggtgttcatcccagaccctaaaacgggcaggccctccttccagaacaatgcatggttcctcaacggccaattaaacgcctgttacaactgtgttgacagacatgccttgaagactcctaacaagaaagccattattttcgaaggtgacgagcctggccaaggctattccattacctacaaggaattgcttgaagaagtttgtcaagtggcacaagtgttgacttactctatgggcgttcgcaagggcgatactgttgccgtgtacatgcctatggtcccagaagcaatcataaccttgttggccatttcccgtatcggtgccattcactccgtagtctttgccgggttttcttccaactccttgagagatcgtatcaacgatggggactctaaagttgtcatcactacagatgaatccaacagaggtggtaaagtcattgagactaaaagaattgttgatgacgcgttaagagagaccccaggcgtgagacacgtcttggtttatagaaagaccaacaatccatctgttgctttccatgcccccagagatttggattgggcaacagaaaagaagaaatacaagacctactatccatgcacacccgttgattctgaggatccattattcttgttgtatacgtctggttctactggtgcccccaagggtgttcaacattctaccgcaggttacttgttgggagctttgttgaccatgcgctacacttttgacactcaccaagaagacgttttcttcacagctggagacattggctggattacaggccacacttatgtggtttatggtcccttattatatggttgtgccactttggtctttgaagggactcctgcgtacccaaattactcccgttattgggatattattgatgaacacaaagtcacccaattttatgttgcgccaactgctttgcgtttgttgaaaagagctggtgattcctacatcgaaaatcattccttaaaatctttgcgttgcttgggttctgtcggtgagccaattgctgctgaagtttgggagtggtactctgaaaaaataggtaaaaatgaaatccccattgtagacacctactggcaaacagaatctggttctcatttggtcaccccgttagctggtggtgttacaccaatgaaaccgggttctgcctctttccccttcttcggtattgatgcagttgttcttgaccctaacactggtgaagaacttaacaccagccacgcagagggtgtccttgccgtcaaagctgcatggccatcttttgcaagaactatttggaaaaatcatgataggtatttggacacttatttgaacccttaccctggctactatttcactggtgatggtgctgcaaaggataaggatggttatatctggattttgggtcgtgtagacgatgtggtgaacgtctctggtcaccgtttatctaccgctgaaattgaggctgctattatcgaagatccaattgtggccgagtgtgctgttgtcggattcaacgatgacttgactggtcaagcagttgctgcatttgtggtgttgaaaaacaaatctagttggtccaccgcaacagatgatgaattacaagatatcaagaagcatttggtctttactgttagaaaagacatcgggccatttgccgcaccaaaattgatcattttagtggatgacttgcccaagacaagatccggcaaaattatgagacgtattttaagaaaaatcttggcaggagaaagtgaccaattaggcgacgtttctacattgtctaaccctggcattgttagacatttgattgattctgtcaagttgtga

SEQ ID NO: 35 - DNA, 2352 bp, Saccharomyces cerevisiae
atgatcttcctaaacaccttcgcaaggtgccttttaacgtgtttcgtactgtgcagcggtacagcacgttcctctgacacaaacgacactactccggcgtctgcaaagcatttgcagaccacttctttattgacgtgtatggacaattcgcaattaacggcatcattctttgatgtgaaattttaccccgataataatactgttatctttgatattgacgctacgacgacgcttaatgggaacgtcactgtgaaggctgagctgcttacttacggactgaaagtcctggataagacttttgatttatgttccttgggccaagtatcgctttgccccctaagtgctgggcgtattgatgtcatgtccacacaggtgatcgaatcatccattaccaagcaatttcccggcattgcttacaccattccagatttggacgcacaagtacgtgtggtggcatacgctcagaatgacacggaattcgaaactccgctggcttgtgtccaggctatcttgagtaacgggaagacagtgcaaacaaagtatgcggcctggcccattgccgctatctcaggtgtcggtgtacttacctcagggtttgtgtctgtgatcggttactcagccactgctgctcacattgcgtccaactccatctcattgttcatatacttccaaaatctagctatcactgcaatgatgggtgtctcaagggttccacccattgctgccgcgtggacgcagaatttccaatggtccatgggtatcatcaatacaaacttcatgcaaaagatttttgattggtacgtacaggccactaatggtgtctcaaatgttgtggtagctaacaaggacgtcttgtccattagtgtgcaaaaacgtgctatctctatggcatcgtctagtgattacaattttgacaccattttagacgattcgaatctgtacaccacttctgagaaggatccaagcaattactcagccaagattctcgtgttaagaggtatagaaagagttgcttatttggctaatattgagctatctaatttctttttgaccggtattgtgttttttctattcttcctatttgtagttgtcgtctctttgattttctttaaggcgctattggaagttcttacaagagcaagaatattgaaagagacttccaatttcttccaatataggaagaactgggggagtattatcaaaggcacccttttcagattatctatcatcgccttccctcaagtttctcttctggcgatttgggaatttactcaggtcaactctccagcgattgttgttgatgcggtagtaatattactgatcatcacgggacttctggtttatggaactataagggttttcatcaagggaagagagtctctcagattatacaagaatcctgcgtacctactttacagtgatacctacttcttgaacaagtttgggttcttatacgttcaattcaaagcagataagttttggtggcttttacccttattaagttatgcgttcttaagatccctgtttgttgccgttttacaaaaccaaggtaaggctcaagcaatgatcatctttgtcattgaactagcttacttcgtttgtctctgttggataagaccatatttggacaagagaactaatgttttcaatattgctattcatttggtgaatttgatcaatgcatttttctttttgtttttcagtaatttgttcaagcaaccagcagtggtttcgtcagtgatggcggttattctgttcgttttgaacgcggtgtttgctctattcctattattgttcactattgtcacctgtacactggcattactacacagaaacccagatgtccgttaccaaccaatgaaagatgaccgtgtgtcattcattcctaagattcaaaatgatttcgatggcaaaaacaaaaatgattctgaactgtttgaattgagaaaagctgttatggacaccaatgaaaatgaggaagaaaaaatgttccgtgacgacactttcggcaagaacctgaatgcaaacacaaatacagcaagactctttgatgatgagactagttcatcctcttttaagcaaaattcctctcccttcgatgcctcggaagtaacggagcaacctgtgcaaccaacctccgctgtcatgggtacgggtggcagcttcttgtctccacagtaccaacgtgcgtcatctgcttctcgtactaatctagcgccgaataatacaagcacctccagtttaatgaagcctgaatcaagtctctacctggggaattccaataaatcatattcgcattttaacaacaacggcagcaacgaaaacgcccgcaacaacaacccatatttgtaa

SEQ ID NO: 36 - DNA, 2352 bp, Artificial Sequence
  Description of Artificial Sequence: Synthetic polynucleotide
atgatcttcttgaacaccttcgcaaggtgccttttaacgtgtttcgtattgtgcagcggtacagcacgttcctctgacacaaacgacactactccggcgtctgcaaagcatttgcagaccacttctttattgacgtgtatggacaattctcaattaacggcatctttctttgatgtgaaattttaccccgataataatactgttatctttgatattgacgctacgacgacgcttaatgggaacgtcactgtgaaggctgagttgcttacttacggattgaaagtcttggataagacttttgatttatgttccttgggccaagtatctctttgccccttgagtgctgggcgtattgatgtcatgtccacacaggtgatcgaatcttccattaccaagcaatttcccggcattgcttacaccattccagatttggacgcacaagtacgtgtggtggcatacgctcagaatgacacggaattcgaaactccgttagcttgtgtccaggctatcttgagtaacgggaagacagtgcaaacaaagtatgcggcctggcccattgccgctatcagtggtgtcggtgtacttacctctgggtttgtgtctgtgatcggttactctgccactgctgctcacattgcgtccaactccatctctttgttcatatacttccaaaatttggctatcactgcaatgatgggtgtctccagggttccacccattgctgccgcgtggacgcagaatttccaatggtccatgggtatcatcaatacaaacttcatgcaaaagatttttgattggtacgtacaggccactaatggtgtctccaatgttgtggtagctaacaaggacgtcttgtccattagtgtgcaaaaacgtgctatctctatggcatcttctagtgattacaattttgacaccattttagacgattctaatctttacaccacttctgagaaggatccaagcaattactctgccaagattctcgtgttaagaggtatagaaagagttgcttatttggctaatattgagctttctaatttctttttgaccggtattgtgttttttcttttcttcttatttgtagttgtcgtctctttgattttctttaaggcgttattggaagttcttacaagagcaagaatattgaaagagacttccaatttcttccaatataggaagaactgggggagtattatcaaaggcacccttttcagattatctatcatcgccttccctcaagtttctcttttggcgatttgggaatttactcaggtcaactctccagcgattgttgttgatgcggtagtaatattattgatcatcacgggacttttggtttatggaactataagggttttcatcaagggaagagagtctctcagattatacaagaatcctgcgtacttactttacagtgatacctacttcttgaacaagtttgggttcttatacgttcaattcaaagcagataagttttggtggcttttacccttattaagttatgcgttcttaagatccttatttgttgccgttttacaaaaccaaggtaaggctcaagcaatgatcatctttgtcattgaattggcttacttcgtttgtctctgttggataagaccatatttggacaagagaactaatgttttcaatattgctattcatttggtgaatttgatcaatgcatttttctttttgtttttcagtaatttgttcaagcaaccagcagtggtttcttctgtgatggcggttattcttttcgttttgaacgcggtgtttgctttattcttattattgttcactattgtcacctgtacattagcattattacacagaaacccagatgtccgttaccaaccaatgaaagatgaccgtgtgtctttcattcctaagattcaaaatgatttcgatggcaaaaacaaaaatgattctgaattatttgaattgagaaaagctgttatggacaccaatgaaaatgaggaagaaaaaatgttccgtgacgacactttcggcaagaacttgaatgcaaacacaaatacagcaagactctttgatgatgagactagttcttcctcttttaagcaaaattcctctcccttcgatgccagtgaagtaacggagcaacctgtgcaaccaacctccgctgtcatgggtacgggtggcagcttcttgtctccacagtaccaacgtgcgtcttctgcttctcgtactaatttggcgccgaataatacaagcacctccagtttaatgaagcctgaaagtagtctctacttggggaattccaataaaagttattctcattttaacaacaacggcagcaacgaaaacgcccgcaacaacaacccatatttgtga

SEQ ID NO: 37 - DNA, 3144 bp, Saccharomyces cerevisiae
atggtcgaaaatagtacgcagaaggccccacatgccggaaatgatgataatagctctaccaagccatattcggaggcgtttttcttagggttcaataacccaacgcctggattagaagctgagcactcaagcacatcgcctgcccccgagaactccgaaacacataataggaaaagaaatagaatattgtttgtctgccaggcttgtaggaagtcaaaaacaaagtgtgatagagaaaaacctgaatgtggtcgatgcgtcaagcatgggttaaaatgtgtttatgacgtatcaaaacagccagcaccacgaattccgagtaaagacgccattatatcaaggttggaaaaagatatgttttattggaaagataaagctatgaagctactaacagagagagaggtgaatgaatcaggcaagagatcagcaagtccgatcaatacaaacaatgctagcggggacagtcctgataccaagaagcagcataaaatggaacctatatatgaacaaagtggtaacggggatataaacaatggtaccagaaatgatattgaaatcaacttgtatagaagtcatccaaccatgatcatgagtaaagtcatgaaaagagaagttaagccgttatctgaaaattatattataattcaggactgttttctaaaaatcctggtcacttcagtgttccttgacacttcaaagaacacgatgataccggcattgacggcaaacgcgaatattacaagagcccagcctagcgtagcaaataaccttttgaaattgaaggaaatgctaatcagacagtgtcaaaccgaagatgaaaaaaatcgtgtaaacgaattcactgatagaatactacaaaatacaaattcaaatagaaacttgaaaatcggtatgctattatcaatgctttacaattctgtcggttaccaatatctggaggatcattgccctcaaggtggcgaatattcggatttattgagaaatttgatcaatgaatgtgaagctattttgccatcttacgaaattattgaacgctacaagaaccacttttatgagtacgtttatccaagtctacctttcatcgaattagaaatttttgaagaatcattaagtcaaacaatttttccggacccaaacaacccctccaaggtgcaaatacgtatgggtagcacacatttgagagctaaggtggaaaacttgagtcttctattggttatcttgaaactctcatacatgtcaataaggtttttagatcatagtacagcagactcgagtttttatctttcaaaggaaataattgataaatacccaataccgaacgattttattttattgagtcaaagatgtctagcatcggaaaattggtgtgcatgcgctaatgaaaacatcatatcatgtttactatatatctggtctttttttgctttttctcctgaagagggtgatttctttctcgagcaccccaccgatgttatcagtagtttgataatgatgctttccacctcgattggtctccacagagatccttcagatttccctcaattgatttccccgtccacctcagataaaagaaccttgaatcacagaagaatactctggttgagtatcgttaccgtttgttcgtttgaagcaagtctcaaaggtagacattctgtctcaccgatatctttaatggccttattcctaaatattaaggatcctgattctctgacggtatatatgaaccgagttaggggcgatctaagcgatatcaataatcacaaacttttgagaattcataaatttacattcaagagagcccagcttgcgttactcctgtcggacttagataacttgacgatgacatactatggtagtttccatttgcattcaattgaattcataagagaaaagattgagatttttgtggaggaaaactttcccatagtaccattaaaaagtgtcgcacaggataagtcagaccttgatgacatgaatgtgatttcagaaatgaatatattatcttcagaaaattcttcttcatttcacaatcgaataatgaataaactattgatgttgagaacttcaatggccgtattcttgcattttgaaacacttatcactaaggataaaagtatcttcccattctacaagaaatactttatggttagctgtatggatgcgttgtcactaataaattatttcaataagtttttcaacggagaatatcgacacgcaatatcttctttaaccagttttaatgttacaaaatttattcagttagcactatccagcacaatcttcagcctattagggattatactaagaataggtttagccatccatatgttatcttctgaagtacaaaagttatcgggaacgacagatccaagaataaaggagttaaataccaaagtcgaaaaatttagtaccctgcaaagagatctcgagtctgctttagaaggtatatattgctctgcttcggaacatttaagattcacatacttccccgtttttaagatgttggctttattcgatgtcattgtacaaaggatgagaaagggtgaattatggcacggcatatttacgatgattcaaatggaacaaatgcattctaggataatcaagacattaagcattaccttaggagtcaaactggacaaaaaggataggctattagaggaattgatggcatgcaatcacgttgcgaattttagcgttgaagatatagatgagctgaaccgtaatatcaaaaaagagattcaaatttcttcaggattgaagccgcctgtaaacacaattgacttaaccaacggcgaaccattcggaaatgctgttcctaccttcacaaagacatggagttcatccttagataatttagaaaaactatcatcggccgctgcagttggtcagagcttggactacaacagtggtttacgtcagggtcctttggcgggtggtggttcaaaagagcaaacgccaatagccgggatgaataacttgaacaattcaatcaatgctacaccaattgtcgataactcatctggatcacaacttcctaatggtttcgatagaggccaagcgaataatactccttttccaggttattttggaggtttggatttatttgattatgactttttgtttggcaatgactttgcttaa

SEQ ID NO: 38 - DNA, 3144 bp, Artificial Sequence
  Description of Artificial Sequence: Synthetic polynucleotide
atggtcgaaaatagtacgcagaaggccccacatgccggaaatgatgataatagctctaccaagccatattctgaggcgtttttcttagggttcaataacccaacgcctggattagaagctgagcacagtagcacatctcctgcccccgagaactccgaaacacataataggaaaagaaatagaatattgtttgtctgccaggcttgtaggaagagtaaaacaaagtgtgatagagaaaaacctgaatgtggtagatgcgtcaagcatgggttaaaatgtgtttatgacgtatccaaacagccagcaccaagaattccgagtaaagacgccattatatctaggttggaaaaagatatgttttattggaaagataaagctatgaagttattaacagagagagaggtgaatgaaagtggcaagagaagtgcaagtccgatcaatacaaacaatgctagcggggacagtcctgataccaagaagcagcataaaatggaacctatatatgaacaaagtggtaacggggatataaacaatggtaccagaaatgatattgaaatcaacttgtatagaagtcatccaaccatgatcatgagtaaagtcatgaaaagagaagttaagccgttatctgaaaattatattataattcaggactgttttttgaaaatcctcgtcacttctgtgttccttgacacttctaagaacacgatgataccggcattgacggcaaacgcgaatattacaagagcccagcctagcgtagcaaataaccttttgaaattgaaggaaatgttgatcagacagtgtcaaaccgaagatgaaaaaaatcgtgtaaacgaattcactgatagaatattgcaaaatacaaatagtaatagaaacttgaaaatcggtatgcttttatctatgctttacaattctgtcggttaccaatatttggaggatcattgccctcaaggtggcgaatattctgatttattgagaaatttgatcaatgaatgtgaagctattttgccatcttacgaaattattgaacgctacaagaaccacttttatgagtacgtttatccaagtttacctttcatcgaattagaaatttttgaagaatctttaagtcaaacaatttttccggacccaaacaacccctccaaggtgcaaatacgtatgggtagcacacatttgagagctaaggtggaaaacttgagtcttttattggttatcttgaaactctcttacatgagtataaggtttttagatcatagtacagcagacagcagtttttatctttccaaggaaataattgataaatacccaataccgaacgattttattttattgagtcaaagatgtttggcatctgaaaattggtgtgcatgcgctaatgaaaacatcatatcttgtttattatatatctggtctttttttgctttttctcctgaagagggtgatttctttctcgagcaccccaccgatgttatcagtagtttgataatgatgctttccacctctattggtctccacagagatccttctgatttccctcaattgatttccccgtccacctctgataaaagaaccttgaatcacagaagaatactctggttgagtatcgttaccgtttgttcctttgaagcaagtctcaaaggtagacattctgtctctccgatatctttaatggccttattcttgaatattaaggatcctgattctttgacggtatatatgaacagagttaggggcgatttgagcgatatcaataatcacaaacttttgagaattcataaatttacattcaagagagcccagcttgcgttactcttgagtgacttagataacttgacgatgacatactatggtagtttccatttgcattctattgaattcataagagaaaagattgagatttttgtggaggaaaactttcccatagtaccattaaaaagtgtcgcacaggataagagtgaccttgatgacatgaatgtgatttctgaaatgaatatattatcttctgaaaattcttcttcttttcacaatagaataatgaataaacttttgatgttgagaacttctatggccgtattcttgcattttgaaacacttatcactaaggataaaagtatcttcccattctacaagaaatactttatggttagctgtatggatgcgttgtccttgataaattatttcaataagtttttcaacggagaatatagacacgcaatatcttctttaaccagttttaatgttacaaaatttattcagttagcattgtccagcacaatcttcagcttattagggattatattaagaataggtttagccatccatatgttatcttctgaagtacaaaagttatctggaacgacagatccaagaataaaggagttaaataccaaagtcgaaaaatttagtaccttacaaagagatctcgagtctgctttagaaggtatatattgctctgcttctgaacatttaagattcacatacttccccgtttttaagatgttggctttattcgatgtcattgtacaaaggatgagaaagggtgaattatggcacggcatatttacgatgattcaaatggaacaaatgcattctaggataatcaagacattaagcattaccttaggagtcaaattagacaaaaaggataggttattagaggaattgatggcatgcaatcacgttgcgaattttagcgttgaagatatagatgagttgaaccgtaatatcaaaaaagagattcaaatttcttctggattgaagccgcctgtaaacacaattgacttaaccaacggcgaaccattcggaaatgctgttcctaccttcacaaagacatggagttcttccttagataatttagaaaaattatcttctgccgctgcagttggtcagagcttggactacaacagtggtttacgtcagggtcctttggcgggtggtggttccaaagagcaaacgccaatagccgggatgaataacttgaacaattccatcaatgctacaccaattgtcgataactcttctggatctcaacttcctaatggtttcgatagaggccaagcgaataatactccttttccaggttattttggaggtttggatttatttgattatgactttttgtttggcaatgactttgcttga

SEQ ID NO: 39 - DNA, 741 bp, Saccharomyces cerevisiae
atggcatctaatcaacctggcaagtgttgctttgaaggagtttgtcacgatggaacacccaagggtcgtcgtgaagaaatcttcggtttagatacttatgcagcaggctctacatctcccaaggaaaaagttatagttatcttgacagatgtgtatggcaataaattcaacaatgttttattaacggccgacaaatttgctagtgctgggtacatggtctttgttcccgatattttattcggcgatgctatctcatcggacaaaccaattgatcgtgatgcctggtttcaaagacattctcctgaagtcaccaagaaaattgttgatggattcatgaagttgttaaaacttgaatatgacccaaagtttattggcgttgtgggttactgttttggtgcaaagtttgccgtccaacacattagtggcgacgggggtcttgccaatgctgcagccattgcacatccatctttcgtcagcatcgaggaaattgaagcaattgatagcaagaaaccaatattgatttcagcagcggaagaggatcacatctttccggcaaacttaagacacttaacggaggaaaaattaaaggataatcacgctacttaccagttagacctcttcagtggtgtggctcacgggtttgcagcaagaggcgatatatccatacctgccgtaaaatatgcgaaggagaaagtcttgctcgaccaaatatactggttcaatcatttttcgaatgtttaa

SEQ ID NO: 40 - DNA, 741 bp, Artificial Sequence
  Description of Artificial Sequence: Synthetic polynucleotide
atggcatctaatcaacctggcaagtgttgctttgaaggagtttgtcacgatggaacacccaagggtcgtcgtgaagaaatcttcggtttagatacttatgcagcaggctctacatctcccaaggaaaaagttatagttatcttgacagatgtgtatggcaataaattcaacaatgttttattaacggccgacaaatttgctagtgctgggtacatggtctttgttcccgatattttattcggcgatgctatctcttctgacaaaccaattgatcgtgatgcctggtttcaaagacattctcctgaagtcaccaagaaaattgttgatggattcatgaagttgttaaaacttgaatatgacccaaagtttattggcgttgtgggttactgttttggtgcaaagtttgccgtccaacacattagtggcgacgggggtcttgccaatgctgcagccattgcacatccatctttcgtcagcatcgaggaaattgaagcaattgatagcaagaaaccaatattgatttctgcagcggaagaggatcacatctttccggcaaacttaagacacttaacggaggaaaaattaaaggataatcacgctacttaccagttagacctcttcagtggtgtggctcacgggtttgcagcaagaggcgatatatccatacctgccgtaaaatatgcgaaggagaaagtcttgctcgaccaaatatactggttcaatcatttttctaatgtttga

SEQ ID NO: 41 - DNA, 1989 bp, Saccharomyces cerevisiae
atgactaaagaaacgattcgggtagttatttgcggtgatgaaggggttggtaaatccagtctgattgtatcattaacaaaagctgaattcataccgaccatacaggacgtgctgccacccatcagtatcccaagagatttctcatcatcacctacatattctcctaagaatacagtacttatagacacttcagattcggacctcatagctttagaccatgagttgaagtccgccgacgtaatttggcttgtgtattgcgatcacgaatcgtatgaccatgtttctctcttttggttgcctcatttcagatccctggggttgaatattcctgtcattctctgcaaaaataaatgtgattccatatcgaatgttaatgccaatgcaatggtcgtgtcagagaacagtgatgatgatatcgataccaaagtggaggatgaagaatttatcccaatattaatggagtttaaagaaatcgacacttgcattaagacaagtgccaagacacagtttgatcttaaccaagcgttttatctttgccaaagggctataacacacccaatatcacctttatttgatgccatggtaggtgaactaaagccattggctgtcatggctttaaaaagaatttttcttttaagcgatttaaaccaggactcatatttagatgacaacgaaatcttgggcttacaaaaaaagtgcttcaataagagtatcgatgtaaacgaactgaattttattaaagatttgcttttggatatttccaagcacgatcaagagtacattaaccgcaagctatacgtaccgggaaaaggcatcaccaaagatggtttccttgtactgaacaaaatatacgctgaaagggggagacacgaaactacatgggctatcctaagaactttccattacacagattccttgtgtattaatgacaaaattctccatccgaggttggttgtccctgacacttccagtgtggaattgagccccaagggctacagatttcttgtagatatttttttgaagtttgatatcgacaatgatggtggtttgaataatcaagaattacatcgtctatttaagtgcacaccagggctgcctaaactatggacctcaacgaatttccccttctccactgtcgtaaacaacaagggttgcatcaccttacaaggctggctagcacaatggagtatgacgactttcttgaactatagcacaactaccgcttacttggtgtattttggctttcaggaagatgcaagactagccctacaagtaaccaagccaaggaaaatgagacgccgttccgggaaactttacagatccaatatcaatgacagaaaagtgttcaattgctttgtcattggaaagccatgttgcggcaaaagctctttgctagaggccttcttgggcagatctttctcggaggagtattctccgacaatcaaaccaagaattgcagtcaatagtttagaactcaaaggtgggaaacagtactatttgattttgcaagaacttggagaacaggaatacgccatactagagaataaggataagttaaaagaatgtgacgtaatctgtctaacatacgattccagcgacccagaatcattctcctacttagtttcgcttctagacaaattcacacatttacaagatctaccgttggtatttgtagcttctaaggcagatttggataagcagcaacaaaggtgtcaaatccaaccagatgaactggcagacgagctatttgtgaaccacccactgcacatatcatccagatggctaagttcccttaatgaattgtttattaaaatcacagaagctgctcttgatcctggcaaaaacactccgggattgccagaagaaacagcagcaaaagatgtcgactacagacaaacggctctcatttttgggtccactgttggattcgtagcactatgttcctttacgttaatgaaattattcaaatcatcaaaattctcaaaataa

SEQ ID NO: 42 - DNA, 1989 bp, Artificial Sequence
  Description of Artificial Sequence: Synthetic polynucleotide
atgactaaagaaacgattagagtagttatttgcggtgatgaaggggttggtaaatccagtttgattgtatctttaacaaaagctgaattcataccgaccatacaggacgtgttaccacccatcagtatcccaagagatttctcttcttctcctacatattctcctaagaatacagtacttatagacacttctgattctgacctcatagctttagaccatgagttgaagtccgccgacgtaatttggcttgtgtattgcgatcacgaaagttatgaccatgtttctctcttttggttgcctcatttcagatccttagggttgaatattcctgtcattctctgcaaaaataaatgtgattccatatccaatgttaatgccaatgcaatggtcgtgtctgagaacagtgatgatgatatcgataccaaagtggaggatgaagaatttatcccaatattaatggagtttaaagaaatcgacacttgcattaagacaagtgccaagacacagtttgatcttaaccaagcgttttatctttgccaaagggctataacacacccaatatctcctttatttgatgccatggtaggtgaattgaagccattggctgtcatggctttaaaaagaatttttcttttaagcgatttaaaccaggactcttatttagatgacaacgaaatcttgggcttacaaaaaaagtgcttcaataagagtatcgatgtaaacgaattgaattttattaaagatttgcttttggatatttccaagcacgatcaagagtacattaaccgcaagttgtacgtaccgggaaaaggcatcaccaaagatggtttccttgtattgaacaaaatatacgctgaaagggggagacacgaaactacatgggctatcttaagaactttccattacacagattccttgtgtattaatgacaaaattctccatccgaggttggttgtccctgacacttccagtgtggaattgagccccaagggctacagatttcttgtagatatttttttgaagtttgatatcgacaatgatggtggtttgaataatcaagaattacatcgtttgtttaagtgcacaccagggttgcctaaattatggacctctacgaatttccccttctccactgtcgtaaacaacaagggttgcatcaccttacaaggctggttggcacaatggagtatgacgactttcttgaactatagcacaactaccgcttacttggtgtattttggctttcaggaagatgcaagattggccttgcaagtaaccaagccaaggaaaatgagacgccgttccgggaaactttacagatccaatatcaatgacagaaaagtgttcaattgctttgtcattggaaagccatgttgcggcaaaagctctttgttggaggccttcttgggcagatctttcagtgaggagtattctccgacaatcaaaccaagaattgcagtcaatagtttagaactcaaaggtgggaaacagtactatttgattttgcaagaacttggagaacaggaatacgccatattggagaataaggataagttaaaagaatgtgacgtaatctgtttaacatacgattccagcgacccagaatctttctcctacttagtttcccttttggacaaattcacacatttacaagatttaccgttggtatttgtagcttctaaggcagatttggataagcagcaacaaaggtgtcaaatccaaccagatgaattggcagacgagttatttgtgaaccacccattacacatatcttccagatggttgagttcccttaatgaattgtttattaaaatcacagaagctgctcttgatcctggcaaaaacactccgggattgccagaagaaacagcagcaaaagatgtcgactacagacaaacggctctcatttttgggtccactgttggattcgtagcattatgttcctttacgttaatgaaattattcaaatcttctaaattctccaaatga

SEQ ID NO: 43 - DNA, 1869 bp, Saccharomyces cerevisiae
atggtacgtcgatggattcctagtggcaggcatcttcgcaataatgacaacactggtgatgatgacgacagcgagttcacaaactcgatggattctgggatgtccataccatcactcagggactccatgaccacgaggtcatctcataacgatcccatcaagcctgctctgatgaacgattccaacaaagtcaaaaatttggagaaggagttgactaatgccaaaatcaagattcaagtactctatgaatacattcgcagaatccctaataaagacggcaatgcaccatcgctgggcaatgacactgattttagaaattcgattatcgagggtctaaatcttgaaataaacaaattgaaacaggatttaaaggcgaaggaagtcgagtaccaagatacgctacaattcgttcaagagaatttagaaaattcggaaagtatcgtgaatacgatcaatcacctattgtcctttatattgacgcattttaatgagcaagatgaaaatgcccatcttcttgataaagaagagagggagaccctggaggaaactttagagctgagctcggattatgttcttgaaaaaatggatactttgtccaagttcatcatccaattcttgcaggactttttgcattccaaaagtcgagcggaatcaaagcaggataaggaagaatttctttcactggcccagtcctcaccagcaggatcacagttagaaagtagggactcaccatcaagtaaagaggagaatactgatggtggataccagaatgacgaaattcatgacagtaacaaccacattgatacagaaaatgtaatggcaaacagtacttccttaccaatttcagccgtcgagtctcgttttgagaaaaccttagacactcaattagagattgtcatagaaaatttgcacaaagaatatgatcaatttataaattccattagattgaaattcgagaaatcgcaaaaattagaaaaaataatagcgtccaaactaaatgagcagtctcatctactagattccttagaattggaagaaaattctagttccgttatagaaaaacaagatcatttgatttcccaactgaaggaaaagatcgaatcgcaatctgtcttgataaacaatttggaaaaattgaaggaagacatcattaaaatgaaacaaaatgaaaaagttttaaccaaagaactggaaactcagaccaaaatcaataaactaaaggaaaataattgggacagctacatcaatgacttggaaaaacaaatcaatgaccttcaaatcgataaatcagaggaattccacgtaatacaaaatcagttagacaaattagacttggagaattaccaattaaaaaatcagttaaatactttggacaaccaaaagttaatactatcccaatatgaaagcaattttatcaaatttaatcagaaccttttactacaccttgacagtattttcaatattctgcagaaaatcttacaagaaagttctattgcccaatttgacaggaaaatgaaatccataaaatctgtaccaaatgcgttgaaaaacttgaatttgattcagcccaaactagaatcgctctacacttttatagagactgcattagagtccataataaactcatatatctcttcactgatttccatggaaaccccagagcagccacatcaacagggcaatgaattaacggcaactccaaataaagaactgaccttacgaatagaggagttacaaagaagatggatatccgaaagagaaagacggaagctcgatgctaacgcttcagaagctcgaatcaaggctttagaacaggaaaatgagtcattgagatcgaaacttttcaacctatcaatcaacaatccctaa

SEQ ID NO: 44 - DNA, 1869 bp, Artificial Sequence
  Description of Artificial Sequence: Synthetic polynucleotide
atggtacgtcgttggattcctagtggcaggcatcttcgcaataatgacaacactggtgatgatgacgacagcgagttcacaaactccatggattctgggatgtccataccatctctcagggactccatgaccacgaggtcttctcataacgatcccatcaagcctgctttgatgaacgattccaacaaagtcaaaaatttggagaaggagttgactaatgccaaaatcaagattcaagtactctatgaatacattcgcagaatccctaataaagacggcaatgcaccatctttaggcaatgacactgattttagaaattctattatcgagggtttgaatcttgaaataaacaaattgaaacaggatttaaaggcgaaggaagtcgagtaccaagatacgttacaattcgttcaagagaatttagaaaattctgaaagtatcgtgaatacgatcaatcacttattgtcctttatattgacgcattttaatgagcaagatgaaaatgcccatcttcttgataaagaagagagggagaccttagaggaaactttagagttgagcagtgattatgttcttgaaaaaatggatactttgtccaagttcatcatccaattcttgcaggactttttgcattccaaaagtagagcggaatccaagcaggataaggaagaatttctttctttggcccagtcctctccagcaggatctcagttagaaagtagggactctccatctagtaaagaggagaatactgatggtggataccagaatgacgaaattcatgacagtaacaaccacattgatacagaaaatgtaatggcaaacagtacttccttaccaatttctgccgtcgagtctcgttttgagaaaaccttagacactcaattagagattgtcatagaaaatttgcacaaagaatatgatcaatttataaattccattagattgaaattcgagaaatctcaaaaattagaaaaaataatagcgtccaaattgaatgagcagtctcatttattagattccttagaattggaagaaaattctagttccgttatagaaaaacaagatcatttgatttcccaattgaaggaaaagatcgaatctcaatctgtcttgataaacaatttggaaaaattgaaggaagacatcattaaaatgaaacaaaatgaaaaagttttaaccaaagaattggaaactcagaccaaaatcaataaattgaaggaaaataattgggacagctacatcaatgacttggaaaaacaaatcaatgaccttcaaatcgataaaagtgaggaattccacgtaatacaaaatcagttagacaaattagacttggagaattaccaattaaaaaatcagttaaatactttggacaaccaaaagttaatattatcccaatatgaaagcaattttatcaaatttaatcagaaccttttattacaccttgacagtattttcaatattttacagaaaatcttacaagaaagttctattgcccaatttgacaggaaaatgaaatccataaaatctgtaccaaatgcgttgaaaaacttgaatttgattcagcccaaattagaatctctctacacttttatagagactgcattagagtccataataaacagttatatctcttctttgatttccatggaaaccccagagcagccacatcaacagggcaatgaattaacggcaactccaaataaagaattgaccttaagaatagaggagttacaaagaagatggatatccgaaagagaaagaagaaagctcgatgctaacgcttctgaagctagaatcaaggctttagaacaggaaaatgagtctttgagaagtaaacttttcaacttatctatcaacaatccctga

SEQ ID NO: 45 - DNA, 357 bp, Saccharomyces cerevisiae
atgaagctcccacagaccatgctacgttctatatctgtgaagcatgtccggtggccaaggattctgacgggctcaaagctttggtactcaacgcagatggcaatgactccggaggagaagatgatcaccgataaactacaacaggaactggaacctgaagtgtgtaaagtgcaagacgtttccggtggctgcggatccatgtttgctatcaacataacaagcaagaagttcaacggactgagtctcatcaagcagcaccagctggtgaacagaattttgagggacgatatttccagatggcatggcctacaattgaccactaagaagtcaactgggaagggtccggcatcatcatga

SEQ ID NO: 46 - DNA, 357 bp, Artificial Sequence
  Description of Artificial Sequence: Synthetic polynucleotide
atgaagctcccacagaccatgcttcgttctatatctgtgaagcatgtcaggtggccaaggattttaacgggctccaagctttggtactctacgcagatggcaatgactccggaggagaagatgatcaccgataaattacaacaggaattggaacctgaagtgtgtaaagtgcaagacgtttccggtggctgcggatccatgtttgctatcaacataacaagcaagaagttcaacggattgagtctcatcaagcagcaccagttggtgaacagaattttgagggacgatatttccagatggcatggcttacaattgaccactaagaagtctactgggaagggtccggcatcttcttga

SEQ ID NO: 47 - DNA, 333 bp, Saccharomyces cerevisiae
atgttcaagagagcaatgagcacagatggtcccgtggcacgtaccatcctgaagagactggaatgcggctttccagattacaagaactttgcgtttggcctctacaacgattctcacaagcataagggccatgctggtgtacagggaaatgtctctgctgagacacatttccggattgagatggtcagtaaaaagttcgaaggcctgaaacttccacaacgccatcgtatggtttattccctcttgcaagacgagatggctcaggcgaacggtatccatgctttacaattgtcactaaagaccccacaggagtatgaatccaaagcgaaatag

SEQ ID NO: 48 - DNA, 333 bp, Artificial Sequence
  Description of Artificial Sequence: Synthetic polynucleotide
atgttcaagagagcaatgagcacagatggtcccgtggcacgtaccatcttgaagagattagaatgcggctttccagattacaagaactttgcgtttggcctctacaacgattctcacaagcataagggccatgctggtgtacagggaaatgtctctgctgagacacatttcagaattgagatggtcagtaaaaagttcgaaggcttgaaacttccacaacgccatcgtatggtttattccctcttgcaagacgagatggctcaggcgaacggtatccatgctttacaattgtccttgaagaccccacaggagtatgaatccaaagcgaaatga

SEQ ID NO: 49 - DNA, 513 bp, Saccharomyces cerevisiae
atgttacgcactactagactatggaccacccgcatgcccactgtgagcaaattgtttttgagaaacagctccggcaatgccctaaacaagaataaactaccatttttgtactcatcccaaggacctcaagccgtgaggtacacttcccaacatgagtggatagctgtgcatcaggacaagactgcctttgtcggaattacaaaatacgccactgatgccttaggggacgctacctatgttgagttgccagaagtgggcactgagattgcccaaggtgagtcgctagggtccattgagtccgtcaagtcagcctccgagatctaccagcctgccgatggtaccgtagaggaaattaacactaatcttgaggaaaatccaggtgtggtgaacgaagatcctatgggtgacggctggctagtcaaaatgaagcttggtgagggcgttaatgtggaacaggtcgagggtctaatgtccttagaacagtacgaaaagacactggttcatgatgactga

SEQ ID NO: 50 - DNA, 513 bp, Artificial Sequence
  Description of Artificial Sequence: Synthetic polynucleotide
atgttacgcactactagattatggaccacccgcatgcccactgtgagcaaattgtttttgagaaacagctccggcaatgccttgaacaagaataaattaccatttttgtactcttcccaaggacctcaagccgtgaggtacacttcccaacatgagtggatagctgtgcatcaggacaagactgcctttgtcggaattacaaaatacgccactgatgccttaggggacgctacctatgttgagttgccagaagtgggcactgagattgcccaaggtgagtctttagggtccattgagtccgtcaagtctgcctccgagatctaccagcctgccgatggtaccgtagaggaaattaacactaatcttgaggaaaatccaggtgtggtgaacgaagatcctatgggtgacggctggttagtcaaaatgaagcttggtgagggcgttaatgtggaacaggtcgagggtttgatgtccttagaacagtacgaaaagacattagttcatgatgactga

SEQ ID NO: 51 - DNA, 2358 bp, Saccharomyces cerevisiae
atgtcatctgcagagatggaacaattgttacaggccaagacactggccatgcacaacaatccaacggagatgctgcccaaggtgctcgaaactacggcatccatgtaccacaacggtaatctcagcaagctgaagttgcctttggccaagttttttacacagttagttctagacgtggtgtcgatggactctccaattgcgaatactgagagaccgtttattgctgctcaatatctgccactacttcttgctatggcgcaatccaccgcggacgtactagtgtacaagaatatcgtgcttattatgtgcgcttcatacccgctggtgttggatctggttgctaagacatcaaaccaggaaatgtttgatcagttgtgtatgctgaagaagttcgtgctctcgcactggagaactgcatatcctttgcgtgccaccgttgacgatgaaacggatgtcgaacaatggctggcgcagattgaccaaaatatcggcgtgaaattagcgaccatcaagttcatatctgaggtcgtgctgtcgcaaactaaatcacccagcggcaacgagattaattcatctaccatcccggataaccaccctgtgttgaacaaaccggctttggagagcgaggctaagaggcttcttgatatgttgctaaactacctaattgaggaacagtacatggtctcgtccgttttcattggtatcatcaattctttatccttcgtcatcaaaagaaggccgcagacaacaataagaattctttccgggctgttgcgtttcaacgtcgacgccaagtttcccctagagggcaagtctgacttgaactacaaactatccaagagatttgttgaaagggcgtacaagaactttgtgcaatttgggctaaaaaatcaaatcattacaaaatccctctcatccggatcagggtcatcgatctactccaagctgaccaagatttctcaaactttacacgttattggcgaagagaccaagagcaagggaattttgaacttcgacccttccaagggcaatagcaagaaaacgttgtccaggcaggacaaactaaaatacatctcactatggaaaaggcaattatccgcgttattgtctactctaggggtgtccacaaagacccccacgcctgtgtccgcacctgcaacgggctcttcaaccgaaaacatgcttgatcaactgaagatattgcaaaaatacaccctcaacaaggcttcacaccagggcaatacttttttcaacaactcacccaaaccaatcagcaacacctactcatctgtgtactcattgatgaacagttcgaactccaaccaggatgtgacccagctacccaatgacatacttatcaagctgtccacagaggccatcttgcaaatggacagcacgaaactgatcaccggattgtctatcgttgcttcgaggtacacggatttaatgaatacgtacatcaattctgtaccgtcctcgtcatcatcaaagaggaaatccgacgatgatgacgacggcaacgacaatgaagaagttggaaacgatggcccaacggctaatagcaagaaaatcaaaatggaaacagaaccactagcggaggaaccagaggagcccgaagacgatgaccgaatgcagaagatgcttcaagaagaggaaagcgcccaagaaatctcaggagatgccaacaaatcaacttctgccattaaggagatcgcacccccctttgaacctgactcattgacgcaggatgaaaaactaaagtacctctcaaagctgaccaagaaactgtttgaattatccggtcgccaggatactacccgggccaaatcttcgtcttcctcctccatattactggacgatgacgactcctcgtcatggttacacgtcttaatcagattggttacgagaggaatcgaagcacaagaggccagtgacctgattcgtgaagaactgcttggcttcttcatccaggatttcgagcaacgtgtcagtctgatcattgaatggctcaatgaagaatggttcttccaaacctcgctgcatcaagatccctctaactacaaaaaatggtccttaagagttctcgagtctctgggtccattccttgaaaacaaacacagacgattcttcatcagacttatgagcgaactgcccagtcttcaaagcgatcatcttgaggcactgaagcctatctgcctggatccggcaagaagttcccttggtttccaaacgctaaagtttctcattatgtttagacccccagtgcaggacactgttcgcgacctgctgcatcagctaaagcaagaagatgaaggcttacacaagcagtgcgattcactgcttgacaggctaaaatga

SEQ ID NO: 52 - DNA, 2358 bp, Artificial Sequence
  Description of Artificial Sequence: Synthetic polynucleotide
atgtcttctgcagagatggaacaattgttacaggccaagacattggccatgcacaacaatccaacggagatgttgcccaaggtgctcgaaactacggcatccatgtaccacaacggtaatctcagcaagttgaagttgcctttggccaagttttttacacagttagttttggacgtggtgtccatggactctccaattgcgaatactgagagaccgtttattgctgctcaatatttaccattacttcttgctatggcgcaatccaccgcggacgtattggtgtacaagaatatcgtgcttattatgtgcgcttcttacccgttggtgttggatttggttgctaagacaagtaaccaggaaatgtttgatcagttgtgtatgttgaagaagttcgtgctcagtcactggagaactgcatatcctttgcgtgccaccgttgacgatgaaacggatgtcgaacaatggttagcgcagattgaccaaaatatcggcgtgaaattagcgaccatcaagttcatatctgaggtcgtgttatctcaaactaaaagtcccagcggcaacgagattaattcttctaccatcccggataaccaccctgtgttgaacaaaccggctttggagagcgaggctaagaggcttcttgatatgttgttgaactacttgattgaggaacagtacatggtctcttccgttttcattggtatcatcaattctttatccttcgtcatcaaaagaaggccgcagacaacaataagaattctttccgggttattgcgtttcaacgtcgacgccaagtttcccttggagggcaagtctgacttgaactacaaactttccaagagatttgttgaaagggcgtacaagaactttgtgcaatttgggttgaaaaatcaaatcattacaaaatccctctcttccggatctgggtcttctatctactccaagttgaccaagatttctcaaactttacacgttattggcgaagagaccaagagcaagggaattttgaacttcgacccttccaagggcaatagcaagaaaacgttgtccaggcaggacaaattgaaatacatctctctttggaaaaggcaattatccgcgttattgtctactttgggggtgtccacaaagacccccacgcctgtgtccgcacctgcaacgggctcttccaccgaaaacatgcttgatcaattgaagatattgcaaaaatacaccctcaacaaggcttctcaccagggcaatacttttttcaacaactctcccaaaccaatcagcaacacctactcttctgtgtactctttgatgaacagtagtaactccaaccaggatgtgacccagttgcccaatgacatacttatcaagttatccacagaggccatcttgcaaatggacagcacgaaattaatcaccggattgtctatcgttgcttccaggtacacggatttaatgaatacgtacatcaattctgtaccgtcctcttcttcttccaagaggaaatccgacgatgatgacgacggcaacgacaatgaagaagttggaaacgatggcccaacggctaatagcaagaaaatcaaaatggaaacagaaccattggcggaggaaccagaggagcccgaagacgatgacagaatgcagaagatgcttcaagaagaggaaagcgcccaagaaatcagtggagatgccaacaaatctacttctgccattaaggagatcgcacccccctttgaacctgactctttgacgcaggatgaaaaattgaagtacctctctaagttgaccaagaaattatttgaattatccggtcgccaggatactaccagagccaaatcttcttcttcctcctccatattattagacgatgacgactcctcttcttggttacacgtcttaatcagattggttacgagaggaatcgaagcacaagaggccagtgacttgattcgtgaagaattgcttggcttcttcatccaggatttcgagcaacgtgtcagtttaatcattgaatggctcaatgaagaatggttcttccaaacctccttgcatcaagatccctctaactacaaaaaatggtccttaagagttctcgagtctttgggtccattccttgaaaacaaacacagaagattcttcatcagacttatgagcgaattgcccagtcttcaaagcgatcatcttgaggcattgaagcctatctgcttagatccggcaagaagttcccttggtttccaaacgttgaagtttctcattatgtttagacccccagtgcaggacactgttcgcgacttattacatcagttgaagcaagaagatgaaggcttacacaagcagtgcgattctttacttgacaggttgaaatga

SEQ ID NO: 53 - DNA, 1248 bp, Saccharomyces cerevisiae
atgaaaaggtccacgttgctgtcgctggacgcattcgctaagaccgaagaggacgtacgagtccgcaccagggccggcgggctgatcactttatcgtgcatcttgaccacgttatttctgctggtgaacgagtggggacagttcaattctgtggtaacaaggccacaattggtggtggaccgtgaccgacacgcaaagctggagcttaatatggatgtgacatttccatcgatgccatgtgacctggtgaatctcgatattatggacgactctggagagatgcaactagacattcttgacgcagggttcacgatgtctaggttgaatagcgagggtcgccccgtgggagatgctactgagttgcatgtgggtgggaacggcgacggaaccgcgccggttaataacgatcctaactattgtgggccatgttacggtgccaaagatcagtcgcagaatgagaatctagcacaggaagagaaggtttgctgccaagactgtgatgcagtgagatcagcatacttggaggcaggctgggcttttttcgacgggaagaatatcgagcagtgtgaaagagagggctatgtcagcaagattaacgagcacttgaatgaaggctgcaggatcaaaggttctgcacaaattaacagaattcaggggaatcttcactttgcccctggaaaaccctaccagaatgcatatggacattttcatgatacttctttgtacgacaagacttcgaatttgaacttcaaccacatcatcaatcatttgagctttgggaagccgatccagtcccacagtaagttgttaggaaacgataagcgccacggcggcgccgtagttgccacttctcccttggacggacgccaggtgttcccggacaggaacacacactttcaccagttctcgtattttgccaagattgtccccaccagatatgagtacttggataatgttgtcattgagaccgcgcagttcagcgccacttttcattcccgacctcttgccggtggaagggacaaggatcatccaaacacacttcacgttaggggtggtatccctggtatgttcgtctttttcgaaatgtctccattgaaagtcatcaataaggaacagcacgggcagacttggtcgggcttcatcttgaattgtatcaccagcattggtggtgtcctagctgtgggcactgtcatggacaagctattctacaaagcacagagatcgatctggggcaagaagagccagtag

SEQ ID NO: 54 - DNA, 1248 bp, Artificial Sequence
  Description of Artificial Sequence: Synthetic polynucleotide
atgaaaaggtccacgttgctttctttggacgcattcgctaagaccgaagaggacgtaagagtccgcaccagggccggcgggttgatcactttaagttgcatcttgaccacgttatttttattggtgaacgagtggggacagttcaattctgtggtaacaaggccacaattggtggtggaccgtgacaggcacgcaaagttggagcttaatatggatgtgacatttccaagcatgccatgtgacttggtgaatctcgatattatggacgactctggagagatgcaattggacattcttgacgcagggttcacgatgtctaggttgaatagcgagggtcgccccgtgggagatgctactgagttgcatgtgggtgggaacggcgacggaaccgcgccggttaataacgatcctaactattgtgggccatgttacggtgccaaagatcagtctcagaatgagaatttggcacaggaagagaaggtttgctgccaagactgtgatgcagtgagaagtgcatacttggaggcaggctgggcttttttcgacgggaagaatatcgagcagtgtgaaagagagggctatgtcagcaagattaacgagcacttgaatgaaggctgcaggatcaaaggttctgcacaaattaacagaattcaggggaatcttcactttgcccctggaaaaccctaccagaatgcatatggacattttcatgatacttctttgtacgacaagacttccaatttgaacttcaaccacatcatcaatcatttgagctttgggaagccgatccagtcccacagtaagttgttaggaaacgataagcgccacggcggcgccgtagttgccacttctcccttggacggacgccaggtgttcccggacaggaacacacactttcaccagttctcttattttgccaagattgtccccaccagatatgagtacttggataatgttgtcattgagaccgcgcagttcagcgccacttttcattccagacctcttgccggtggaagggacaaggatcatccaaacacacttcacgttaggggtggtatccctggtatgttcgtctttttcgaaatgtctccattgaaagtcatcaataaggaacagcacgggcagacttggtctggcttcatcttgaattgtatcaccagcattggtggtgtcttggctgtgggcactgtcatggacaagcttttctacaaagcacagagatctatctggggcaagaagagccagtga

SEQ ID NO: 55 - DNA, 2565 bp, Saccharomyces cerevisiae
atggcgatccaaacccgttttgcctcgggcacatctttatccgatttgaaaccaaaaccaagtgcaacttccatctccatacccatgcaaaatgtcatgaacaagcctgtcacggaacaggactcactgttccatatatgcgcaaacatccggaaaagactggaggtgttacctcaactcaaaccttttttacaattggcctaccaatcgagcgaggttttgagtgaaaggcaatctcttttgctatcccaaaagcagcatcaggaactgctcaagtccaatggcgctaaccgggacagtagcgacttggcaccaactttaaggtctagctctatctccacagctaccagtctcatgtcgatggaaggtatatcatacacgaattcgaatccctcggccaccccaaatatggaggacactttactgacttttagtatgggtattttgcccattaccatggattgcgaccctgtgacacaactatcacagctgtttcaacaaggtgcgcccctctgtatacttttcaactctgtgaagccgcaatttaaattaccggtaatagcatctgacgatttgaaagtctgtaaaaaatccatttatgactttatattgggctgcaagaaacactttgcatttaacgatgaggagcttttcactatatccgacgtttttgccaactctacttcccagctggtcaaagtgctagaagtagtagaaacgctaatgaattccagccctactattttcccctctaagagtaagacacagcaaatcatgaacgcagaaaaccaacaccgacatcagcctcagcagtcttcgaagaagcataacgagtatgttaaaattatcaaggaattcgttgcaacggaaagaaaatatgttcacgatttggaaattttggataaatatagacagcagttattagacagcaatctaataacgtctgaagagttgtacatgttgttccctaatttgggtgatgctatagattttcaaagaagatttctaatatccttggaaataaatgctttagtagaaccttccaagcaaagaatcggggctcttttcatgcattccaaacatttttttaagttgtatgagccttggtctattggccaaaatgcagccatcgaatttctctcttcaactttgcacaagatgagggttgatgaatcgcagcggttcataattaacaataaactggaattgcaatccttcctttataaacccgtgcaaaggctttgtagatatcccctgttggtcaaagaattgcttgctgaatcgagtgacgataataatacgaaagaacttgaagctgctttagatatttctaaaaatattgcgagaagtatcaacgaaaatcaaagaagaacagaaaatcatcaagtggtgaagaaactttatggtagagtggtcaactggaagggttatagaatttccaagttcggtgagttattatatttcgataaagtgttcatttcaacaacaaatagctcctcggaacctgaaagagaatttgaggtttatctttttgaaaaaatcatcatccttttttcagaggtagtgactaagaaatctgcatcatcactaatccttaagaagaaatcctcaacctcagcatcaatctccgcctcgaacataacggacaacaatggcagccctcaccacagttaccataagaggcatagcaatagtagtagcagtaataatatccatttatcttcgtcttcagcagcggcgataatacattccagtaccaatagtagtgacaacaattccaacaattcatcatcatcctcattattcaagctgtccgctaacgaacctaagctggatctaagaggtcgaattatgataatgaatctgaatcaaatcataccgcaaaacaaccggtcattaaatataacatgggaatccataaaagagcaaggtaatttccttttgaaattcaaaaatgaggaaacaagagataattggtcatcgtgtttacaacagttgattcatgatctgaaaaatgagcagtttaaggcaagacatcactcttcaacatcgacgacttcatcgacagccaaatcatcttcaatgatgtcacccaccacaactatgaatacaccgaatcatcacaacagccgccagacacacgatagtatggcttctttctcaagttctcatatgaaaagggtttcggatgtcctgcctaaacggaggaccacttcatcaagtttcgaaagtgaaattaaatccatttcagaaaatttcaagaactctattccagaatcttccatactcttcaggatatcatataataacaactctaataatacctctagtagcgagatcttcacacttttggtagaaaaagtttggaattttgacgacttgataatggcgatcaattctaaaatttcgaatacacataataacaacatttcaccaatcaccaagatcaaatatcaggacgaagatggggattttgttgtgttaggtagcgatgaagattggaatgttgctaaagaaatgttggcggaaaacaatgagaaattcttgaacattcgtctgtattga

SEQ ID NO: 56 - DNA, 2565 bp, Artificial Sequence
  Description of Artificial Sequence: Synthetic polynucleotide
atggcgatccaaacccgttttgcctctggcacatctttatccgatttgaaaccaaaaccaagtgcaacttccatctccatacccatgcaaaatgtcatgaacaagcctgtcacggaacaggactctttattccatatatgcgcaaacatcagaaaaagattggaggtgttacctcaactcaaaccttttttacaattggcctaccaaagcagcgaggttttgagtgaaaggcaatctcttttgttatcccaaaagcagcatcaggaattactcaagtccaatggcgctaacagagacagtagcgacttggcaccaactttaaggtctagctctatctccacagctaccagtctcatgtccatggaaggtatatcttacacgaatagtaatccctctgccaccccaaatatggaggacactttattaacttttagtatgggtattttgcccattaccatggattgcgaccctgtgacacaattatctcagttatttcaacaaggtgcgcccctctgtatacttttcaactctgtgaagccgcaatttaaattaccggtaatagcatctgacgatttgaaagtctgtaaaaaatccatttatgactttatattgggctgcaagaaacactttgcatttaacgatgaggagcttttcactatatccgacgtttttgccaactctacttcccagttggtcaaagtgttggaagtagtagaaacgttgatgaattccagccctactattttcccctctaagagtaagacacagcaaatcatgaacgcagaaaaccaacacagacatcagcctcagcagtcttccaagaagcataacgagtatgttaaaattatcaaggaattcgttgcaacggaaagaaaatatgttcacgatttggaaattttggataaatatagacagcagttattagacagcaatttgataacgtctgaagagttgtacatgttgttccctaatttgggtgatgctatagattttcaaagaagatttttaatatccttggaaataaatgctttagtagaaccttccaagcaaagaatcggggctcttttcatgcattccaaacatttttttaagttgtatgagccttggtctattggccaaaatgcagccatcgaatttctctcttctactttgcacaagatgagggttgatgaatctcagagattcataattaacaataaattagaattgcaatccttcctttataaacccgtgcaaaggctttgtagatatcccttattggtcaaagaattgcttgctgaaagtagtgacgataataatacgaaagaacttgaagctgctttagatatttctaaaaatattgcgagaagtatcaacgaaaatcaaagaagaacagaaaatcatcaagtggtgaagaaactttatggtagagtggtcaactggaagggttatagaatttccaagttcggtgagttattatatttcgataaagtgttcatttctacaacaaatagctccagtgaacctgaaagagaatttgaggtttatctttttgaaaaaatcatcatccttttttctgaggtagtgactaagaaatctgcatcttctttgatccttaagaagaaatcctccacctctgcatctatctccgcctccaacataacggacaacaatggcagccctcaccacagttaccataagaggcatagcaatagtagtagcagtaataatatccatttatcttcttcttctgcagcggcgataatacattccagtaccaatagtagtgacaacaattccaacaattcttcttcttcctctttattcaagttatccgctaacgaacctaagttggatttgagaggtagaattatgataatgaatttgaatcaaatcataccgcaaaacaacagatctttaaatataacatgggaatccataaaagagcaaggtaatttccttttgaaattcaaaaatgaggaaacaagagataattggtcctcttgtttacaacagttgattcatgatttgaaaaatgagcagtttaaggcaagacatcactcttctacaagtacgacttcttctacagccaaatcttcttctatgatgtctcccaccacaactatgaatacaccgaatcatcacaacagccgccagacacacgatagtatggcttctttctctagttctcatatgaaaagggtttctgatgtcttacctaaaagaaggaccacttcttccagtttcgaaagtgaaattaaatccatttctgaaaatttcaagaactctattccagaatcttccatactcttcaggatatcttataataacaactctaataatacctctagtagcgagatcttcacacttttggtagaaaaagtttggaattttgacgacttgataatggcgatcaattctaaaatttctaatacacataataacaacatttctccaatcaccaagatcaaatatcaggacgaagatggggattttgttgtgttaggtagcgatgaagattggaatgttgctaaagaaatgttggcggaaaacaatgagaaattcttgaacattcgtttatattga

SEQ ID NO: 57 - DNA, 1743 bp, Saccharomyces cerevisiae
atggccatattgaaggataccataattagatacgctaatgcaaggtatgctaccgctagtggcacttccaccgccactgccgcctctgtcagcgctgcctcatgtcctaatttgcccttgctcttgcaaaagaggcgggccattgctagtgcaaagtctaaaaaccctaatctcgttaaaagagaattgcaagcacatcactcagcgatcagcgaatacaataatgatcaattggaccactatttccgtctttcccacacagaaaggccgctgtacaacctgactaacttcaactctcagccacaagttaatccgaagatgcgtttcttgatctttgacttcatcatgtactgtcacacaagactcaatctatcgacctcgactttgttccttactttcactatcttggacaagtattcctcgcggttcattatcaagagttacaactaccagctcttgtccttgaccgcgctttggatttcgtccaaattttgggactccaagaatagaatggccactttgaaagtcttgcaaaacttgtgttgcaatcaatattctataaagcaattcacgactatggaaatgcatcttttcaaatcactcgattggtccatctgtcagtcggcaacattcgactcctacatcgacatcttcttgttccaatctacgtccccgttatcgcctggcgttgtcctttctgcccctttggaagctttcattcaacagaaactggccttattaaataacgctgctggtactgctattaataaatcgtcctcttctcaaggcccctctttgaacatcaacgagatcaaattgggtgccattatgttgtgcgagttagcttccttcaatctcgaattatcatttaaatatgatcgttcactaattgcgctgggtgcaattaacctcatcaaattatctttgaactactataattcaaacctttgggaaaatatcaatctggctttggaggaaaactgccaagacctagatattaaattgtcagaaatctctaatactttattggatatagcaatggaccaaaattctttcccctccagtttcaaatcaaaatatttgaatagcaataagacatctttagcaaaatctctcttagacgcattacaaaactattgtattcaattgaaactggaagaattctaccgttcacaagaattggaaaccatgtacaatactatctttgctcagtcctttgacagcgattcattgacttgtgtttactcaaatgctactactccaaagagcgctacggtttcatctgcggccacagactatttctcggatcacactcatttaagaaggttgaccaaagatagcatttctccaccatttgccttcactccaacctcatcttcatcctctccatctccattcaattccccttacaagacttcaagttcaatgacgaccccagactctgcatcacaccattcacattcaggttcgttctcttctacccaaaattcttttaaaaggtcactgagcatcccacaaaattcaagcatcttttggccaagcccactaactcccaccaccccatctctaatgtcaaatagaaaattattacaaaatttatctgtgcgttcaaaaagattatttcctgttagacccatggccactgctcacccatgctctgcccccacccaactgaaaaagagatcaacttcctctgtggattgtgattttaatgatagtagcaacctcaagaaaactcgctga

SEQ ID NO: 58 - DNA, 1743 bp, Artificial Sequence
  Description of Artificial Sequence: Synthetic polynucleotide
atggccatattgaaggataccataattagatacgctaatgcaaggtatgctaccgctagtggcacttccaccgccactgccgcctctgtcagcgctgcctcttgtcctaatttgcccttgctcttgcaaaagaggagagccattgctagtgcaaagtctaaaaaccctaatctcgttaaaagagaattgcaagcacatcactctgcgatcagcgaatacaataatgatcaattggaccactatttccgtctttcccacacagaaaggccgttgtacaacttgactaacttcaactctcagccacaagttaatccgaagatgcgtttcttgatctttgacttcatcatgtactgtcacacaagactcaatttatctacctctactttgttccttactttcactatcttggacaagtattccagcaggttcattatcaagagttacaactaccagctcttgtccttgaccgcgctttggatttcttccaaattttgggactccaagaatagaatggccactttgaaagtcttgcaaaacttgtgttgcaatcaatattctataaagcaattcacgactatggaaatgcatcttttcaaatctctcgattggtccatctgtcagtctgcaacattcgactcctacatcgacatcttcttgttccaatctacgtccccgttatctcctggcgttgtcctttctgcccctttggaagctttcattcaacagaaattggccttattaaataacgctgctggtactgctattaataaatcttcctcttctcaaggcccctctttgaacatcaacgagatcaaattgggtgccattatgttgtgcgagttagcttccttcaatctcgaattatcttttaaatatgatcgttctttgattgcgcttggtgcaattaacctcatcaaattatctttgaactactataatagcaacctttgggaaaatatcaatttggctttggaggaaaactgccaagacttggatattaaattgagtgaaatctctaatactttattggatatagcaatggaccaaaattctttcccctccagtttcaaatctaaatatttgaatagcaataagacatctttagcaaaatctctcttagacgcattacaaaactattgtattcaattgaaattagaagaattctaccgttctcaagaattggaaaccatgtacaatactatctttgctcagtcctttgacagcgattctttgacttgtgtttactctaatgctactactccaaagagcgctacggtttcttctgcggccacagactatttcagtgatcacactcatttaagaaggttgaccaaagatagcatttctccaccatttgccttcactccaacctcttcttcttcctctccatctccattcaattccccttacaagacttctagttctatgacgaccccagactctgcatctcaccattctcattctggttctttctcttctacccaaaattcttttaaaaggtccttaagcatcccacaaaatagtagcatcttttggccaagcccattgactcccaccaccccatctttgatgagtaatagaaaattattacaaaatttatctgtgcgttctaaaagattatttcctgttagacccatggccactgctcacccatgctctgcccccacccaattgaaaaagagatctacttcctctgtggattgtgattttaatgatagtagcaacctcaagaaaactcgctga

SEQ ID NO: 59 - DNA, 810 bp, Saccharomyces cerevisiae
atgggttggttttgggcagatcaaaaaactacgggcaaagatattggtggggcagcagtatcatccatgtcagggtgcccagtcatgcacgagtcgtcgtcgtcgtcgccaccatcctctgagtgccccgttatgcagggagataacgatagaataaacccgctgaacaatatgccggagttggcagcatccaaacagcctggccaaaagatggacttgcccgttgatcggaccatctccagcatccccaagagtccagacagtaacgagttctgggagtatccttctccacaacagatgtacaatgctatggttagaaagggcaagattggcggtagcggcgaagtcgccgaagatgcagtggagtccatggtgcaggtccacaactttctaaatgaagggtgctggcaggaagtgctcgaatgggaaaaaccgcacacagatgaaagccacgtgcagcctaagttgctgaaattcatggggaaaccgggcgtattgagccctcgtgctcgctggatgcacctgtgcggcctactgtttccgtcccattttagccaagaactaccattcgacaggcacgactggattgtactccgaggcgagcgcaaagcggaacaacaacctccaaccttcaaggaagttagatacgtcttggatttctacggagggcccgacgacgaaaacggaatgcctactttccacgtggatgtccgtcctgccctagatagtctagacaatgctaaggaccggatgacccgtttcttggaccggatgatctcgggtccgtcctcttcgtcctccgccccttaa

SEQ ID NO: 60 - DNA, 810 bp, Artificial Sequence
  Description of Artificial Sequence: Synthetic polynucleotide
atgggttggttttgggcagatcaaaaaactacgggcaaagatattggtggggcagcagtatcttccatgagtgggtgcccagtcatgcacgagagttcttcttcttctccaccatcctctgagtgccccgttatgcagggagataacgatagaataaacccgttgaacaatatgccggagttggcagcatccaaacagcctggccaaaagatggacttgcccgttgatagaaccatctccagcatccccaagagtccagacagtaacgagttctgggagtatccttctccacaacagatgtacaatgctatggttagaaagggcaagattggcggtagcggcgaagtcgccgaagatgcagtggagtccatggtgcaggtccacaactttttgaatgaagggtgctggcaggaagtgctcgaatgggaaaaaccgcacacagatgaaagccacgtgcagcctaagttgttgaaattcatggggaaaccgggcgtattgagccctcgtgctcgctggatgcacttatgcggcttactttttccgtcccattttagccaagaattaccattcgacaggcacgactggattgtactcagaggcgagcgcaaagcggaacaacaacctccaaccttcaaggaagttagatacgtcttggatttctacggagggcccgacgacgaaaacggaatgcctactttccacgtggatgtccgtcctgccttggatagtttggacaatgctaaggacagaatgacccgtttcttggacagaatgatcagtggtccgtcctcttcttcctccgccccttga

SEQ ID NO: 61 - DNA, 1503 bp, Saccharomyces cerevisiae
atgtctagattagaaagattgacctcattaaacgttgttgctggttctgacttgagaagaacctccatcattggtaccatcggtccaaagaccaacaacccagaaaccttggttgctttgagaaaggctggtttgaacattgtccgtatgaacttctctcacggttcttacgaataccacaagtctgtcattgacaacgccagaaagtccgaagaattgtacccaggtagaccattggccattgctttggacaccaagggtccagaaatcagaactggtaccaccaccaacgatgttgactacccaatcccaccaaaccacgaaatgatcttcaccaccgatgacaagtacgctaaggcttgtgacgacaagatcatgtacgttgactacaagaacatcaccaaggtcatctccgctggtagaatcatctacgttgatgatggtgttttgtctttccaagttttggaagtcgttgacgacaagactttgaaggtcaaggctttgaacgccggtaagatctgttcccacaagggtgtcaacttaccaggtaccgatgtcgatttgccagctttgtctgaaaaggacaaggaagatttgagattcggtgtcaagaacggtgtccacatggtcttcgcttctttcatcagaaccgccaacgatgttttgaccatcagagaagtcttgggtgaacaaggtaaggacgtcaagatcattgtcaagattgaaaaccaacaaggtgttaacaacttcgacgaaatcttgaaggtcactgacggtgttatggttgccagaggtgacttgggtattgaaatcccagccccagaagtcttggctgtccaaaagaaattgattgctaagtctaacttggctggtaagccagttatctgtgctacccaaatgttggaatccatgacttacaacccaagaccaaccagagctgaagtttccgatgtcggtaacgctatcttggatggtgctgactgtgttatgttgtctggtgaaaccgccaagggtaactacccaatcaacgccgttaccactatggctgaaaccgctgtcattgctgaacaagctatcgcttacttgccaaactacgatgacatgagaaactgtactccaaagccaacctccaccaccgaaaccgtcgctgcctccgctgtcgctgctgttttcgaacaaaaggccaaggctatcattgtcttgtccacttccggtaccaccccaagattggtttccaagtacagaccaaactgtccaatcatcttggttaccagatgcccaagagctgctagattctctcacttgtacagaggtgtcttcccattcgttttcgaaaaggaacctgtctctgactggactgatgatgttgaagcccgtatcaacttcggtattgaaaaggctaaggaattcggtatcttgaagaagggtgacacttacgtttccatccaaggtttcaaggccggtgctggtcactccaacactttgcaagtctctaccgtttaa

SEQ ID NO: 62 - DNA, 1503 bp, Artificial Sequence
  Description of Artificial Sequence: Synthetic polynucleotide
atgtctagattagaaagattgaccagtttaaacgttgttgctggttctgacttgagaagaacctccatcattggtaccatcggtccaaagaccaacaacccagaaaccttggttgctttgagaaaggctggtttgaacattgtccgtatgaacttctctcacggttcttacgaataccacaagtctgtcattgacaacgccagaaagtccgaagaattgtacccaggtagaccattggccattgctttggacaccaagggtccagaaatcagaactggtaccaccaccaacgatgttgactacccaatcccaccaaaccacgaaatgatcttcaccaccgatgacaagtacgctaaggcttgtgacgacaagatcatgtacgttgactacaagaacatcaccaaggtcatctccgctggtagaatcatctacgttgatgatggtgttttgtctttccaagttttggaagtcgttgacgacaagactttgaaggtcaaggctttgaacgccggtaagatctgttcccacaagggtgtcaacttaccaggtaccgatgtcgatttgccagctttgtctgaaaaggacaaggaagatttgagattcggtgtcaagaacggtgtccacatggtcttcgcttctttcatcagaaccgccaacgatgttttgaccatcagagaagtcttgggtgaacaaggtaaggacgtcaagatcattgtcaagattgaaaaccaacaaggtgttaacaacttcgacgaaatcttgaaggtcactgacggtgttatggttgccagaggtgacttgggtattgaaatcccagccccagaagtcttggctgtccaaaagaaattgattgctaagtctaacttggctggtaagccagttatctgtgctacccaaatgttggaatccatgacttacaacccaagaccaaccagagctgaagtttccgatgtcggtaacgctatcttggatggtgctgactgtgttatgttgtctggtgaaaccgccaagggtaactacccaatcaacgccgttaccactatggctgaaaccgctgtcattgctgaacaagctatcgcttacttgccaaactacgatgacatgagaaactgtactccaaagccaacctccaccaccgaaaccgtcgctgcctccgctgtcgctgctgttttcgaacaaaaggccaaggctatcattgtcttgtccacttccggtaccaccccaagattggtttccaagtacagaccaaactgtccaatcatcttggttaccagatgcccaagagctgctagattctctcacttgtacagaggtgtcttcccattcgttttcgaaaaggaacctgtctctgactggactgatgatgttgaagcccgtatcaacttcggtattgaaaaggctaaggaattcggtatcttgaagaagggtgacacttacgtttccatccaaggtttcaaggccggtgctggtcactccaacactttgcaagtctctaccgtttga

SEQ ID NO: 63 - DNA, 93 bp, Saccharomyces cerevisiae
atgtcaatctcgtttccaaaaatgcaacacctcatcgttatgacgacaattggagacaaaaaggttaacaataacataatactctttttatag

SEQ ID NO: 64 - DNA, 93 bp, Artificial Sequence
  Description of Artificial Sequence: Synthetic oligonucleotide
atgtccatctcttttccaaaaatgcaacacctcatcgttatgacgacaattggagacaaaaaggttaacaataacataatactctttttatga

SEQ ID NO: 65 - DNA, 804 bp, Saccharomyces cerevisiae
atggatatggaaatcgaagattcaagccccatagatgacctgaagttacaaaaactggataccaatgtttattttggaccctgtgagatattgacacaacctattcttttgcaatatgaaaatattaagttcatcattggtgtcaatctaagtactgaaaagatagcgtcgttttatacccagtatttcaggaactctaattcggtagtcgtgaatctttgctcaccaactacagcagcagtagcaacaaagaaggccgcaattgatttgtatatacgaaacaatacaatactactacagaaattcgttggacagtacttgcagatgggcaaaaagataaaaacatctttaacacaggcacaaaccgatacaatccaatcactgccccagttttgtaattcgaatgtcctcagtggtgagcccttggtacagtaccaggcattcaacgatctgttggcactctttaagtcatttagtcattttggaaatatcttggttatatcatcacattcctatgattgcgcacttctcaaatttcttatttccagggtgatgacctactatccactagtgaccatccaggattctttgcaatatatgaaagcaaccctgaacatatccatcagtacatccgatgagttcgatattctgaatgataaagaactgtgggagtttggccaaacccaggaaattctaaaacgtaggcagacgagctcagtcaagaggagatgtgtcaatttaccagaaaactctacgatcgataacagaatgcttatgggtaccacaaagcgaggtcgcttttga

SEQ ID NO: 66 - DNA, 804 bp, Artificial Sequence
  Description of Artificial Sequence: Synthetic polynucleotide
atggatatggaaatcgaagattctagccccatagatgacttgaagttacaaaaattggataccaatgtttattttggaccctgtgagatattgacacaacctattcttttgcaatatgaaaatattaagttcatcattggtgtcaatttgagtactgaaaagatagcgtctttttatacccagtatttcaggaactctaattctgtagtcgtgaatctttgctctccaactacagcagcagtagcaacaaagaaggccgcaattgatttgtatataagaaacaatacaatattattgcagaaattcgttggacagtacttgcagatgggcaaaaagataaaaacatctttaacacaggcacaaaccgatacaatccaaagtttaccccagttttgtaatagtaatgtcctcagtggtgagcccttggtacagtaccaggcattcaacgatttattggcactctttaagagctttagtcattttggaaatatcttggttatatcttctcattcctatgattgcgcacttctcaaatttcttatttccagggtgatgacctactatccattggtgaccatccaggattctttgcaatatatgaaagcaaccttgaacatatccatcagtacatccgatgagttcgatattttgaatgataaagaattatgggagtttggccaaacccaggaaattttgaaacgtaggcagacgagctctgtcaagaggagatgtgtcaatttaccagaaaactctacgatcgataacagaatgcttatgggtaccacaaagagaggtcgcttttga

SEQ ID NO: 67 - DNA, 1110 bp, Saccharomyces cerevisiae
atgtctactacagttgaaaaaatcaaagctatcgaagatgaaatggcccgtacccaaaagaacaaggccacatctttccatttgggtcaactgaaggccaagctggccaaactgagaagagaattgttgaccagtgcttcatccggcagcggtggtggtgctggtattggttttgatgtggctagaactggtgtggccagtgtggggtttgtcgggttcccgtcggtggggaaatctacattactgtccaagttgactggtactgagtctgaagcagctgagtacgagtttaccaccctggttaccgtccccggtgtcattcgttataaaggtgccaagatccaaatgttggatttacctggtattatcgatggtgctaaggatggtagaggtagaggtaagcaagttattgccgtggcaagaacctgtaacctgttatttatcatcctagatgtgaacaaacccttgcatcataagcaaatcattgagaaggaactggaaggtgtggggattcgtctgaataaaactccgccagatatcttgatcaaaaaaaaagagaaaggtggtatttccatcacaaacacagtcccattgacccatctggggaatgacgaaatcagagccgttatgagcgagtacagaataaatagcgctgagattgccttcaggtgtgatgccactgtggatgatttgattgatgttttggaagcttcgtcaagaagatacatgcctgccatctatgtgttaaacaagattgattctctgtcaatagaggaattggaattactttaccgaattcctaatgccgtgcctatttcgtctggtcaagattggaacttggacgagctgttgcaagtcatgtgggatagactaaatctagtccgtatttacactaaaccaaagggccaaataccagattttaccgaccctgtggtgctaagatcagaccgttgcagtgtcaaggatttttgtaaccaaattcataaatctttagtggacgactttagaaatgctctggtttacggtagcagtgtcaaacatcaacctcaatacgtggggttgagtcacattttggaagacgaagatgttgttaccatcttgaaaaagtga

SEQ ID NO: 68 - DNA, 1110 bp, Artificial Sequence
  Description of Artificial Sequence: Synthetic polynucleotide
atgtctactacagttgaaaaaatcaaagctatcgaagatgaaatggcccgtacccaaaagaacaaggccacatctttccatttgggtcaattgaaggccaagttggccaaattgagaagagaattgttgaccagtgcttcttccggcagcggtggtggtgctggtattggttttgatgtggctagaactggtgtggccagtgtggggtttgtcgggttcccgtctgtggggaaatctacattattatccaagttgactggtactgagtctgaagcagctgagtacgagtttaccaccttggttaccgtccccggtgtcattcgttataaaggtgccaagatccaaatgttggatttacctggtattatcgatggtgctaaggatggtagaggtagaggtaagcaagttattgccgtggcaagaacctgtaacttattatttatcatcttagatgtgaacaaacccttgcatcataagcaaatcattgagaaggaattggaaggtgtggggattcgtttgaataaaactccgccagatatcttgatcaaaaaaaaagagaaaggtggtatttccatcacaaacacagtcccattgacccatttggggaatgacgaaatcagagccgttatgagcgagtacagaataaatagcgctgagattgccttcaggtgtgatgccactgtggatgatttgattgatgttttggaagcttcttctagaagatacatgcctgccatctatgtgttaaacaagattgattctttatctatagaggaattggaattactttacagaattcctaatgccgtgcctatttcttctggtcaagattggaacttggacgagttattgcaagtcatgtgggatagattgaatttggtccgtatttacactaaaccaaagggccaaataccagattttaccgaccctgtggtgttgagaagtgaccgttgcagtgtcaaggatttttgtaaccaaattcataaatctttagtggacgactttagaaatgctttggtttacggtagcagtgtcaaacatcaacctcaatacgtggggttgagtcacattttggaagacgaagatgttgttaccatcttgaaaaagtga

SEQ ID NO: 69 - DNA, 3009 bp, Saccharomyces cerevisiae
atggcgaaaaagagtaaaaagaaccaacagaactactgggatgaggaattcgaagaagacgccgcccagaacgaagaaatcagtgccacgccaactccaaatccagaaagcagcgcaggtgcagatgacacttccagagaagcaagtgcaagtgctgaaggtgctgaggccattgaaggcgacttcatgtctactttgaagcaatcgaagaagaagcaagaaaagaaggttattgaagagaagaaggatggtaagcctatactaaagtccaagaaggaaaaggagaaggaaaaaaaggaaaaggagaagcagaagaagaaagaacaagctgccaggaagaaggcccaacagcaagctcaaaaggagaagaacaaggagttgaacaagcaaaatgttgaaaaagctgctgctgagaaggctgctgctgagaaatcccaaaaatctaaaggtgaaagtgataaaccaagtgctagtgctaagaagccagccaagaaagtacctgccggtttggctgctttgagacgtcaattagaattgaagaaacaacttgaagaacaagaaaagttggaaagagaggaagaagaaagattggagaaagaagaggaggaaagattggccaacgaagaaaaaatgaaggaagaagctaaagcagctaaaaaggaaaaggagaaggcaaagcgtgaaaaacgaaaggctgaaggtaagctattgaccagaaagcaaaaagaagaaaagaaattattggaaagaagacgtgccgctttattgtcttccggtaacgtcaaagttgccggtctggccaagaaggatggagaagaaaacaaaccaaagaaggttgtttacagcaagaagaagaagagaacaacccaggaaaacgcctccgaagccattaaatctgactctaagaaagactcggaagttgtacctgatgacgaactcaaagaatccgaagatgttttgattgatgattgggaaaatttggctcttggtgatgatgacgaggagggaaccaacgaagaaacgcaagaatccaccgcaagccatgaaaatgaagaccaaaatcaaggcgaagaagaagaagaaggagaagaagaagaagaagaagaagaagaaagagcacatgtgcatgaagttgccaaaagcacaccagcagctacaccagcagctactccaactccatccagcgcttctccaaacaaaaaagatcttcgttccccaatttgttgtattttgggtcatgtcgataccggtaagactaaattgttagacaaaatcagacaaaccaacgttcaaggtggtgaagctggtggcatcacccaacagattggtgccacttatttccccatcgacgctattaaggcaaaaactaaagttatggctgaatatgaaaaacaaacttttgatgtcccaggtcttttggttattgataccccaggtcacgaatccttctctaacttacgttcaagaggttcttcattgtgtaacatcgcaattttggttattgacattatgcatggtttggaacaacagactattgaatctatcaaactgttaagagatagaaaggctccatttgtcgttgccctaaacaaaattgatagattatatgactggaaagccattccaaacaattcattcagagactcctttgcaaagcaatcaagagctgttcaagaggaatttcaatctaggtattctaagattcaattggaattagctgaacaaggtttgaattcggaattgtatttccaaaacaaaaatatgtctaagtatgtctccattgtcccaacatctgccgtcaccggtgagggtgttccagatttattgtggttgctattagaattgacccaaaagaggatgtccaaacaattgatgtacttgtctcacgtggaagcaaccattttggaagtgaaagtcgtagaaggttttggtaccacaattgatgttatcttgtccaacggttacttgagagaaggtgaccgtattgtactgtgtggtatgaatggtccaattgtaacgaatatcagagcattactaacaccacaaccattacgtgaactacgtttgaaatctgaatatgtccaccacaaagaagtcaaggctgctttaggtgtcaagattgccgctaatgatttagaaaaagccgtttctggttctaggctgctagttgtcggtcctgaagatgacgaagatgaattgatggacgacgttatggatgatttgactggtttgttggactccgttgacacaactggtaaaggtgttgtggtccaagcatccaccttgggttctttggaagctttgttggatttcttgaaagacatgaaaatccctgtgatgtctatcgggttaggtccagtgtacaagcgtgatgttatgaaagcctccactatgttggaaaaggctccagagtatgccgtgatgttatgttttgatgttaaagtggataaggaagctgaacaatacgctgaacaagaaggaattaagatctttaatgcagacgtcatctatcatttatttgattcatttacagcataccaagaaaagttattggaagaacgtcgtaaagatttcctagattacgctattttcccatgtgtcttacaaaccttacaaattattaacaaacgtggtccaatgattattggtgtagacgttctggaaggtactctacgtgtgggaactcctatttgcgctgtgaaaaccgaccctactacaaaggaaagacaaactttgatattaggtaaagtcatctctttagaaatcaaccatcaacctgtccaagaagtaaagaagggccaaaccgctgctggtgttgccgtccgtctagaagatccctccggtcaacaacctatctggggtcgtcatgttgacgagaatgatacattatactccttggtttcaagaagatctattgacactttgaaggataaagcttttagggaccaagttgctagatccgattggctgctattgaagaagctgaaggtcgttttcggcatcgaatga

SEQ ID NO: 70 - DNA, 3009 bp, Artificial Sequence
  Description of Artificial Sequence: Synthetic polynucleotide
atggcgaaaaagagtaaaaagaaccaacagaactactgggatgaggaattcgaagaagacgccgcccagaacgaagaaatcagtgccacgccaactccaaatccagaaagcagcgcaggtgcagatgacacttccagagaagcaagtgcaagtgctgaaggtgctgaggccattgaaggcgacttcatgtctactttgaagcaatccaagaagaagcaagaaaagaaggttattgaagagaagaaggatggtaagcctatattgaagtccaagaaggaaaaggagaaggaaaaaaaggaaaaggagaagcagaagaagaaagaacaagctgccaggaagaaggcccaacagcaagctcaaaaggagaagaacaaggagttgaacaagcaaaatgttgaaaaagctgctgctgagaaggctgctgctgagaaatcccaaaaatctaaaggtgaaagtgataaaccaagtgctagtgctaagaagccagccaagaaagtacctgccggtttggctgctttgagacgtcaattagaattgaagaaacaacttgaagaacaagaaaagttggaaagagaggaagaagaaagattggagaaagaagaggaggaaagattggccaacgaagaaaaaatgaaggaagaagctaaagcagctaaaaaggaaaaggagaaggcaaagcgtgaaaaaagaaaggctgaaggtaagttgttgaccagaaagcaaaaagaagaaaagaaattattggaaagaagacgtgccgctttattgtcttccggtaacgtcaaagttgccggtttagccaagaaggatggagaagaaaacaaaccaaagaaggttgtttacagcaagaagaagaagagaacaacccaggaaaacgcctccgaagccattaaatctgactctaagaaagactctgaagttgtacctgatgacgaactcaaagaatccgaagatgttttgattgatgattgggaaaatttggctcttggtgatgatgacgaggagggaaccaacgaagaaacgcaagaatccaccgcaagccatgaaaatgaagaccaaaatcaaggcgaagaagaagaagaaggagaagaagaagaagaagaagaagaagaaagagcacatgtgcatgaagttgccaaaagcacaccagcagctacaccagcagctactccaactccatccagcgcttctccaaacaaaaaagatcttcgttccccaatttgttgtattttgggtcatgtcgataccggtaagactaaattgttagacaaaatcagacaaaccaacgttcaaggtggtgaagctggtggcatcacccaacagattggtgccacttatttccccatcgacgctattaaggcaaaaactaaagttatggctgaatatgaaaaacaaacttttgatgtcccaggtcttttggttattgataccccaggtcacgaatccttctctaacttacgttccagaggttcttctttgtgtaacatcgcaattttggttattgacattatgcatggtttggaacaacagactattgaatctatcaaattattaagagatagaaaggctccatttgtcgttgccttgaacaaaattgatagattatatgactggaaagccattccaaacaattctttcagagactcctttgcaaagcaatctagagctgttcaagaggaatttcaatctaggtattctaagattcaattggaattagctgaacaaggtttgaattctgaattgtatttccaaaacaaaaatatgtctaagtatgtctccattgtcccaacatctgccgtcaccggtgagggtgttccagatttattgtggttgttattagaattgacccaaaagaggatgtccaaacaattgatgtacttgtctcacgtggaagcaaccattttggaagtgaaagtcgtagaaggttttggtaccacaattgatgttatcttgtccaacggttacttgagagaaggtgaccgtattgtattatgtggtatgaatggtccaattgtaacgaatatcagagcattattaacaccacaaccattacgtgaattgcgtttgaaatctgaatatgtccaccacaaagaagtcaaggctgctttaggtgtcaagattgccgctaatgatttagaaaaagccgtttctggttctaggcttttggttgtcggtcctgaagatgacgaagatgaattgatggacgacgttatggatgatttgactggtttgttggactccgttgacacaactggtaaaggtgttgtggtccaagcatccaccttgggttctttggaagctttgttggatttcttgaaagacatgaaaatccctgtgatgtctatcgggttaggtccagtgtacaagcgtgatgttatgaaagcctccactatgttggaaaaggctccagagtatgccgtgatgttatgttttgatgttaaagtggataaggaagctgaacaatacgctgaacaagaaggaattaagatctttaatgcagacgtcatctatcatttatttgattcttttacagcataccaagaaaagttattggaagaacgtcgtaaagatttcttggattacgctattttcccatgtgtcttacaaaccttacaaattattaacaaacgtggtccaatgattattggtgtagacgttttggaaggtactttacgtgtgggaactcctatttgcgctgtgaaaaccgaccctactacaaaggaaagacaaactttgatattaggtaaagtcatctctttagaaatcaaccatcaacctgtccaagaagtaaagaagggccaaaccgctgctggtgttgccgtccgtttagaagatccctccggtcaacaacctatctggggtcgtcatgttgacgagaatgatacattatactccttggtttctagaagatctattgacactttgaaggataaagcttttagggaccaagttgctagatccgattggttgttgttgaagaagttgaaggtcgttttcggcatcgaatga

SEQ ID NO: 71 - DNA, 870 bp, Saccharomyces cerevisiae
atgtctgctcccactatgagatccacctcaatattgacagagcatttgggatatccgcccatctcgcttgttgatgatatcattaatgctgtaaatgaaattatgtacaagtgcactgctgccatggaaaaatatctgctatccaagagcaaaatcggcgaggaagattatggagaagagatcaaaagtggagttgctaagttggaatcacttttggaaaactccgtggataagaattttgacaaactagaactatatgttttgaggaacgtccttcgaatccctgaagagtatttggacgccaatgtttttagattggagaaccaaaaggatctggtcattgtagatgagaatgagttgaagaaaagtgaggagaaacttcgagagaaagtgaacgacgtggagttagcgttcaaaaagaatgaaatgctattgaaaagagttacaaaagtgaaaagactgttgtttacgataagaggattcaaacaaaagctaaacgagttactgaaatgcaaagacgatgtacaattgcagaaaattttggagtcgttaaaacctatagatgacacaatgactctactgactgattcattacgtaaactatatgttgatagtgaaagtaccagttcaacagaggaggtagaggcactactgcagagattgaagaccaacgggaagcaaaataataaggatttcagaacacgatatatcgatataaggacgaataatgtcctacgaaaattggggctactaggtgataaagaggacgaaaaacagtctgccaagccggatgcgaggacgcaagcaggggatatagttagtatagatattgaagagcctcaattggatttacttgatgatgtgttataa

SEQ ID NO: 72 - DNA, 870 bp, Artificial Sequence
  Description of Artificial Sequence: Synthetic polynucleotide
atgtctgctcccactatgagatccaccagtatattgacagagcatttgggatatccgcccatctctcttgttgatgatatcattaatgctgtaaatgaaattatgtacaagtgcactgctgccatggaaaaatatttattatccaagagcaaaatcggcgaggaagattatggagaagagatcaaaagtggagttgctaagttggaatctcttttggaaaactccgtggataagaattttgacaaattagaattgtatgttttgaggaacgtccttcgtatccctgaagagtatttggacgccaatgtttttagattggagaaccaaaaggatttggtcattgtagatgagaatgagttgaagaaaagtgaggagaaacttcgtgagaaagtgaacgacgtggagttagcgttcaaaaagaatgaaatgcttttgaaaagagttacaaaagtgaaaagattattgtttacgataagaggattcaaacaaaagttgaacgagttattgaaatgcaaagacgatgtacaattgcagaaaattttggagtctttaaaacctatagatgacacaatgactttattaactgattctttacgtaaactttatgttgatagtgaaagtaccagttctacagaggaggtagaggcattattgcagagattgaagaccaacgggaagcaaaataataaggatttcagaacaagatatatcgatataaggacgaataatgtcttgagaaaattggggttgttgggtgataaagaggacgaaaaacagtctgccaagccggatgcgaggacgcaagcaggggatatagttagtatagatattgaagagcctcaattggatttacttgatgatgtgttatga

SEQ ID NO: 73 - DNA, 1242 bp, Saccharomyces cerevisiae
atgggattatattctcctgaatctgaaaagtctcaattaaatatgaattacattggtaaggatgattcgcagtccattttcagacgtctgaatcagaatttgaaagcaagtaacaacaataacgatagtaataaaaacggtttaaacatgagtgattatagcaataattcaccctatgggcgctcgtacgacgtaagaattaaccagaactcacaaaataatggcaatggatgcttttctggcagcattgactccttggttgatgaacatataataccatcgccacctttgtcgcccaagctggagtcgaaaattagccacaatggctcaccccgcatggcctcttcagtgctagtgggatctacgcctaaaggcgctgtagagaatgtgctgttcgtgaagcctgtatggcccaatgggttatcaagaaaaaggtaccgctacgccacctacgggtttctgtctcaatacaaaattttcagcaatttggcccaaccatattctaagaacattatcaaccggtacaacaatctggcctataatgctagacataaatattccaaatacaatgatgatatgactcctcctcctctgccttcctcttcttctagattaccttccccgttagcatctccgaatttgaatagacaagcaagatataatatgaggaaacaggctctctacaataacaatctaggaaagtttgaatccgacactgaatggataccacggaaacgcaaggtatactcaccacaaagaagaacgatgactaccagtccacatcgcgccaagaagttctcaccctctgcatccactcctcacactaacattgcatccattgaggcgattcatgatgctcctcaatatataccaaacgtctcatggaaaaaattaccagattactctccgcccttatctacgcttcctacagacagtaacaagtcactcaagatcgagtggaaggggtctccaatggacctgtccacagacccgctgaggaacgagctacaccctgctgaactagttctcgctcaaactctaaggttaccttgtgatttgtatctggattctaagagaaggttatttttggaaaaagtttatagactaaagaaagggttgccgtttagaaggaccgacgcccaaaaagcctgtaggatcgacgttaataaagcatcaagactattccaagctttcgagaaggttggctggctacaggattcgaattttacgaagtacttataa

SEQ ID NO: 74 - DNA, 1242 bp, Artificial Sequence
  Description of Artificial Sequence: Synthetic polynucleotide
atgggattatattctcctgaatctgaaaagtctcaattaaatatgaattacattggtaaggatgattctcagtccattttcagacgtttgaatcagaatttgaaagcaagtaacaacaataacgatagtaataaaaacggtttaaacatgagtgattatagcaataattctccctatgggcgcagttacgacgtaagaattaaccagaactctcaaaataatggcaatggatgcttttctggcagcattgactccttggttgatgaacatataataccatctccacctttgagccccaagttggagagtaaaattagccacaatggctccccccgcatggcctcttctgtgttagtgggatctacgcctaaaggcgctgtagagaatgtgcttttcgtgaagcctgtatggcccaatgggttatctagaaaaaggtaccgctacgccacctacgggtttttatctcaatacaaaattttcagcaatttggcccaaccatattctaagaacattatcaacagatacaacaatttggcctataatgctagacataaatattccaaatacaatgatgatatgactcctcctcctttgccttcctcttcttctagattaccttccccgttagcatctccgaatttgaatagacaagcaagatataatatgaggaaacaggctctctacaataacaatttaggaaagtttgaatccgacactgaatggataccaagaaaacgcaaggtatactctccacaaagaagaacgatgactaccagtccacatcgcgccaagaagttctctccctctgcatccactcctcacactaacattgcatccattgaggcgattcatgatgctcctcaatatataccaaacgtctcttggaaaaaattaccagattactctccgcccttatctacgcttcctacagacagtaacaagtctctcaagatcgagtggaaggggtctccaatggacttatccacagacccgttaaggaacgagttgcaccctgctgaattggttctcgctcaaactttgaggttaccttgtgatttgtatttggattctaagagaaggttatttttggaaaaagtttatagattaaagaaagggttgccgtttagaaggaccgacgcccaaaaagcctgtaggatcgacgttaataaagcatctagattattccaagctttcgagaaggttggctggttacaggattctaattttacgaagtacttatga

SEQ ID NO: 75 - DNA, 522 bp, Saccharomyces cerevisiae
atggtacgtttaaaaagtagatatatcctttttgaaattatattcccacctacagacaccaacgttgaggaatctgtgtcgaaagcagacatcttgctttcgcatcacagagcatcgcctgcggatgtgtccataaagtcgatactccaagagatacgacgctcgctgtcgttgaatctgggcgactatgggtctgcaaaatgtaactctctcttgcagttgaaatacttttcaaataagacgtctacggggataatccgatgccatcgagaggattgcgaccttgttatcatggcattgatgttgatgtcgaaaattggcgacgtcgatggactgatcgtgaaccccgtcaaggtaagtgggaccatcaagaaaatagagcagtttgctatgagaaggaattctaaaattctgaacataatcaagtgtagtcaatcatcacacctcagcgataatgactttattatcaatgatttcaagaaaattggaagggaaaacgaaaacgaaaacgaggacgattag

SEQ ID NO: 76 - DNA, 522 bp, Artificial Sequence
  Description of Artificial Sequence: Synthetic polynucleotide
atggtacgtttaaaaagtagatatatcctttttgaaattatattcccacctacagacaccaacgttgaggaatctgtgtctaaagcagacatcttgctttctcatcacagagcatctcctgcggatgtgtccataaagagtatactccaagagataaggcgctctttatctttgaatttgggcgactatgggtctgcaaaatgtaactctctcttgcagttgaaatacttttctaataagacgtctacggggataatccgttgccatagggaggattgcgaccttgttatcatggcattgatgttgatgtccaaaattggcgacgtcgatggattgatcgtgaaccccgtcaaggtaagtgggaccatcaagaaaatagagcagtttgctatgagaaggaattctaaaattttgaacataatcaagtgtagtcaatcttctcacctcagcgataatgactttattatcaatgatttcaagaaaattggaagggaaaacgaaaacgaaaacgaggacgattga

SEQ ID NO: 77 - DNA, 1140 bp, Saccharomyces cerevisiae
atgtttagtaacagactaccacctccaaaacattctcaaggacgagtttcgacggctttgagctcagatcgcgttgagccggcaatattgactgaccaaatcgctaaaaacgttaagctcgatgattttattccaaagagacagtctaatttcgaactatcggttcctttgccaacgaaagcagaaatccaagaatgtacagcaagaaccaagtcatacattcagcggcttgtgaatgcgaaactagccaactcaaataacagggcatcatcaaggtacgtcaccgaaacacatcaggcacccgcgaatctattattgaacaacagccaccatattgaggtagtgtccaagcaaatggatccattgttgccaaggttcgttgggaagaaggcgagaaaggttgtagcacccacagaaaacgacgaagtcgtgcctgttctccatatggatggcagcaatgataggggagaagctgatccaaatgagtggaagatacctgcagctgtgtcaaactggaaaaatccaaatggttataccgtggccttggaaagacgtgtaggtaaagctcttgacaacgaaaataataccatcaacgatgggtttatgaagctctccgaagcgttagaaaacgctgacaagaaggcaagacaagagatcaggtccaaaatggaattgaagcggcttgctatggaacaggaaatgcttgctaaagaatctaaattgaaagaattgagccaacgagccagataccacaacgggactccgcagacgggagcaatagttaagcccaaaaagcaaacgagcacagtggccagactaaaagagctggcgtactctcaaggaagagacgtatccgaaaagataattctgggcgcagcaaagcgttcagaacaaccggatctgcagtacgattcaagatttttcacaagaggggcaaatgcctccgccaaaaggcatgaagaccaggtttatgacaacccactgttcgtccaacaagatattgaaagcatatacaagaccaactacgaaaagctggacgaagcggtcaatgttaagagtgaaggtgccagtggttctcacggccccattcagtttactaaagctgaatccgatgataaatcggataactatggcgcctag

SEQ ID NO: 78 - DNA, 1140 bp, Artificial Sequence
  Description of Artificial Sequence: Synthetic polynucleotide
atgtttagtaacagattaccacctccaaaacattctcaaggaagagtttccacggctttgagcagtgatcgcgttgagccggcaatattgactgaccaaatcgctaaaaacgttaagctcgatgattttattccaaagagacagtctaatttcgaattaagtgttcctttgccaacgaaagcagaaatccaagaatgtacagcaagaaccaagtcctacattcagagacttgtgaatgcgaaattggccaacagtaataacagggcatcttccaggtacgtcaccgaaacacatcaggcacccgcgaatttattattgaacaacagccaccatattgaggtagtgtccaagcaaatggatccattgttgccaaggttcgttgggaagaaggcgagaaaggttgtagcacccacagaaaacgacgaagtcgtgcctgttctccatatggatggcagcaatgataggggagaagctgatccaaatgagtggaagatacctgcagctgtgtctaactggaaaaatccaaatggttataccgtggccttggaaagacgtgtaggtaaagctcttgacaacgaaaataataccatcaacgatgggtttatgaagctctccgaagcgttagaaaacgctgacaagaaggcaagacaagagatcaggtccaaaatggaattgaagagacttgctatggaacaggaaatgcttgctaaagaatctaaattgaaagaattgagccaaagagccagataccacaacgggactccgcagacgggagcaatagttaagcccaaaaagcaaacgagcacagtggccagattgaaagagttagcgtactctcaaggaagagacgtatccgaaaagataattttgggcgcagcaaagcgttctgaacaaccggatttacagtacgattccagatttttcacaagaggggcaaatgcctccgccaaaaggcatgaagaccaggtttatgacaacccattattcgtccaacaagatattgaaagcatatacaagaccaactacgaaaagttggacgaagcggtcaatgttaagagtgaaggtgccagtggttctcacggccccattcagtttactaaagctgaatccgatgataaatctgataactatggcgcctga

SEQ ID NO: 79 - DNA, 2283 bp, Saccharomyces cerevisiae
atggtagatgtgcaaaagagaaaaaagttgctagccaaagctgctgccagcgcttctattccggcaatcaaaggttctgttccgttggactcgtatgatataaaaatcattcaatataagaacgctctttacaagctgaatgaactgaataggctactaaacgttctggtaccgcatttgaagaagaaaagagacaatgacgagtcctacaaaattattcccctcgttaatttcatcttatcactttgtgagggtcctatatttaatgtaagccccgtattggctaagaggtaccatttgctctgtcgattccagctgataaagctaagcgaagtgcagcagagattatcaactaattttattgatgtagagggctggatgtttcccgaggaggtacccctagatcactataaatcgtgcatatacaataattctctacaatggaagattttaaattcgctgtcttgcattgctcaaaatgctataaaaatttataatgccaagttgagacagattttattggaaagggatgcgtacaaagctcggtcacttccatttgacacttcaataattgaagacttgttaaatccagttgaaatgacattgattctagatttagccgttttgattaatgatccagtaagggataagtccacccattccttttacaaattgcaatggcaagtgatggagaaactgaactcctgtgttcattcgaaaatcttccccattctaaggacatattacaaccaattgcagaaattttcggaaacaagacctacttcactgtcaaatttacagaaggatctaccacattgggaatggactctacacaggatatacactttccacttgcgggttttttctgtcttgtgtgttattatcagtttctctaggcaaattttcctaccgaataaacaacatttcttggacatcaagacaagattatccagcgaaaacgtgtaccattacgatttgataatttgtgagctgatggctttgctctctccagaatgtgatgatgtcacagctttattcgaactgcaggagaatttaaaattttggactcaaacggcgcgtaccgataacaattcctcaagaactcccattttccaccttcaacctggtttagttgtggaattgtttaataatcatatctgcaagattataccgaaattgaggtccattatgggattattatccaattggatggattgctggaaatatattgagaaaaattataaaaccttcgatgaaaccaatgacttgcgggagaatttgaaagaaaagctagaaagagataaggctctgtatttagaggttaaaaacgcgaaaagtaagctaaagaagaagccgtcaataacaaagctgccagcctcttcttctccatccccctcacccacatcttcagcaagcccatcaagacaggcctctttagagagcataagaacaagggcaagggcgcatttagcctcaaattcttctaggtctccctcagtatcgcctgtaaggaccactttcaacaataaaaacgcagaaacgaagaaaagcgtggtgtctccggagaaaagaaaactgatcaacggcagaaggcctagatcctcatctttgcaatcctatacaaacaaacaacaaacctcatatttgaattctacaagacatccgtcaatagctccaccttcaaagctcaacaatcaaaggtccaattctttgcagtcctcaaccatgacgttaaatcaaaaaatcgtccaagatacagtgcggcatttgatgaacaaaagtgcatctacacccaatccttctgcatcttcatcgttagcgccttcaccaaaagtatccagtataaacaacacctcctcaggaaaatcatcaagtaccctgattgccaatagtagtgatactttggctatagagacattaactctagatccggagtcaaactccagtgaattgtccatcaaaagggtgagatttgctggtgtaccgccaatgacagaggcagaaaatcctaaaccaacaaaggtgggttggtacaagaagccggctgtgctacattatccgccaatacctgcttcggcaatgatcaagccgctacagcataagtccaaatataacacgctgagacaagaagaagggtttacctttcgaaaaagtcttcgagatggattagagtgggaaaatggcgaatctggctccgaaactaccatgatgccgtttgggatcgaaatcaaagagtcgaccgggcatagaatagcttctaaaatcagaagcaaattgagataa

SEQ ID NO: 80 - DNA, 2283 bp, Artificial Sequence
  Description of Artificial Sequence: Synthetic polynucleotide
atggtagatgtgcaaaagagaaaaaagttgttagccaaagctgctgccagcgcttctattccggcaatcaaaggttctgttccgttggactcttatgatataaaaatcattcaatataagaacgctctttacaagttgaatgaattgaataggcttttgaacgttttggtaccgcatttgaagaagaaaagagacaatgacgagtcctacaaaattattcccctcgttaatttcatcttatctctttgtgagggtcctatatttaatgtaagccccgtattggctaagaggtaccatttgctctgtagattccagttgataaagttgagcgaagtgcagcagagattatctactaattttattgatgtagagggctggatgtttcccgaggaggtacccttagatcactataaaagttgcatatacaataattctttacaatggaagattttaaattctttatcttgcattgctcaaaatgctataaaaatttataatgccaagttgagacagattttattggaaagggatgcgtacaaagctagatctcttccatttgacacttccataattgaagacttgttaaatccagttgaaatgacattgattttagatttagccgttttgattaatgatccagtaagggataagtccacccattccttttacaaattgcaatggcaagtgatggagaaattgaactcctgtgttcattctaaaatcttccccattttaaggacatattacaaccaattgcagaaattttctgaaacaagacctacttctttatccaatttacagaaggatttaccacattgggaatggactttgcacaggatatacactttccacttgagagttttttctgtcttgtgtgttattatcagtttctctaggcaaattttcttgccgaataaacaacatttcttggacatcaagacaagattatccagcgaaaacgtgtaccattacgatttgataatttgtgagttgatggctttgctctctccagaatgtgatgatgtcacagctttattcgaattacaggagaatttaaaattttggactcaaacggcgcgtaccgataacaattccagcagaactcccattttccaccttcaacctggtttagttgtggaattgtttaataatcatatctgcaagattataccgaaattgaggtccattatgggattattatccaattggatggattgctggaaatatattgagaaaaattataaaaccttcgatgaaaccaatgacttgagagagaatttgaaagaaaagttggaaagagataaggctttgtatttagaggttaaaaacgcgaaaagtaagttgaagaagaagccgagcataacaaagttaccagcctcttcttctccatccccctctcccacatcttctgcaagcccatctagacaggcctctttagagagcataagaacaagggcaagggcgcatttagcctctaattcttctaggtctccctctgtatctcctgtaaggaccactttcaacaataaaaacgcagaaacgaagaaaagcgtggtgtctccggagaaaagaaaattaatcaacggcagaaggcctagatcctcttctttgcaatcctatacaaacaaacaacaaacctcttatttgaattctacaagacatccgagcatagctccaccttctaagctcaacaatcaaaggtccaattctttgcagtcctccaccatgacgttaaatcaaaaaatcgtccaagatacagtgagacatttgatgaacaaaagtgcatctacacccaatccttctgcatcttcttctttagcgccttctccaaaagtatccagtataaacaacacctccagtggaaaatcttccagtaccttgattgccaatagtagtgatactttggctatagagacattaactttagatccggagagcaactccagtgaattgtccatcaaaagggtgagatttgctggtgtaccgccaatgacagaggcagaaaatcctaaaccaacaaaggtgggttggtacaagaagccggctgtgttacattatccgccaatacctgcttctgcaatgatcaagccgttgcagcataagtccaaatataacacgttgagacaagaagaagggtttacctttagaaaaagtcttagagatggattagagtgggaaaatggcgaatctggctccgaaactaccatgatgccgtttgggatcgaaatcaaagagtctaccgggcatagaatagcttctaaaatcagaagcaaattgagatga

SEQ ID NO: 81 - DNA, 354 bp, Saccharomyces cerevisiae
atgtcgtcatctactccctttgacccttatgctctatccgagcacgatgaagaacgaccccagaatgtacagtctaagtcaaggactgcggaactacaagctgaaattgatgataccgtgggaataatgagagataacataaataaagtagcagaaagaggtgaaagattaacgtccattgaagataaagccgataacctagcggtctcagcccaaggctttaagaggggtgccaatagggtcagaaaagccatgtggtacaaggatctaaaaatgaagatgtgtctggctttagtaatcatcatattgcttgttgtaatcatcgtccccattgctgttcactttagtcgatag

SEQ ID NO: 82 - DNA, 354 bp, Artificial Sequence
  Description of Artificial Sequence: Synthetic polynucleotide
atgtcttcttctactccctttgacccttatgctttgtccgagcacgatgaagaaaggccccagaatgtacagtctaagtccaggactgcggaattacaagctgaaattgatgataccgtgggaataatgagagataacataaataaagtagcagaaagaggtgaaagattaacgtccattgaagataaagccgataacttggcggtctctgcccaaggctttaagaggggtgccaatagggtcagaaaagccatgtggtacaaggatttgaaaatgaagatgtgtttggctttagtaatcatcatattgcttgttgtaatcatcgtccccattgctgttcactttagtaggtga

SEQ ID NO: 83 - DNA, 4416 bp, Saccharomyces cerevisiae
atgtcatttgaagtaggaactaagtgttggtaccctcacaaagaacaaggctggataggcggcgaagtcaccaagaatgacttctttgaaggaacgttccacttagagttgaaattggaggatggagaaactgtatccattgaaacaaatagcttcgaaaatgatgatgatcatcccacgctacctgtactacgaaacccacctattttagagtctactgatgacttaaccaccctatcatatctgaacgaaccggcagtgctgcatgccataaaaaaaagatacatgaatggacagatatatacttactctggtattgtccttattgccgctaatccctttgataaagtcgaccatttgtactctcgcgagatgatacagaattattctagtaagcgtaaagatgagctggagccgcacctttttgccatagcagaggaggcgtacaggttcatggtccatgaaaaggctaaccagactgttgtagtcagtggtgaatccggtgctggtaagaccgtctctgctaaatacattatgagatactttgcctcagtccaagaaagcaacaatcgtgaaggggaagtggaaatgtctcaaatcgagagccaaattttagctactaacccgatcatggaagcctttggtaacgccaaaactaccagaaatgataattcctctcgtttcggcaaatatctgcaaattttatttgatgagaatactaccatcagggggtccaaaattagaacctatctcttggaaaaatccaggttagtttatcagccagagacagaaagaaattaccatattttttaccaaattttggaaggattgccagaaccggtaaaacaagaactgcatttgtcatctcccaaggactaccattatactaaccaaggtggacagccgaacatagctggtatagatgaagctcgagaatacaagataaccactgatgccctgtcattagtaggtataaaccacgagactcagcttggaattttcaaaattcttgcaggcttgctacatataggtaatatcgagatgaaaatgactagaaacgacgcatcactatcatcggaagagcaaaacctgcaaatcgcatgtgaattattgggtattgatcccttcaattttgcaaaatggattgtcaagaaacaaatcgtcacaaggtctgaaaaaattgtcactaatttgaattacaatcaagcgctaattgctagggactctgtggcgaaatttatttattccacgctttttgattggctagtagacaacattaacaagacattatacgatcctgagctggatcaacaagatcatgtcttttcctttattggtattttagatatctacgggtttgagcattttgagaaaaactcattcgaacaattctgtataaactatgcgaatgaaaaattacaacaagagttcaaccagcacgttttcaaattggagcaagaagaatatgtaaaggaggaaattgagtggtctttcattgagttcagcgacaaccaaccttgcatagacttgattgagaataaacttggaatactttctctattagatgaagaaagtagattaccatcaggctcagatgaatcatgggcctcaaaactatattctgcctttaataaaccgccctcaaatgaagttttttcgaagccaagattcggacaaacgaagtttatagtaagccattatgctgttgatgtagaatatgaagttgaagggtttattgaaaagaatagagacagcgtttccctaggtcatctggatgttttcaaagcaacgacaaatccaattttcaaacaaattttagacaacagagaacttaggagtgacgatgctcctgaagagcaaaatactgaaaaaaagataatgatcccagcaagattaagtcaaaagaaaccaaccctgggatctatgttcaaaaaatcgctcggggaattgatggccatcataaattctactaatgttcattatattcgttgcataaaaccaaattctgaaaaaaagccatgggagttcgataatttgatggtcttatcgcaattaagagcttgtggtgtgctggaaacaatcaggatttcatgtgcaggctttccatcaagatggacttttgacgaattcgttcaaagatatttcctcctgacggactacagcttatggagtggaattctttataatccagacctcccaaaagaggcaatcgtcaacttctgtcaatctattctagatgctactatctctgattcagcaaaataccaaattggtaataccaaaattttctttaaagcaggaatgcttgcatttttggaaaagctaaggactaataaaatgaatgaaatatgcatcataatacagaaaaagataagggcaagatactataggcttcagtatttgcagaccatggaatcaataaagaagtgccaaagccaaattagaagtttgttggttcgtacaagggtcgatcatgagctcaagacaagagctgccatattactacaaacgaacattagagcattatggaaacgggaatactatagagctgccattgggcaaataataaaactacaatgtacctgtaaaagaaaattgattttagatagtgttaacaggaaattcatgctcatggcggcagtaattatccaaagctacatcagatcatatggtcacaaaacagattacagaacattgaaaaggagctccattcttgtacaaagcgccatgagaatgcagttagctagacgaaggtatatagttctgcaaaaagaagttgaagaacggaatattagggctagttacgggattggattactggaggaagctatcgaatttaagaactctttcattttgaatctagagatgttaaatgactcatatacaagattaacacagttgttgcagggagatttgtcaaatattccatctaagcaaaggcaagagtacgaaacgatagtaaatggttataatgataagatttccaagctgaagacgttacaagttgaaatcatgaatactttaaacaagaagaatgccttgaaggagagaaaaaagaagcaatcttctttaatacagtcacatatgcaaagtttggctgctataaaaggtaacaaaccttcaagattaagtgatgaagtcaaatcaatgaagcaagaactagcgtttattgaaaacgtaatagcacaagatttcaccaccacatattctgctaataagaatgataaagtgaaaggtttgggaatcgcaggacaacaagtaaaaccgaagctagtcaatgtaattcgtagagaatcaggaaatcctgatcttctagaattactaatggacctgaattgttacacattagaagtcacagaaggttacttgaaaaaagtaaatgttactgaggtgaatggagacaatgttctgggtcctatacacgtcattactacagtggtaagtagcttagtgagaaatgggttattgattcaaagtagcaaattcatctcgaaagtcctattgactgtagaaagcattgttatgagtctaccaaaggacgaaacaatgcttggtggtatcttttggttaagtaatctttccagacttcccgcatttgctgcaaatcaaaaaacattatatgaagcgaatggtggtgatgaaaaagataagttaacactgatatatttgaatgatttggagaatgaaactttaaaagtattcgacaagatttattccacttggttagtgaaattcatgaagcatgcttcagcccacatcgagatcttcgatatggttttaaacgagaagctatttaaaaattctggtgatgagaagttcgctaaattattcacattcttaaatgaatttgatgctgtcttgtgtaaatttcaagttgttgactcaatgcatacaaaaatttttaacgacaccctgaagtatctgaacgtaatgctatttaatgacctaataaccaaatgtcccgcgttaaattggaagtatgggtacgaagtggatagaaatatcgagcggttggtgagctggtttgaaccaagaattgaagacgttcgtcccaatttgattcaaataattcaggctgtcaagatattacagttgaagataagcaacttgaacgagttcaagttactattcgatttctggtatgccttgaatccagcccaaatacaagcaattctgttgaaatacaagcctgctaacaagggcgaagctggagtaccgaacgaaatcttgaattatttagctaacgtgatcaaaagagaaaatctgtctttgccagggaagatggaaattatgctttctgcccaatttgactctgctaaaaaccatctgcgttatgacactagtgcaataacacagaacagcaatacagagggcttagctactgtcagtaaaattataaaattagacagaaaataa

SEQ ID NO: 84 - DNA, 4416 bp, Artificial Sequence
  Description of Artificial Sequence: Synthetic polynucleotide
atgagttttgaagtaggaactaagtgttggtaccctcacaaagaacaaggctggataggcggcgaagtcaccaagaatgacttctttgaaggaacgttccacttagagttgaaattggaggatggagaaactgtatccattgaaacaaatagcttcgaaaatgatgatgatcatcccacgttacctgtattgagaaacccacctattttagagtctactgatgacttaaccaccttatcttatttgaacgaaccggcagtgttacatgccataaaaaaaagatacatgaatggacagatatatacttactctggtattgtccttattgccgctaatccctttgataaagtcgaccatttgtactctcgcgagatgatacagaattattctagtaagcgtaaagatgagttagagccgcacctttttgccatagcagaggaggcgtacaggttcatggtccatgaaaaggctaaccagactgttgtagtcagtggtgaatccggtgctggtaagaccgtctctgctaaatacattatgagatactttgcctctgtccaagaaagcaacaatcgtgaaggggaagtggaaatgtctcaaatcgagagccaaattttagctactaacccgatcatggaagcctttggtaacgccaaaactaccagaaatgataattcctctcgtttcggcaaatatttacaaattttatttgatgagaatactaccatcagggggtccaaaattagaacctatctcttggaaaaatccaggttagtttatcagccagagacagaaagaaattaccatattttttaccaaattttggaaggattgccagaaccggtaaaacaagaattacatttgtcttctcccaaggactaccattatactaaccaaggtggacagccgaacatagctggtatagatgaagctagagaatacaagataaccactgatgccttgtctttagtaggtataaaccacgagactcagcttggaattttcaaaattcttgcaggcttgttgcatataggtaatatcgagatgaaaatgactagaaacgacgcatctttatcttctgaagagcaaaacttacaaatcgcatgtgaattattgggtattgatcccttcaattttgcaaaatggattgtcaagaaacaaatcgtcacaaggtctgaaaaaattgtcactaatttgaattacaatcaagcgttaattgctagggactctgtggcgaaatttatttattccacgctttttgattggttggtagacaacattaacaagacattatacgatcctgagttagatcaacaagatcatgtcttttcctttattggtattttagatatctacgggtttgagcattttgagaaaaactctttcgaacaattctgtataaactatgcgaatgaaaaattacaacaagagttcaaccagcacgttttcaaattggagcaagaagaatatgtaaaggaggaaattgagtggtctttcattgagttcagcgacaaccaaccttgcatagacttgattgagaataaacttggaatactttctttattagatgaagaaagtagattaccaagtggcagtgatgaaagttgggcctccaaactttattctgcctttaataaaccgccctccaatgaagttttttccaagccaagattcggacaaacgaagtttatagtaagccattatgctgttgatgtagaatatgaagttgaagggtttattgaaaagaatagagacagcgtttccttgggtcatttggatgttttcaaagcaacgacaaatccaattttcaaacaaattttagacaacagagaacttaggagtgacgatgctcctgaagagcaaaatactgaaaaaaagataatgatcccagcaagattaagtcaaaagaaaccaaccttaggatctatgttcaaaaaatctctcggggaattgatggccatcataaattctactaatgttcattatattcgttgcataaaaccaaattctgaaaaaaagccatgggagttcgataatttgatggtcttatctcaattaagagcttgtggtgtgttggaaacaatcaggattagttgtgcaggctttccatctagatggacttttgacgaattcgttcaaagatatttcctcttgacggactacagcttatggagtggaattctttataatccagacctcccaaaagaggcaatcgtcaacttctgtcaatctattttagatgctactatctctgattctgcaaaataccaaattggtaataccaaaattttctttaaagcaggaatgcttgcatttttggaaaagttaaggactaataaaatgaatgaaatatgcatcataatacagaaaaagataagggcaagatactataggcttcagtatttgcagaccatggaaagtataaagaagtgccaaagccaaattagaagtttgttggttcgtacaagggtcgatcatgagctcaagacaagagctgccatattattacaaacgaacattagagcattatggaaaagagaatactatagagctgccattgggcaaataataaaattacaatgtacctgtaaaagaaaattgattttagatagtgttaacaggaaattcatgctcatggcggcagtaattatccaaagctacatcagatcttatggtcacaaaacagattacagaacattgaaaaggagctccattcttgtacaaagcgccatgagaatgcagttagctagaagaaggtatatagttttgcaaaaagaagttgaagaaagaaatattagggctagttacgggattggattattggaggaagctatcgaatttaagaactctttcattttgaatttggagatgttaaatgactcttatacaagattaacacagttgttgcagggagatttgagcaatattccatctaagcaaaggcaagagtacgaaacgatagtaaatggttataatgataagatttccaagttgaagacgttacaagttgaaatcatgaatactttaaacaagaagaatgccttgaaggagagaaaaaagaagcaatcttctttaatacagtctcatatgcaaagtttggctgctataaaaggtaacaaaccttccagattaagtgatgaagtcaaatctatgaagcaagaattggcgtttattgaaaacgtaatagcacaagatttcaccaccacatattctgctaataagaatgataaagtgaaaggtttgggaatcgcaggacaacaagtaaaaccgaagttggtcaatgtaattcgtagagaatctggaaatcctgatcttttagaattattgatggacttgaattgttacacattagaagtcacagaaggttacttgaaaaaagtaaatgttactgaggtgaatggagacaatgttttaggtcctatacacgtcattactacagtggtaagtagcttagtgagaaatgggttattgattcaaagtagcaaattcatctccaaagtcttattgactgtagaaagcattgttatgagtttaccaaaggacgaaacaatgcttggtggtatcttttggttaagtaatctttccagacttcccgcatttgctgcaaatcaaaaaacattatatgaagcgaatggtggtgatgaaaaagataagttaacattaatatatttgaatgatttggagaatgaaactttaaaagtattcgacaagatttattccacttggttagtgaaattcatgaagcatgcttctgcccacatcgagatcttcgatatggttttaaacgagaagttatttaaaaattctggtgatgagaagttcgctaaattattcacattcttaaatgaatttgatgctgtcttgtgtaaatttcaagttgttgactccatgcatacaaaaatttttaacgacaccttgaagtatttgaacgtaatgttatttaatgacttgataaccaaatgtcccgcgttaaattggaagtatgggtacgaagtggatagaaatatcgagagattggtgagctggtttgaaccaagaattgaagacgttcgtcccaatttgattcaaataattcaggctgtcaagatattacagttgaagataagcaacttgaacgagttcaagttattattcgatttctggtatgccttgaatccagcccaaatacaagcaattttattgaaatacaagcctgctaacaagggcgaagctggagtaccgaacgaaatcttgaattatttagctaacgtgatcaaaagagaaaatttatctttgccagggaagatggaaattatgctttctgcccaatttgactctgctaaaaaccatttacgttatgacactagtgcaataacacagaacagcaatacagagggcttagctactgtcagtaaaattataaaattagacagaaaatga

SEQ ID NO: 85 - DNA, 1587 bp, Saccharomyces cerevisiae
atgcaaaatgctcaaataaagagctcttctaaaggcagcggaatagatggtacagatcgcaatagcaaagatggtgtagaaaagagacccctggaagatgtaaagcaaatgattgacgctggaacaccagatgttggccacaaatctactgttgaaactaagccaaacgttggatggcaagcctctcacagtaatttggctgcattacacgaaaaagagcagaaatatgaaatggagcaccatcatgctcgtcataaactgcatcgtcaagttattccggattacacgtctgcctcgaccgcaatgttcagcgattgtatgttcaacgcagcaccagataaagtacgaagtctcagtacgatgaagtcttctggactctcgccaaaacacccatttaacgtagtcgccacctttaaaggaccattcccgcagcatagtgtagaatcaaagcctctcgatggtggatactctgccaaagaccattttccctcatttaagatgttgcaagcccagcagcacccagcccatcgccattacaaagacaacgacaagtacggtcttaaatcaccttcccggtccttcgtgaaggacaagaaaaggttggttcaccggtttttgaaatccatggagccttcttcgtctgggcaatctaaggattcgtctgcactggcgccggctttcgatccaatattgcccaatgttatatctaagccttccaagcgacccacacatcattcgcattcatcagacgggagttctagcacgcagacagatatatcgttacagagcttgctttaccatgatcttgaaagctcaccaaagaaacatgtttcgccctcaagaccgccctctgtagcttccgaatcctctcctgccgttgctaatcccattgggctttcgccaaaagacgcctgcaatgcatcgttttcgcagtcgtcctcatcttcgttgtcttcttcttcatcgtcttcatcatcgacgtcattctcacagtcagtggctgttgatcctcttgaacctcctggaaatatcacatatagtagttcgaatctttcgctaaattcagatgaattagactactatcagcgtcatatcggattgcagttacagcagacagaagctttactaaagcacagtttgaaagatgaggttctgaaagatgaaaatgaccttgttaaaaacattgcaaattttgacaagatcgttaaagagctaagggacttaagatccaggaccattggatggaaagagcttgttgaagaggattatttaatgaatttgaaacaggattttgacaaggaaaaccccgaatcatttgaggcacgtttgagtgatacaataaatacaaacgtggcaaaattacaagatttagagaaaagaatggcttcttgcaaagacaggttggcctctaggaaggaagtaatgaggaaaatggaaagtttattgtctttggagaattccttaatgatatccaaaaaaaatgtaacattcgcatctaaataccgcaacgaggcccttgatattgtctttttaattatcatcatcgtcatatgctataccttcaagcatctagtatcgcataaataa

SEQ ID NO: 86 - DNA, 1587 bp, Artificial Sequence
  Description of Artificial Sequence: Synthetic polynucleotide
atgcaaaatgctcaaataaagagctcttctaaaggcagcggaatagatggtacagatcgcaatagcaaagatggtgtagaaaagagacccttagaagatgtaaagcaaatgattgacgctggaacaccagatgttggccacaaatctactgttgaaactaagccaaacgttggatggcaagcctctcacagtaatttggctgcattacacgaaaaagagcagaaatatgaaatggagcaccatcatgctcgtcataaattgcatcgtcaagttattccggattacacgtctgccagcaccgcaatgttcagcgattgtatgttcaacgcagcaccagataaagtaaggagtctcagtacgatgaagtcttctggactctctccaaaacacccatttaacgtagtcgccacctttaaaggaccattcccgcagcatagtgtagaatccaagcctctcgatggtggatactctgccaaagaccattttcccagttttaagatgttgcaagcccagcagcacccagcccatcgccattacaaagacaacgacaagtacggtcttaaatctccttccagatccttcgtgaaggacaagaaaaggttggttcacagatttttgaaatccatggagccttcttcttctgggcaatctaaggattcttctgcattagcgccggctttcgatccaatattgcccaatgttatatctaagccttccaagagacccacacatcattctcattcttctgacgggagttctagcacgcagacagatatatctttacagagcttgctttaccatgatcttgaaagctctccaaagaaacatgtttctcccagtagaccgccctctgtagcttccgaatcctctcctgccgttgctaatcccattgggctttctccaaaagacgcctgcaatgcaagtttttcccagtcttcctcttcttctttgtcttcttcttcttcttcttcttcttctacgtccttctctcagtctgtggctgttgatcctcttgaacctcctggaaatatcacatatagtagtagtaatctttctttgaattctgatgaattagactactatcagcgtcatatcggattgcagttacagcagacagaagctttattgaagcacagtttgaaagatgaggttttgaaagatgaaaatgaccttgttaaaaacattgcaaattttgacaagatcgttaaagagttgagggacttaagatccaggaccattggatggaaagagcttgttgaagaggattatttaatgaatttgaaacaggattttgacaaggaaaaccccgaaagttttgaggcacgtttgagtgatacaataaatacaaacgtggcaaaattacaagatttagagaaaagaatggcttcttgcaaagacaggttggcctctaggaaggaagtaatgaggaaaatggaaagtttattgtctttggagaattccttaatgatatccaaaaaaaatgtaacattcgcatctaaataccgcaacgaggcccttgatattgtctttttaattatcatcatcgtcatatgctataccttcaagcatttggtatctcataaatga

SEQ ID NO: 87 - DNA, 786 bp, Saccharomyces cerevisiae
atggcaccaagtatagcaacggtaaagatagccagggacatggttttgccattacgtatatttgtcaatagaaagcagatccttcaaaccaatgataagactagcaataagtcgaatgccactatatttgaagcaccattattatcaaataactccataatctgcttaaaatcaccaaatacaagaatatatttatcgcaacaagataagaagaatctttgtgacgagatcaaggaggacctgttattgattgtttacgaactagcgtccccggaaatcatcagttccgtactcagcaaaataagagttggtcattctactgatttccaaatcaacgttctgcccaaactttttgcaggtgccgatacggataatgcggtaacttctcacatccagtctgtgacaaggctggctaaattcaaatacaagttgcactacaaacataagtgggagctcgacatattcatcaacagcattaagaagatcgccaatttaaggcactatttgatgtttcaaacattaacattaaacggtttctcattaaatgcaggacccaaaacgttattagctaggaaaatagaaaaacagccccaggtacctaatttgttaatagaaaatggggacgctgatgccctggatacaccggtggaagaggatataaaacctgtaatagaatttatgtacaagcctgttattaatttaggtgaaattattgatgtacatgtgttgcataggcctagaagacataaggtacgtacccagtcgaagcaaccccaggaggaatga

SEQ ID NO: 88 - DNA, 786 bp, Artificial Sequence
  Description of Artificial Sequence: Synthetic polynucleotide
atggcaccaagtatagcaacggtaaagatagccagggacatggttttgccattacgtatatttgtcaatagaaagcagatccttcaaaccaatgataagactagcaataagagcaatgccactatatttgaagcaccattattatccaataactccataatctgcttaaaatctccaaatacaagaatatatttatctcaacaagataagaagaatctttgtgacgagatcaaggaggacttattattgattgtttacgaattggcgtccccggaaatcatcagttccgtactcagcaaaataagagttggtcattctactgatttccaaatcaacgttttgcccaaactttttgcaggtgccgatacggataatgcggtaacttctcacatccagtctgtgacaaggttggctaaattcaaatacaagttgcactacaaacataagtgggagctcgacatattcatcaacagcattaagaagatcgccaatttaaggcactatttgatgtttcaaacattaacattaaacggtttctctttaaatgcaggacccaaaacgttattagctaggaaaatagaaaaacagccccaggtacctaatttgttaatagaaaatggggacgctgatgccttggatacaccggtggaagaggatataaaacctgtaatagaatttatgtacaagcctgttattaatttaggtgaaattattgatgtacatgtgttgcataggcctagaagacataaggtacgtacccagtccaagcaaccccaggaggaatga

SEQ ID NO: 89 - DNA, 4068 bp, Saccharomyces cerevisiae
atgaatgacgacagagaaacccccccaaagaggaaacctggggaggacgacacgcttttcgatattgacttcttagacgacacgacttctcattctggatcccgttcaaaggtcaccaactcacatgcgaacgcgaattatataccaccaagtcatgtacttcccgaagagactatcgacttagacgctgatgatgataacattgaaaatgatgtccatgaaaatctatttatgagcaataaccatgacgaccaaacgtcttggaatgccaatagattcgactcagatgcatatcaaccacaatccctacgagcagtcaagcctcccggtttatttgctaggtttggtaatggtctcaaaaatgcctttacgttcaaacggaagaaagggcccgaaagtttcgaaatgaatcattacaatgcggtgactaataacgaattagacgataattatctagactcgaggaataagttcaacattaaaattcttttcaaccggtacattttaagaaagaacgttggcgacgcagagggcaatggtgaaccaagagtcatccacatcaacgattctctcgctaattcctccttcggttatagtgacaaccatatatctaccaccaagtataattttgcgacctttctgcctaaatttttgttccaagaattttccaaatacgctaatctgttttttttatgtacatctgccattcaacaggtgcctcacgtctcgccaactaatagatacaccacaattggtactttattagtggttttgattgtttctgccatgaaggaatgtatcgaagatatcaagagagctaattctgataaagaattaaataattcgacagcagaaatattttcagaagcacatgatgactttgttgagaaacgatggattgatattcgtgtaggtgacataattagagtaaaatcagaggaacctattcctgctgataccataattttgtcatcttcggaaccggagggtctttgctacattgaaactgccaacttggatggtgaaacaaatttgaaaatcaaacagtcgagagtagaaactgccaaatttatagacgttaaaactttgaagaacatgaacggaaaagttgtttccgaacagccgaactctagcttgtatacttatgaaggtacaatgactttaaatgatcgtcaaataccgttatctcctgaccaaatgattttaagaggtgcaactttaagaaatactgcatggatatttggtttagttatcttcactggtcatgaaactaagttattgcgtaatgctactgcaaccccaattaaaagaaccgcggttgagaaaattatcaacagacagattattgcattgttcacagttttaatcgtgctaattttaatttcttcaattggtaatgttattatgtctactgcagatgccaaacatttatcgtacctttacctggagggtaccaacaaggctggcttattcttcaaagactttttaacattttggattctattttcgaatctagttcctatttctctatttgtcaccgttgaattaatcaaatattatcaggcttttatgataggttcagatctagatttgtactacgaaaaaactgataccccaactgtggttcgtacatcctctttggttgaagaacttggtcaaatagaatatatattcagtgacaagacaggaactttaacaagaaatattatggaatttaaatcctgctctattgcaggccattgctatattgataaaatacctgaagataaaacggccactgttgaagatgggattgaagttggttatagaaaatttgacgatttgaagaaaaagttaaatgatccctctgatgaggattcacctattatcaatgacttcttaacattactggctacctgtcatactgtcattccagaatttcaaagcgatggatctattaaatatcaagcagcctctccagatgaaggtgccctcgttcaaggtggtgcagatttagggtataagtttatcatccgtaaaccaaactctgtaactgttttattggaggaaactggcgaggaaaaagagtatcaactacttaacatttgtgaatttaattccaccaggaagagaatgagcgctatatttagatttccggatggttcgataaagttattctgtaaaggtgctgatactgtcattctggaaagattggatgatgaagctaatcaatatgtagaagctacaatgagacatttagaagattatgcatctgagggtttgcggacgttgtgtttggcgatgagagatatctctgaaggagaatatgaagaatggaatagcatttataatgaggctgccacaacattagataacagagccgagaagctagacgaagccgcaaatctaatcgagaaaaatctaatattaattggtgcaactgctattgaagataagttacaggacggtgttccagaaactatccacacattacaagaagcgggtattaaaatttgggttttaactggtgacagacaggaaactgctattaacattggtatgagttgccgtttattgagtgaagacatgaatttgttgatcatcaacgaggaaaccagagatgatactgagagaaatttgttagagaagattaacgctctaaacgagcatcaattgtcaacacatgatatgaataccttagcgctcgtcattgatgggaagtcattaggctttgccttggaaccagaattagaagattatttgctaactgtggcgaagctttgtaaagcggttatatgttgccgtgtatctccactacagaaagccttggttgttaaaatggtaaaaagaaagtcgtcttcactactgctagccattggcgatggtgccaacgatgttagtatgatacaggcagctcatgttggtgtcggtattagtggtatggaaggtatgcaagcggctcgttcagctgatatagctgttggccaatttaaatttttaaaaaaactattacttgtccatggctcctggtcttatcaaagaatttctgtcgcaattttgtactctttttacaagaatacagcattatacatgacgcagttttggtacgtttttgccaatgccttttcaggtcaatccattatggaatcatggacaatgagtttctacaacttattcttcactgtttggcccccttttgtcattggtgtatttgatcaatttgttagtagtagattacttgagcggtacccacaattgtacaaattaggacagaagggtcaatttttctctgtttacatcttctggggatggattattaatggctttttccattctgcaatagtatttattggcaccatattgatttacagatatgggtttgccttaaatatgcacggcgaactagctgatcattggtcttggggtgtaactgtctacactacaagtgtcattattgttttgggaaaggctgctttggtaactaatcaatggacgaaattcaccttaattgccattcctggttccctcttattttggttaatattcttcccaatttatgcttctatatttcctcatgctaacatctcaagagagtattatggtgtggttaaacacacgtatggatccggtgtattttggttaactttgatcgttttaccaatttttgcactggtaagagattttctatggaagtactataaaagaatgtatgaaccagaaacgtatcatgttattcaagaaatgcagaaatacaatatcagcgactctaggccgcacgttcagcaatttcaaaatgccatcaggaaggtgaggcaagtgcaaagaatgaaaaaacaaagaggatttgccttttcacaggctgaagagggtgggcaagaaaaaattgtcagaatgtatgatactactcaaaagagaggtaagtacggtgaattacaagatgcttcggcgaacccctttaatgacaataatggactgggaagtaacgactttgaaagtgcagaaccgttcattgaaaatccatttgctgatggtaatcaaaattcaaatagattcagttcttcgagagatgatatttcatttgatatatga

SEQ ID NO: 90 - DNA, 4068 bp, Artificial Sequence
  Description of Artificial Sequence: Synthetic polynucleotide
atgaatgacgacagagaaacccccccaaagaggaaacctggggaggacgacacgcttttcgatattgacttcttagacgacacgacttctcattctggatcccgttccaaggtcaccaactctcatgcgaacgcgaattatataccaccaagtcatgtacttcccgaagagactatcgacttagacgctgatgatgataacattgaaaatgatgtccatgaaaatttatttatgagcaataaccatgacgaccaaacgtcttggaatgccaatagattcgacagtgatgcatatcaaccacaatccttgagagcagtcaagcctcccggtttatttgctaggtttggtaatggtctcaaaaatgcctttacgttcaaaagaaagaaagggcccgaaagtttcgaaatgaatcattacaatgcggtgactaataacgaattagacgataattatttggacagcaggaataagttcaacattaaaattcttttcaacagatacattttaagaaagaacgttggcgacgcagagggcaatggtgaaccaagagtcatccacatcaacgattctctcgctaattcctccttcggttatagtgacaaccatatatctaccaccaagtataattttgcgacctttttacctaaatttttgttccaagaattttccaaatacgctaatttattttttttatgtacatctgccattcaacaggtgcctcacgtctctccaactaatagatacaccacaattggtactttattagtggttttgattgtttctgccatgaaggaatgtatcgaagatatcaagagagctaattctgataaagaattaaataattctacagcagaaatattttctgaagcacatgatgactttgttgagaaaagatggattgatattcgtgtaggtgacataattagagtaaaaagtgaggaacctattcctgctgataccataattttgtcttcttctgaaccggagggtctttgctacattgaaactgccaacttggatggtgaaacaaatttgaaaatcaaacagtctagagtagaaactgccaaatttatagacgttaaaactttgaagaacatgaacggaaaagttgtttccgaacagccgaactctagcttgtatacttatgaaggtacaatgactttaaatgatcgtcaaataccgttatctcctgaccaaatgattttaagaggtgcaactttaagaaatactgcatggatatttggtttagttatcttcactggtcatgaaactaagttattgcgtaatgctactgcaaccccaattaaaagaaccgcggttgagaaaattatcaacagacagattattgcattgttcacagttttaatcgtgttgattttaatttcttccattggtaatgttattatgtctactgcagatgccaaacatttatcttacctttacttggagggtaccaacaaggctggcttattcttcaaagactttttaacattttggattttattttctaatttggttcctatttctttatttgtcaccgttgaattaatcaaatattatcaggcttttatgataggttctgatttggatttgtactacgaaaaaactgataccccaactgtggttcgtacatcctctttggttgaagaacttggtcaaatagaatatatattcagtgacaagacaggaactttaacaagaaatattatggaatttaaatcctgctctattgcaggccattgctatattgataaaatacctgaagataaaacggccactgttgaagatgggattgaagttggttatagaaaatttgacgatttgaagaaaaagttaaatgatccctctgatgaggattctcctattatcaatgacttcttaacattattagctacctgtcatactgtcattccagaatttcaaagcgatggatctattaaatatcaagcagcctctccagatgaaggtgccctcgttcaaggtggtgcagatttagggtataagtttatcatccgtaaaccaaactctgtaactgttttattggaggaaactggcgaggaaaaagagtatcaattacttaacatttgtgaatttaattccaccaggaagagaatgagcgctatatttagatttccggatggttccataaagttattctgtaaaggtgctgatactgtcattttggaaagattggatgatgaagctaatcaatatgtagaagctacaatgagacatttagaagattatgcatctgagggtttgagaacgttgtgtttggcgatgagagatatctctgaaggagaatatgaagaatggaatagcatttataatgaggctgccacaacattagataacagagccgagaagttggacgaagccgcaaatttgatcgagaaaaatttgatattaattggtgcaactgctattgaagataagttacaggacggtgttccagaaactatccacacattacaagaagcgggtattaaaatttgggttttaactggtgacagacaggaaactgctattaacattggtatgagttgccgtttattgagtgaagacatgaatttgttgatcatcaacgaggaaaccagagatgatactgagagaaatttgttagagaagattaacgctttgaacgagcatcaattgagtacacatgatatgaataccttagcgctcgtcattgatgggaagtctttaggctttgccttggaaccagaattagaagattatttgttgactgtggcgaagctttgtaaagcggttatatgttgccgtgtatctccattacagaaagccttggttgttaaaatggtaaaaagaaagtcttcttctttattattagccattggcgatggtgccaacgatgttagtatgatacaggcagctcatgttggtgtcggtattagtggtatggaaggtatgcaagcggctcgttctgctgatatagctgttggccaatttaaatttttaaaaaaattattacttgtccatggctcctggtcttatcaaagaatttctgtcgcaattttgtactctttttacaagaatacagcattatacatgacgcagttttggtacgtttttgccaatgccttttctggtcaatccattatggaaagttggacaatgagtttctacaacttattcttcactgtttggcccccttttgtcattggtgtatttgatcaatttgttagtagtagattacttgagagatacccacaattgtacaaattaggacagaagggtcaatttttctctgtttacatcttctggggatggattattaatggctttttccattctgcaatagtatttattggcaccatattgatttacagatatgggtttgccttaaatatgcacggcgaattggctgatcattggtcttggggtgtaactgtctacactacaagtgtcattattgttttgggaaaggctgctttggtaactaatcaatggacgaaattcaccttaattgccattcctggttccctcttattttggttaatattcttcccaatttatgcttctatatttcctcatgctaacatctccagagagtattatggtgtggttaaacacacgtatggatccggtgtattttggttaactttgatcgttttaccaatttttgcattggtaagagattttttatggaagtactataaaagaatgtatgaaccagaaacgtatcatgttattcaagaaatgcagaaatacaatatcagcgactctaggccgcacgttcagcaatttcaaaatgccatcaggaaggtgaggcaagtgcaaagaatgaaaaaacaaagaggatttgccttttcccaggctgaagagggtgggcaagaaaaaattgtcagaatgtatgatactactcaaaagagaggtaagtacggtgaattacaagatgcttctgcgaacccctttaatgacaataatggacttggaagtaacgactttgaaagtgcagaaccgttcattgaaaatccatttgctgatggtaatcaaaatagtaatagattcagttcttctagagatgatatttcctttgatatatga

SEQ ID NO: 91 - DNA, 921 bp, Saccharomyces cerevisiae
atgtccgacgaaattgtttggcaagtgattaatcaaagtttctgctctcatagaattaaggcacctaatggtcaaaatttttgcagaaatgagtataacgtcactgggttgtgtacaaggcaatcatgcccacttgccaactccaagtatgcaacagtgaagtgtgacaatgggaaactgtacttgtatatgaagacgcctgaaagagcgcacactcctgccaagttatgggaaagaatcaaactatccaaaaattacacgaaggctttacaacagatcgacgaacacctactacattggagcaagtttttccgtcataagtgtaaacagagatttacaaaattgacgcaggtcatgataacagagagacgtttagcattaagggaggaggagagacactacgttggtgtagcaccaaaggtcaaaagaagagaacaaaacagggagagaaaggcattggtagctgccaagattgaaaaagccatcgaaaaagaattgatggacagattaaagagtggtgcttacggtgataaaccattaaatgttgacgaaaaggtctggaagaagataatgggtcaaatggaagaggagaattctcaggacgaggaagaagactgggatgaagaagaggaaagtgatgatggggaagttgaatacgttgcagatgatggcgaaggtgaatacgttgacgtggatgacttagaaaagtggttagctgactctgacagagaagcttccagcgccagtgaaagcgaaagcgacagtgaaagcgagagcgacagcgatagtgatgaagaaaataagaattcagccaagagacgtaagaagggaactagtgccaaaactaaacgtcctaaagtcgaaatcgaatacgaggaggaacacgaagttcaaaatgctgagcaagaagtggcacaataa

SEQ ID NO: 92 - DNA, 921 bp, Artificial Sequence
  Description of Artificial Sequence: Synthetic polynucleotide
atgtccgacgaaattgtttggcaagtgattaatcaaagtttctgctctcatagaattaaggcacctaatggtcaaaatttttgcagaaatgagtataacgtcactgggttgtgtacaaggcaaagttgcccacttgccaactccaagtatgcaacagtgaagtgtgacaatgggaaactttacttgtatatgaagacgcctgaaagagcgcacactcctgccaagttatgggaaagaatcaaactttccaaaaattacacgaaggctttacaacagatcgacgaacacttattacattggagcaagtttttccgtcataagtgtaaacagagatttacaaaattgacgcaggtcatgataacagagagacgtttagcattaagggaggaggagagacactacgttggtgtagcaccaaaggtcaaaagaagagaacaaaacagggagagaaaggcattggtagctgccaagattgaaaaagccatcgaaaaagaattgatggacagattaaagagtggtgcttacggtgataaaccattaaatgttgacgaaaaggtctggaagaagataatgggtcaaatggaagaggagaattctcaggacgaggaagaagactgggatgaagaagaggaaagtgatgatggggaagttgaatacgttgcagatgatggcgaaggtgaatacgttgacgtggatgacttagaaaagtggttagctgactctgacagagaagcttccagcgccagtgaaagcgaaagcgacagtgaaagcgagagcgacagcgatagtgatgaagaaaataagaattctgccaagagacgtaagaagggaactagtgccaaaactaaacgtcctaaagtcgaaatcgaatacgaggaggaacacgaagttcaaaatgctgagcaagaagtggcacaatga

SEQ ID NO: 93 - DNA, 4308 bp, Saccharomyces cerevisiae
atggaaatatttagccagaaagattactacccgactccatcctcaaatgttattagctatgaaagcgattgtgtatccaaaccagtgaatagtgcagacctgcccgcgttaattgtacacctttcttcccctttggaaggtgtagactacaacgcatctgcagattttttccttatttataggaattttataacgcctcaagacttacacgacttactcatctatagatttcgatggtgtattagggagatcacaacaaatgctgcaaaagctaagagaaggcgaattggtgaagttgccctcgtgaggacgtttgtgttgttgaggcattccatactgaattattttgtgcaagattttttaccgaacataacattaagacttcggttgatcgagtttctaaacgacaaacacattgaacagtacccaaaaataatttccagctgtataatcaatctgaaaaaaaactgggtgcattgttctaagttggtttgggagaatattgaactaaatgaacctgataaattagactttgatgcatggctgcattattcgttaaaggatttcacgcaactagaaagcctacacaaaagaggaagccgactgagcatttacgccaggcaaagttttgccagtcctgattttcgtaaccaaagcgttttatcattatataaaacttctgatgtatttagactgccggagaagctacagtcttcaaattcttccaaaaaccagagaagcccttctatgcttttatttcccgataatacatcaaatgtttactcgaagcaccgaatagcgaaagaaccttcagttgataatgaaagcgaggacatgtcagatagtaaacaaaagatcagccacttgtcaaaagtcactctagtatccacactaatgaaaggcgtagactacccgtcatcatatgcagtcgataaaataatgcctccaacaccggctaaaaaagttgaatttattctgaattccttatatattcctgaagatttaaatgaacaaagcggaacgcttcaaggtacatcgacgacatcatctctagataacaatagcaacagtaatagtagatctaatacatcttcaatgtctgtgttacatcgcagcgctattggtcttttagctaagtggatgaaaaaccataatcgccatgatagcagtaatgataaaaaatttatgagtgctattaaaccagcaaaccagaaacctgaaatggatgcgtttgtcaaatacgttgtatcaatatcatctctcaatagaaaatcttccaaggaagaagaggaagagtttcttaactctgattcttctaaatttgacatcctaagtgcaagaaccatagatgaagtggagtccctactgcatttacaaaaccagctgatagaaaaagttcaaacacattcgaataacaaccgaggtcctacagttaatgttgattgtgaacgtcgggaacacatacatgatataaagattttacaacaaaatagctttaaaccgagtaatgataattttagcgctatggacaatttggatctgtatcaaaccgtaagttcaattgctcagtcagtcatctctttaactaatactttaaacaagcaactgcagaacaatgaatcgaatatgcagccatcaccctcgtatgatgcactgcaacgaaggaaagtaaaaagtctcacgacagcatattacaataaaatgcacggtagctactcagcagaaagtatgaggctctttgataaagataatagttcttcacgtacagacgagaatggacctcaaagattgttattccatgaaactgataaaaccaactcagaagcgattacaaatatgacaccaaggaggaaaaatcattcccaatcccaaaaaagcatgacttcttcgcctctgaaaaatgttctacctgatcttaaagaatcgtctcccttaaacgatagtagggaagacacagaatcaataacatactcatacgattccgagttgtcatccagctctccacccagagatactgtaacgaaaaagtcaagaaaagtcagaaacatcgtgaataatacagatagtccaactctaaaaacaaaaactggatttttaaatctaagagagtttacatttgaagataccaagtctttagatgagaaaaagagtactatagatggccttgaaaagaattatgataacaaagaaaatcaggaatcagaatatgagagcacaaaaaagctggacaactcactcgatgcatcatcagaagccaataattatgatataactacaagaaaaaaacattcatcttgcaatcacaagatcaaacaagcagttgtaagaccggctagtggaaggatcagcatttcaagagttcaaagcattgccataacaccaaccaaagagttatccatagtagatcctgagcaaaacaagtcaaactcagttatagaggaaataagtgaaatagaacctctcaacctggaatataataaaaaaagcgcgttgtactctgatacatcgtccaccgttatcagtatctcaacgagcaagctttttgaatctgctcagaatagtcctctaaaacaaactcaaaatccacagagagaatttcccaacgggaccagcgtgagtgaaaccaatagaatcagattatccatagcacccacaatagaatctgttgtaagtgatttgaattcgattaccactggtagcacagttgaaactttcgaaacgtccagagatttaccagtgccacaccaaaggataataaatttgagagaagaatatcaaaggggtaatcaagatataatctcaaatacttcttcattgcatgagttaaaaacaattgatttaagcgattccaataatgacctagaaagtccaagtacccatgcgaaaaacaacaagtattttttttcaccagatgacggtagcattgacgttgcttctccaatgaaaaacgttgaagagctgaaaagtaaatttctgaagaacgagagtgaaactaatagtaacatatcaggaagtgtattgacaatggacgatatcgacattaatgacacatctagtgcccggaacacacggagagcaaactctgagtcggcttttacaggctccttgaataagaaaaatttaaatgaaattgctaatatgctcgatgattcaattaatgacgatccaataaccgtggcattaatgaaactggaaggtacatacgagaaaattcccgaaaaaccagagaacaccaagagtagtgacgctattggaattaaaacgagcaagttagcagatgaagtggaaatgctaaaccttaacaacttgccgtcattccaaaatagccccgcagaaaaaagaaaatcgttattaatagaaagaaggagacaaactataatgaatatcccctttactccagatcaatccgagaaggaaggctttacttcctcctctcctgaaaaaatagacgtgtcagctaatgttgatgttgctgtgcaagcggcgcaaatccaggaattaatcggtcaatacaggattcacgattcgagattaatgatttctaataatgaaagtcacgttccatttatactaatgtacgattccctgtctgtagcgcaacaaatgaccttgatagagaaggaaattttaggagaaatagactggaaagatttattagatttaaagatgaagcatgaaggcccacaagttataagttggttgcaactactagtaaggaacgagaccttatctggcattgatttagctatatccagatttaacttaactgtggattggattatatcagaaatacttcttaccaagagcagcaaaatgaaaagaaatgtcattcaaaggtttatacacgttgcagaccactgcaggacatttcagaactttaacacattgatggaaatcattctagccttaagttcttcagttgttcaaaaattcactgatgcatggcgtctgattgaaccaggcgacttactgacttgggaagagctaaagaagattccctcgctagacaggaattattctacaataagaaatctacttaactctgtgaatccactggtgggttgcgtccctttcatcgtcgtatatctttcggacctatcagcaaacgcagagaagaaagactggatcttagaagataaagtagtgaattacaataaattcgatacgaacgttcaaatagtcaagaatttcattcaaagggttcaatggtccaagttttacactttcaaagttaaccacgaattgctgagtaagtgtgtttatattagcacattaacacaagaagagattaatgaactatccacatga

SEQ ID NO: 94 - DNA, 4308 bp, Artificial Sequence
  Description of Artificial Sequence: Synthetic polynucleotide
atggaaatatttagccagaaagattactacccgactccatcctctaatgttattagctatgaaagcgattgtgtatccaaaccagtgaatagtgcagacttgcccgcgttaattgtacacctttcttcccctttggaaggtgtagactacaacgcatctgcagattttttccttatttataggaattttataacgcctcaagacttacacgacttactcatctatagatttagatggtgtattagggagatcacaacaaatgctgcaaaagctaagagaaggagaattggtgaagttgccctcgtgaggacgtttgtgttgttgaggcattccatattgaattattttgtgcaagattttttaccgaacataacattaagacttagattgatcgagtttttgaacgacaaacacattgaacagtacccaaaaataatttccagctgtataatcaatttgaaaaaaaactgggtgcattgttctaagttggtttgggagaatattgaattgaatgaacctgataaattagactttgatgcatggttacattattctttaaaggatttcacgcaattggaaagcttgcacaaaagaggaagcaggttgagcatttacgccaggcaaagttttgccagtcctgattttcgtaaccaaagcgttttatctttatataaaacttctgatgtatttagattaccggagaagttacagtcttccaattcttccaaaaaccagagaagcccttctatgcttttatttcccgataatacaagtaatgtttactccaagcacagaatagcgaaagaaccttctgttgataatgaaagcgaggacatgagtgatagtaaacaaaagatcagccacttgagtaaagtcactttggtatccacattgatgaaaggcgtagactacccgtcttcttatgcagtcgataaaataatgcctccaacaccggctaaaaaagttgaatttattttgaattccttatatattcctgaagatttaaatgaacaaagcggaacgcttcaaggtacaagtacgacatcttctttagataacaatagcaacagtaatagtagatctaatacatcttctatgtctgtgttacatcgcagcgctattggtcttttagctaagtggatgaaaaaccataatcgccatgatagcagtaatgataaaaaatttatgagtgctattaaaccagcaaaccagaaacctgaaatggatgcgtttgtcaaatacgttgtatctatatcttctctcaatagaaaatcttccaaggaagaagaggaagagtttcttaactctgattcttctaaatttgacatcttaagtgcaagaaccatagatgaagtggagtccttattacatttacaaaaccagttgatagaaaaagttcaaacacattctaataacaacagaggtcctacagttaatgttgattgtgaacgtagagaacacatacatgatataaagattttacaacaaaatagctttaaaccgagtaatgataattttagcgctatggacaatttggatttatatcaaaccgtaagttctattgctcagtctgtcatctctttaactaatactttaaacaagcaattgcagaacaatgaaagtaatatgcagccatctccctcttatgatgcattacaaagaaggaaagtaaaaagtctcacgacagcatattacaataaaatgcacggtagctacagtgcagaaagtatgaggctctttgataaagataatagttcttctcgtacagacgagaatggacctcaaagattgttattccatgaaactgataaaaccaactctgaagcgattacaaatatgacaccaaggaggaaaaatcattcccaatcccaaaaaagcatgacttcttctcctttgaaaaatgttttacctgatcttaaagaaagctctcccttaaacgatagtagggaagacacagaaagtataacatactcctacgattccgagttgtcttccagctctccacccagagatactgtaacgaaaaagtctagaaaagtcagaaacatcgtgaataatacagatagtccaactttgaaaacaaaaactggatttttaaatttaagagagtttacatttgaagataccaagtctttagatgagaaaaagagtactatagatggccttgaaaagaattatgataacaaagaaaatcaggaaagtgaatatgagagcacaaaaaagttggacaactctctcgatgcatcttctgaagccaataattatgatataactacaagaaaaaaacattcttcttgcaatcacaagatcaaacaagcagttgtaagaccggctagtggaaggatcagcatttctagagttcaaagcattgccataacaccaaccaaagagttatccatagtagatcctgagcaaaacaagtctaactctgttatagaggaaataagtgaaatagaacctctcaacttggaatataataaaaaaagcgcgttgtactctgatacatcttccaccgttatcagtatctctacgagcaagctttttgaatctgctcagaatagtcctttgaaacaaactcaaaatccacagagagaatttcccaacgggaccagcgtgagtgaaaccaatagaatcagattatccatagcacccacaatagaatctgttgtaagtgatttgaattctattaccactggtagcacagttgaaactttcgaaacgtccagagatttaccagtgccacaccaaaggataataaatttgagagaagaatatcaaaggggtaatcaagatataatctctaatacttcttctttgcatgagttaaaaacaattgatttaagcgattccaataatgacttggaaagtccaagtacccatgcgaaaaacaacaagtattttttttctccagatgacggtagcattgacgttgcttctccaatgaaaaacgttgaagagttgaaaagtaaatttttgaagaacgagagtgaaactaatagtaacatatctggaagtgtattgacaatggacgatatcgacattaatgacacatctagtgccagaaacacaagaagagcaaactctgagtctgcttttacaggctccttgaataagaaaaatttaaatgaaattgctaatatgctcgatgattctattaatgacgatccaataaccgtggcattaatgaaattagaaggtacatacgagaaaattcccgaaaaaccagagaacaccaagagtagtgacgctattggaattaaaacgagcaagttagcagatgaagtggaaatgttgaaccttaacaacttgccgtccttccaaaatagccccgcagaaaaaagaaaatctttattaatagaaagaaggagacaaactataatgaatatcccctttactccagatcaatccgagaaggaaggctttacttcctcctctcctgaaaaaatagacgtgtctgctaatgttgatgttgctgtgcaagcggcgcaaatccaggaattaatcggtcaatacaggattcacgattccagattaatgatttctaataatgaaagtcacgttccatttatattaatgtacgattccttatctgtagcgcaacaaatgaccttgatagagaaggaaattttaggagaaatagactggaaagatttattagatttaaagatgaagcatgaaggcccacaagttataagttggttgcaattattggtaaggaacgagaccttatctggcattgatttagctatatccagatttaacttaactgtggattggattatatctgaaatacttcttaccaagagcagcaaaatgaaaagaaatgtcattcaaaggtttatacacgttgcagaccactgcaggacatttcagaactttaacacattgatggaaatcattttagccttaagttcttctgttgttcaaaaattcactgatgcatggcgtttaattgaaccaggcgacttattaacttgggaagagttgaagaagattccctctttggacaggaattattctacaataagaaatttacttaactctgtgaatccattggtgggttgcgtccctttcatcgtcgtatatctttctgacttaagtgcaaacgcagagaagaaagactggatcttagaagataaagtagtgaattacaataaattcgatacgaacgttcaaatagtcaagaatttcattcaaagggttcaatggtccaagttttacactttcaaagttaaccacgaattgttaagtaagtgtgtttatattagcacattaacacaagaagagattaatgaattatccacatga

SEQ ID NO: 95 - DNA, 2280 bp, Saccharomyces cerevisiae
atgtcctcgtcttcgtctaccgggtacagcaaaaacaatgccgcccacattaagcaagagaatacactgagacaaagagaatcgtcttccatcagcgtcagtgaggaactttcgagcgctgatgagagagacgcggaagatttctcgaaggaaaagcccgctgcacaaagctcactgttacgcctggaatccgttgtaatgccggtgatctttactgcattggcgttgtttaccaggatgtacaaaatcggcatcaacaaccatgttgtttgggatgaggcgcactttggtaaatttggttcttattacttgagacacgaattttaccacgatgtccatcctcccctaggaaaaatgctggtcgggttgtctggttatttggcaggctacaacggttcttgggacttcccttctggggaaatttacccagactatttggattatgttaaaatgagactgttcaacgcgtcattttccgcgctctgtgtgccattggcctacttcactgccaaagctattggattttctttaccaacagtttggctgatgaccgtgttggttttgtttgaaaactcgtatagtactttgggcaggttcattcttttggactccatgctacttttcttcactgtcgcatcgttctttagttttgttatgttccacaaccagaggtccaagccgttctctagaaagtggtggaaatggctgttgatcactggtatttctttgggttgcactatttccgtcaaaatggtgggtctatttatcatcactatggtcggtatctatactgtgattgacttatggacctttttggcagataaatccatgtcatggaaaacctatattaaccactggttggcaagaatatttggtcttattatcgtccccttctgcattttcctattgtgcttcaaaatacattttgacctattatcgcattctggtacaggtgatgctaacatgccatctcttttccaagcaagattagtgggttctgacgtcggacaaggcccccgtgacattgctctaggttcctccgttgtttccatcaaaaaccaagctcttggaggatctctattgcactcacatatacaaacttatccagatgggtccaaccaacaacaagtaacctgttatggttacaaagatgctaacaacgaatggtttttcaacagagaaagaggcttaccatcatggtcagaaaacgaaactgacatcgagtatttgaagccaggtacctcctatagattggtacacaaaagcacgggcagaaacttgcacacccacccagttgctgcaccagtgtcaaagacacaatgggaggtttctggttacggtgacaatgttgttggtgacaacaaagacaattgggttattgagatcatggaccaaagaggagatgaagaccctgagaagttgcacacattgaccacctctttccgtatcaagaacttggagatgggctgttacttggctcaaaccggtaacagtttgcccgaatggggtttcagacaacaagaggttgtctgcatgaaaaacccattcaagagggacaagaggacctggtggaacatcgagacccacgaaaatgaaaggttgccaccaagacccgaagattttcaatacccaaagaccaacttcttaaaagacttcattcatttaaatctagccatgatggccactaataacgctttggtgccagatccagacaaatttgattacttagcttcctcagcatggcaatggccaactttgaatgtgggtttgagactatgtggctggggtgatgataatccaaaatacttcctattgggtaccccagcttccacgtgggcttctagtgttgccgtcctcgcattcatggccacggtcgttatcttactgatcagatggcaaagacaatatgtggacctaagaaatccatctaactggaacgttttcttaatgggcgggttctacccactactagcttggggcctacactacatgccattcgttatcatgtctagagtcacctacgttcatcattacttgcctgccttgtattttgcactgatcattttggcgtactgtttcgacgccggtttgcaaaaatggtccagatctaagtgcggccgtatcatgcggttcgtcctatacgccggattcatggcacttgtaattggttgcttctggtacttctccccaatatcatttggtatggagggaccaagtagtaacttccgctacttaaactggttttccacttgggacattgccgacaagcaagaagcatga

SEQ ID NO: 96 - DNA, 2280 bp, Artificial Sequence
  Description of Artificial Sequence: Synthetic polynucleotide
atgtcctcttcttcttctaccgggtacagcaaaaacaatgccgcccacattaagcaagagaatacattaagacaaagagaaagctcttccatcagcgtcagtgaggaactttctagcgctgatgagagagacgcggaagatttctccaaggaaaagcccgctgcacaaagcagtttgttacgcttagaatccgttgtaatgccggtgatctttactgcattggcgttgtttaccaggatgtacaaaatcggcatcaacaaccatgttgtttgggatgaggcgcactttggtaaatttggttcttattacttgagacacgaattttaccacgatgtccatcctcccttaggaaaaatgcttgtcgggttgtctggttatttggcaggctacaacggttcttgggacttcccttctggggaaatttacccagactatttggattatgttaaaatgagattattcaacgcgtctttttccgcgctctgtgtgccattggcctacttcactgccaaagctattggattttctttaccaacagtttggttaatgaccgtgttggttttgtttgaaaacagttatagtactttgggcaggttcattcttttggactccatgttacttttcttcactgtcgcatctttctttagttttgttatgttccacaaccagaggtccaagccgttctctagaaagtggtggaaatggttattgatcactggtatttctttgggttgcactatttccgtcaaaatggtgggtttatttatcatcactatggtcggtatctatactgtgattgacttatggacctttttggcagataaatccatgtcttggaaaacctatattaaccactggttggcaagaatatttggtcttattatcgtccccttctgcattttcttgttgtgcttcaaaatacattttgacttattatctcattctggtacaggtgatgctaacatgccatctcttttccaagcaagattagtgggttctgacgtcggacaaggcccccgtgacattgctttgggttcctccgttgtttccatcaaaaaccaagctcttggaggatctttgttgcactctcatatacaaacttatccagatgggtccaaccaacaacaagtaacctgttatggttacaaagatgctaacaacgaatggtttttcaacagagaaagaggcttaccatcttggtctgaaaacgaaactgacatcgagtatttgaagccaggtacctcctatagattggtacacaaaagcacgggcagaaacttgcacacccacccagttgctgcaccagtgagcaagacacaatgggaggtttctggttacggtgacaatgttgttggtgacaacaaagacaattgggttattgagatcatggaccaaagaggagatgaagaccctgagaagttgcacacattgaccacctctttccgtatcaagaacttggagatgggctgttacttggctcaaaccggtaacagtttgcccgaatggggtttcagacaacaagaggttgtctgcatgaaaaacccattcaagagggacaagaggacctggtggaacatcgagacccacgaaaatgaaaggttgccaccaagacccgaagattttcaatacccaaagaccaacttcttaaaagacttcattcatttaaatttggccatgatggccactaataacgctttggtgccagatccagacaaatttgattacttagcttcctctgcatggcaatggccaactttgaatgtgggtttgagattatgtggctggggtgatgataatccaaaatacttcttgttgggtaccccagcttccacgtgggcttctagtgttgccgtcctcgcattcatggccacggtcgttatcttattgatcagatggcaaagacaatatgtggacttgagaaatccatctaactggaacgttttcttaatgggcgggttctacccattgttggcttggggcttgcactacatgccattcgttatcatgtctagagtcacctacgttcatcattacttgcctgccttgtattttgcattaatcattttggcgtactgtttcgacgccggtttgcaaaaatggtccagatctaagtgcggccgtatcatgagattcgtcttgtacgccggattcatggcacttgtaattggttgcttctggtacttctccccaatatcctttggtatggagggaccaagtagtaacttccgctacttaaactggttttccacttgggacattgccgacaagcaagaagcatga

SEQ ID NO: 97 - DNA, 1554 bp, Saccharomyces cerevisiae
atgagtactagtgcggacactgataccatcaagaagccaatccttgcggtgccagagcctgcactggccgatacgcattcagaggagatatcacgctctggagaagaacatgaatcagagaacaacgagcactcagatgaagaaggcgataattattctgaaagagagcaatctgtgtcaaccgaaccactggatacattgccgttaagaaaaaagttgaaaaatctttcatatattacatttttcgccataggaataggtcttttatggccgtggaactgtatcctcagtgcctcgcaatattttaagcacgatattttcaaagacacctccatttgggcaaagatcttcacaagctctatgatgtccttttctaccatatcgtcaatgctgttcaacatctacttggccaaaagacagtacaaatactcgagaagggtcataaacgggcttgtgtgggagattattgtctttactgtcatgtgcttctttacaattttgcatttccttttacctaaatggttcaatttcatgtttataatgatgcttgtagtgatcagttccatggggacagccatgacacagaatggtatcatggccatagccaacgtcttcggttccgagtacagtcaaggtgtcatggtggggcaagccgttgctggtgtcctgccctccctagtgctttttgccctagctttcatcgagaactcttctgtgtctactacgggcgggattcttctatacttttttaccacaacactcgtggtcaccatttgtgtggtcatgttcagcgtgagcaaaatcagtcggaaagtgaacgagaattggaatgtggaagacggacatatcactgatgtgttgttagggtctctgcgctccaatgaggaggaaatccgtattgttggccgcattgaccaaatggaggatgaagaccaccgccgcaccaacggcactcgcgacgacaacgacgaaggtgaggaactccaactaaaagtgcctttcgaggtcttatttgccaaactaaagtacctggttctttccatattcaccacgtttgtcgtaactcttgtttttcctgtatttgcgtctgccacctacgtgacagggcttcctttaagcaacgcacagtacatacctctcatattcacgctgtggaacctaggcgacctttacggaagagtcattgccgactggcccatgttccgtgaccagaaatttacgccacgcaaaaccttcatctactcattgttgcgggtggccgcaataccactgttcttgatgttcacagccatcacctcctcttcaagcggcgatgaagagcacaatggctccgtaatcgttgacttgtgttacatgctactgcagttccttttcggcgtaaccaacgggcacgtcatctctatgagtttcatgaaggtgccagagcaactggacaacgacgacgagaaggaagcggccggtggattcactaatattttcgtttctacaggactagctctgggcagcatcataagctacgtattcgtcttcataattgactttattatcaggtag

SEQ ID NO: 98 - DNA, 1554 bp, Artificial Sequence
  Description of Artificial Sequence: Synthetic polynucleotide
atgagtactagtgcggacactgataccatcaagaagccaatccttgcggtgccagagcctgcattggccgatacgcattctgaggagatatctcgctctggagaagaacatgaaagtgagaacaacgagcacagtgatgaagaaggcgataattattctgaaagagagcaatctgtgtctaccgaaccattagatacattgccgttaagaaaaaagttgaaaaatctttcctatattacatttttcgccataggaataggtcttttatggccgtggaactgtatcctcagtgcctctcaatattttaagcacgatattttcaaagacacctccatttgggcaaagatcttcacaagctctatgatgtccttttctaccatatcttctatgcttttcaacatctacttggccaaaagacagtacaaatactctagaagggtcataaacgggcttgtgtgggagattattgtctttactgtcatgtgcttctttacaattttgcatttccttttacctaaatggttcaatttcatgtttataatgatgcttgtagtgatcagttccatggggacagccatgacacagaatggtatcatggccatagccaacgtcttcggttccgagtacagtcaaggtgtcatggtggggcaagccgttgctggtgtcttgccctccttagtgctttttgccttagctttcatcgagaactcttctgtgtctactacgggcgggattcttttatacttttttaccacaacactcgtggtcaccatttgtgtggtcatgttcagcgtgagcaaaatcagtagaaaagtgaacgagaattggaatgtggaagacggacatatcactgatgtgttgttagggtctttacgctccaatgaggaggaaatccgtattgttggccgcattgaccaaatggaggatgaagaccaccgccgcaccaacggcactcgcgacgacaacgacgaaggtgaggaactccaattgaaagtgcctttcgaggtcttatttgccaaattgaagtacttggttctttccatattcaccacgtttgtcgtaactcttgtttttcctgtatttgcgtctgccacctacgtgacagggcttcctttaagcaacgcacagtacatacctctcatattcacgttgtggaacttgggcgacctttacggaagagtcattgccgactggcccatgttccgtgaccagaaatttacgccacgcaaaaccttcatctactctttgttgagagtggccgcaataccattattcttgatgttcacagccatcacctcctcttctagcggcgatgaagagcacaatggctccgtaatcgttgacttgtgttacatgttattgcagttccttttcggcgtaaccaacgggcacgtcatctctatgagtttcatgaaggtgccagagcaattggacaacgacgacgagaaggaagcggccggtggattcactaatattttcgtttctacaggattggctttgggcagcatcataagctacgtattcgtcttcataattgactttattatcaggtga

SEQ ID NO: 99 - DNA, 2514 bp, Saccharomyces cerevisiae
atgaacgacccttctttactaggctaccctaatgtgggcccgcagcagcaacagcaacagcagcaacagcagcatgccgggctactaggaaagggtacaccaaacgctctacagcagcagctacacatgaaccagctcaccgggatacctccaccgggactcatgaacaacagcgatgtacacacttccagcaacaacaactcgcgccagttgctcgaccaattggctaatgggaacgcgaacatgctcaatatgaacatggataacaacaataacaacaataacaacaacaacaacaacaacaacaacggcggtggaagcggggtgatgatgaatgcctccacagccgcagtaaattctatagggatggttcctaccgttggtacgcctgtgaacatcaatgtgaacgccagtaaccctttattacacccgcacttggatgacccttctttactaaacaatccgatctggaagcttcaattgcatctggctgcagtgtccgcacaatctctggggcaacccaacatttatgctagacaaaacgctatgaagaagtatttggctacacaacaggctcagcaagctcagcaacaagcgcagcaacaggcacagcagcaggtcccgggcccatttggccccggacctcaggctgcaccaccagctttgcagcccaccgatttccagcaatctcacattgcagaagcctccaaatcactggtagactgcacaaagcaagccttgatggaaatggccgacactctcaccgacagcaagacagcaaagaaacaacaacctacgggagatagcactccctcaggcacggcaactaacagtgcagtttctacaccattgactcccaagatagagctgtttgctaatggcaaggacgaagccaaccaggcgctcttacaacacaagaaactgtctcagtacagcatcgacgaagatgacgacattgaaaacagaatggtcatgcccaaggactcgaaatacgacgaccaattatggcacgcgctagatttgtccaacttgcaaatcttcaatatcagcgccaacatcttcaagtacgattttctaacgagactatatttgaatggcaatagcctcacggaactgccagcggagatcaagaacctaagcaacctacgcgttttggacctgtcgcataataggttaacatctctaccagcggaactaggctcatgtttccaattgaaatacttctacttttttgataacatggtcaccacattaccatgggagtttgggaacctgtgtaaccttcagtttcttggtgtagaaggaaaccccttagaaaaacagtttttaaagatccttacagaaaaatctgtcacgggattgattttctacctaagggacaacagaccagagattcccttaccgcatgaacgtaggttcatcgaaatcaataccgatggggaaccacagagggagtacgattctttgcagcaatccactgagcatctggccaccgatttagccaagaggacgttcaccgtcttatcctacaacaccttatgtcaacactatgccaccccaaaaatgtaccgttacacaccgtcgtgggcgttaagttgggattacaggcgcaataaattaaaggagcagattctctcgtacgacagtgatctgttgtgtttacaagaagtggagtctaagacttttgaagagtattgggtgcccctattggacaagcacggttatacaggcatcttccatgcaaaggcaagagccaagaccatgcattccaaggactccaagaaagtggacgggtgttgcatttttttcaaaagggaccaattcaagttgatcaccaaagacgccatggatttcagcggtgcttggatgaaacacaagaagttccaaagaactgaagattatttaaaccgtgcaatgaacaaagacaacgttgcactgttcttaaagctacaacacattcctagtggcgacaccatatgggcggtcaccacgcatttgcactgggatccaaaatttaatgatgtcaagacattccaagtaggtgtcctgttagatcatctggaaacgctgctaaaggaggagacatcgcacaattttagacaggacattaagaaatttcctgtgctcatttgtggtgacttcaattcatacatcaactccgccgtatacgaattgataaatacaggccgtgtccaaatacatcaagagggaaatggtagagatttcggttacatgtcggagaaaaatttctcacataacttggctctcaaatcaagttataattgtatcggagaactaccattcaccaatttcacaccgtcattcacagatgttatcgactatatatggttttctacacatgctctaagggtgcgtgggctattgggtgaagtggaccctgaatacgtgagtaagtttatcgggttccccaacgacaaattccccagtgaccatataccattgttagcaagatttgaatttatgaagacaaacacaggcagtaagaaagtataa

SEQ ID NO: 100 - DNA, 2514 bp, Artificial Sequence
  Description of Artificial Sequence: Synthetic polynucleotide
atgaacgacccttctttattaggctaccctaatgtgggcccgcagcagcaacagcaacagcagcaacagcagcatgccgggttgttgggaaagggtacaccaaacgctttacagcagcagttgcacatgaaccagctcaccgggatacctccaccgggactcatgaacaacagcgatgtacacacttccagcaacaacaactctcgccagttgctcgaccaattggctaatgggaacgcgaacatgctcaatatgaacatggataacaacaataacaacaataacaacaacaacaacaacaacaacaacggcggtggaagcggggtgatgatgaatgcctccacagccgcagtaaattctatagggatggttcctaccgttggtacgcctgtgaacatcaatgtgaacgccagtaaccctttattacacccgcacttggatgacccttctttattaaacaatccgatctggaagcttcaattgcatttggctgcagtgtccgcacaatctttagggcaacccaacatttatgctagacaaaacgctatgaagaagtatttggctacacaacaggctcagcaagctcagcaacaagcgcagcaacaggcacagcagcaggtcccgggcccatttggccccggacctcaggctgcaccaccagctttgcagcccaccgatttccagcaatctcacattgcagaagcctccaaatctttagtagactgcacaaagcaagccttgatggaaatggccgacactctcaccgacagcaagacagcaaagaaacaacaacctacgggagatagcactccctctggcacggcaactaacagtgcagtttctacaccattgactcccaagatagagttatttgctaatggcaaggacgaagccaaccaggcgctcttacaacacaagaaattatctcagtacagcatcgacgaagatgacgacattgaaaacagaatggtcatgcccaaggactctaaatacgacgaccaattatggcacgcgttggatttgtccaacttgcaaatcttcaatatcagcgccaacatcttcaagtacgattttttaacgagattatatttgaatggcaatagcctcacggaattaccagcggagatcaagaacttgagcaaccttcgcgttttggacctttctcataataggttaacatctttaccagcggaattaggctcttgtttccaattgaaatacttctacttttttgataacatggtcaccacattaccatgggagtttgggaacttgtgtaaccttcagtttcttggtgtagaaggaaaccccttagaaaaacagtttttaaagatccttacagaaaaatctgtcacgggattgattttctacttgagggacaacagaccagagattcccttaccgcatgaacgtaggttcatcgaaatcaataccgatggggaaccacagagggagtacgattctttgcagcaatccactgagcatttggccaccgatttagccaagaggacgttcaccgtcttatcctacaacaccttatgtcaacactatgccaccccaaaaatgtaccgttacacaccgagctgggcgttaagttgggattacaggcgcaataaattaaaggagcagattctctcttacgacagtgatttattgtgtttacaagaagtggagtctaagacttttgaagagtattgggtgcccttattggacaagcacggttatacaggcatcttccatgcaaaggcaagagccaagaccatgcattccaaggactccaagaaagtggacgggtgttgcatttttttcaaaagggaccaattcaagttgatcaccaaagacgccatggatttcagcggtgcttggatgaaacacaagaagttccaaagaactgaagattatttaaaccgtgcaatgaacaaagacaacgttgcattattcttaaagttacaacacattcctagtggcgacaccatatgggcggtcaccacgcatttgcactgggatccaaaatttaatgatgtcaagacattccaagtaggtgtccttttagatcatttggaaacgttattgaaggaggagacaagtcacaattttagacaggacattaagaaatttcctgtgctcatttgtggtgacttcaattcttacatcaactccgccgtatacgaattgataaatacaggccgtgtccaaatacatcaagagggaaatggtagagatttcggttacatgtctgagaaaaatttctctcataacttggctctcaaatctagttataattgtatcggagaattaccattcaccaatttcacaccgtccttcacagatgttatcgactatatatggttttctacacatgctttgagggtgcgtgggttattgggtgaagtggaccctgaatacgtgagtaagtttatcgggttccccaacgacaaattccccagtgaccatataccattgttagcaagatttgaatttatgaagacaaacacaggcagtaagaaagtatga

SEQ ID NO: 101 - DNA, 1002 bp, Saccharomyces cerevisiae
atgagttgtgtgtatgcgtttgggtctaatgggcaaaggcaactgggactggggcacgatgaggatatggataccccacagaggtctgtgccaggagatgatggagcaatagtcaggaagatagcgtgcggtgggaaccacagcgtgatgctgacaaatgacgggaatctggtaggatgtggagataacagacggggagaactggatagtgcgcaagcactgcggcaggtgcatgactggaggcccgtggaagtaccggcacccgtggtggatgtggcgtgcggctgggacacgacagttattgtggatgctgatggccgtgtatggcagagaggaggcggttgctacgagttcactcagcaacatgtgccattgaattccaacgatgagcgcatcgcagtatacggatgtttccagaactttgtggtggtgcaaggcacccgagtatacggctggggcagcaacacaaagtgtcaattgcaagagcccaaatcccgatcactgaaagagcccgtattggtgtacgataccgggtctgtggccgtagactacgtggccatgggcaaggacttcatggtcatagtggacgagggcggccgcatagtgcacgcatccggtcgcctgcccactgggttcgagctcaaacaacagcaaaaaagacacaatctagtggtactgtgcatgtggacctcgatccacctgtggaatgcgcgcctcaatacggtagagtcgtttggtaggggcacacattcccaactcttcccgcaagagcgcctagacttccctattgtcggtgttgcaaccgggagtgagcacggtattctaactactgctaatcaagaaggcaagtctcactgttacaatgtatactgctggggctggggagagcatggcaactgcggcccgcaaaagggctcccagcctggactgcagctcgtgggccaatactctggaaaacctcgcgtgtttggcggatgtgccaccacgtggatcgtgctctag

SEQ ID NO: 102 - DNA, 1002 bp, Artificial Sequence
  Description of Artificial Sequence: Synthetic polynucleotide
atgagttgtgtgtatgcgtttgggtctaatgggcaaaggcaattaggattagggcacgatgaggatatggataccccacagaggtctgtgccaggagatgatggagcaatagtcaggaagatagcgtgcggtgggaaccacagcgtgatgttaacaaatgacgggaatttggtaggatgtggagataacagaagaggagaattagatagtgcgcaagcactccgccaggtgcatgactggaggcccgtggaagtaccggcacccgtggtggatgtggcgtgcggctgggacacgacagttattgtggatgctgatggccgtgtatggcagagaggaggcggttgctacgagttcactcagcaacatgtgccattgaattccaacgatgagcgcatcgcagtatacggatgtttccagaactttgtggtggtgcaaggcaccagagtatacggctggggcagcaacacaaagtgtcaattgcaagagcccaaatccagatctttgaaagagcccgtattggtgtacgataccgggtctgtggccgtagactacgtggccatgggcaaggacttcatggtcatagtggacgagggcggccgcatagtgcacgcatccggtcgcttgcccactgggttcgagctcaaacaacagcaaaaaagacacaatttggtggtattgtgcatgtggacctctatccacctttggaatgcgcgcctcaatacggtagagtcttttggtaggggcacacattcccaactcttcccgcaagagcgcttggacttccctattgtcggtgttgcaaccgggagtgagcacggtattttgactactgctaatcaagaaggcaagtctcactgttacaatgtatactgctggggctggggagagcatggcaactgcggcccgcaaaagggctcccagcctggattacagctcgtgggccaatactctggaaaacctcgcgtgtttggcggatgtgccaccacgtggatcgtgctctga

SEQ ID NO: 103 - DNA, 3396 bp, Saccharomyces cerevisiae
atgagtggttcgcattcaaatgatgaggatgacgtagtgcaagtgcccgagacgtcctctcccaccaaggtagcatcgtcgtctcccttaaagcctacttcgccaacagttccggatgcaagtgtggcgtctttgagaagcaggtttactttcaagccttcagatcccagcgaaggagctcatacttcgaagccgctcccatctgggagtcctgaggtagcactggttaaccttgcgagagagttccccgatttctctcaaactctggtgcaggctgttttcaaatctaactcttttaacttacagtctgccagggaacgtcttacaagattgaggcagcaaagacaaaattggacatggaacaagaacgcatctcccaagaagtcagaaaccccgccacctgtcaagaagtcattaccactggcaaacacaggccgtttatcatctatccatggcaatatcaacaacaaatcctccaagattaccgtggccaaacagaaaacgtccatttttgaccgttactcaaacgtcatcaaccagaaacaatacacttttgagctgccaactaacttgaatatagactcggaggcactgagcaagttgcccgtgaactacaacaaaaagagaaggctggtaagggcagatcagcatccaattggcaagtcttatgagtcatccgctacacaattaggttctgcaagagagaaactactggcgaaccgcaaatacggtcgtcatgcaaacgacaacgatgaagaggaggaagagagtatgatgacggacgatgacgatgcaagtggcgacgactacacagaatccacgccgcagataaatctggatgaacaagttttacagtttattaatgactctgatattgtcgatctctcggacctctcagataccacgatgcataaggctcaactcatagcctcacataggccatattcttctttaaatgcctttgtaaacacaaatttcaatgataaggacactgaggagaacgcatcgaacaagagaaaaagacgtgcggctgcatccgccaatgagagtgagaggctgctcgataaaatcacccaaagtataagaggttacaatgcaattgagtctgtgatcaagaaatgttcttcctacggtgatttggtcacttcgcaaatgaagaaatggggtgtgcaagtggaaggcgataactctgagttggacctgatgaaccttggggaagacgatgacgacgacaatgatgatggcaataacgataataataatagcaacaataacaataccgctggcgcagacgccactagcaaggaaaaagaagatacaaaggccgtagtggaaggttttgatgaaactagcgcagaacctactccagcaccagcaccagcaccagtggaaagagaaacaaaacgaattagaaacacaactaagccaaaagtggtcgaagatgaagatgacgatgtagatttggaggcaatcgatgacgaattgccgcagtctgagcatgaagatgatgactatgaagaggaggacgaagactataacgatgaggaagaagatgtggaatatgatgatggtgacgatgatgacgatgatgacgatgaatttgtcgctaccagaaaaaacacacacgtgatctccaccacgagcagaaatggccgtaaacctattgtcaagttcttcaagggcaaacccagactgttaagcccggaaatttcactaaaagactaccaacaaacgggtataaactggttgaatctgctataccaaaacaagatgtcatgtatccttgcagacgacatgggtctaggtaaaacatgtcaagtcatttcatttttcgcatatttgaaacaaataaacgaaccgggtcctcacttggttgttgtgccatcatcgacgctagaaaattggttaagggagttccagaaattcgcacctgctttgaagattgaaccctactatggctctttacaagaaagggaagaattgcgtgatatcctggaaaggaacgctgggaaatatgatgttatcgtgaccacgtataacttggctgcaggtaataaatacgacgtttcgtttttgaaaaatagaaacttcaatgttgtggtttatgatgaaggtcatatgttgaaaaattccacttcagagagatttgccaaactgatgaaaattcgtgccaatttccgccttttattaactggtacgccattacaaaataacttgaaggaactaatgtcgctgttggaatttatcatgccaaatcttttcatttccaaaaaggaatcatttgacgcaatcttcaaacaacgtgccaagaccacagacgataacaaaaatcacaacccgctattagcgcaagaagccattacaagagctaaaacgatgatgaagccatttattttgagaagacgtaaggatcaagtgttgaaacatttgccaccaaagcacacgcatattcagtattgtgaattgaacgcaatacaaaaaaaaatatatgataaggaaatacaaatcgtgttagaacataagagaatgattaaagatggcgaattgccaaaagatgcaaaagaaaagtctaaattacaatcttcaagttccaaaaatttaataatggcattgcgaaaggcctctctgcatccacttttgttcagaaatatctataatgataaaatcatcactaaaatgagtgatgccatattggatgaacctgcttatgctgaaaacggtaacaaagagtatattaaggaagatatgagctatatgacggattttgagttgcacaaactatgctgcaatttcccgaacacgttatccaaataccaacttcataatgacgagtggatgcaatctgggaagatagacgctttgaaaaaattgctgaaaacaatcattgttgacaaacaggaaaaggtgctgatattttccttattcactcaagtcctggatattctagagatggttttgtccaccttagattataaatttttaagattagatggttccacgcaagtgaatgatagacaactactaatagataagttttatgaagataaggatattcccattttcatcttatcaacaaaggcaggtggattcggtattaatttggtgtgcgcaaataatgttattatattcgatcaaagttttaacccacatgatgacagacaagctgctgatagggcacatcgtgtgggacaaacaaaggaagttaatataaccactttaattactaaggattccatagaggaaaagattcatcaactggccaaaaataaactagctttagattcgtatatcagtgaagataaaaaatctcaagatgtgttggaaagtaaagttagtgatatgttggaggatataatttatgatgaaaactcgaaaccgaagggaaccaaagaataa

SEQ ID NO: 104 - DNA, 3396 bp, Artificial Sequence
  Description of Artificial Sequence: Synthetic polynucleotide
atgagtggttctcattctaatgatgaggatgacgtagtgcaagtgcccgagacgtcctctcccaccaaggtagcatcttcttctcccttaaagcctacttctccaacagttccggatgcaagtgtggcgtctttgagaagcaggtttactttcaagccttctgatcccagcgaaggagctcatacttctaagccgctcccatctgggagtcctgaggtagcattggttaaccttgcgagagagttccccgatttctctcaaactttggtgcaggctgttttcaaatctaactcttttaacttacagtctgccagggaacgtcttacaagattgaggcagcaaagacaaaattggacatggaacaagaacgcatctcccaagaagtctgaaaccccgccacctgtcaagaagtctttaccattggcaaacacaggccgtttatcttctatccatggcaatatcaacaacaaatcctccaagattaccgtggccaaacagaaaacgtccatttttgaccgttactctaacgtcatcaaccagaaacaatacacttttgagttaccaactaacttgaatatagactctgaggcattaagcaagttgcccgtgaactacaacaaaaagagaaggttagtaagggcagatcagcatccaattggcaagtcttatgagtcttccgctacacaattaggttctgcaagagagaaattattggcgaaccgcaaatacggtcgtcatgcaaacgacaacgatgaagaggaggaagagagtatgatgacggacgatgacgatgcaagtggcgacgactacacagaatccacgccgcagataaatttggatgaacaagttttacagtttattaatgactctgatattgtcgatctctctgacctctctgataccacgatgcataaggctcaactcatagcctctcataggccatattcttctttaaatgcctttgtaaacacaaatttcaatgataaggacactgaggagaacgcatctaacaagagaaaaagacgtgcggctgcatccgccaatgagagtgagaggttactcgataaaatcacccaaagtataagaggttacaatgcaattgagtctgtgatcaagaaatgttcttcctacggtgatttggtcacttctcaaatgaagaaatggggtgtgcaagtggaaggcgataactctgagttggacttgatgaaccttggggaagacgatgacgacgacaatgatgatggcaataacgataataataatagcaacaataacaataccgctggcgcagacgccactagcaaggaaaaagaagatacaaaggccgtagtggaaggttttgatgaaactagcgcagaacctactccagcaccagcaccagcaccagtggaaagagaaacaaaaagaattagaaacacaactaagccaaaagtggtcgaagatgaagatgacgatgtagatttggaggcaatcgatgacgaattgccgcagtctgagcatgaagatgatgactatgaagaggaggacgaagactataacgatgaggaagaagatgtggaatatgatgatggtgacgatgatgacgatgatgacgatgaatttgtcgctaccagaaaaaacacacacgtgatctccaccacgagcagaaatggccgtaaacctattgtcaagttcttcaagggcaaacccagattattaagcccggaaatttctttgaaagactaccaacaaacgggtataaactggttgaatttattgtaccaaaacaagatgtcctgtatccttgcagacgacatgggtttaggtaaaacatgtcaagtcatttcctttttcgcatatttgaaacaaataaacgaaccgggtcctcacttggttgttgtgccatcttctacgttagaaaattggttaagggagttccagaaattcgcacctgctttgaagattgaaccctactatggctctttacaagaaagggaagaattgcgtgatatcttggaaaggaacgctgggaaatatgatgttatcgtgaccacgtataacttggctgcaggtaataaatacgacgtttcttttttgaaaaatagaaacttcaatgttgtggtttatgatgaaggtcatatgttgaaaaattccacttccgagagatttgccaaattaatgaaaattcgtgccaatttccgccttttattaactggtacgccattacaaaataacttgaaggaattgatgtctttgttggaatttatcatgccaaatcttttcatttccaaaaaggaaagttttgacgcaatcttcaaacaacgtgccaagaccacagacgataacaaaaatcacaacccgttgttagcgcaagaagccattacaagagctaaaacgatgatgaagccatttattttgagaagacgtaaggatcaagtgttgaaacatttgccaccaaagcacacgcatattcagtattgtgaattgaacgcaatacaaaaaaaaatatatgataaggaaatacaaatcgtgttagaacataagagaatgattaaagatggcgaattgccaaaagatgcaaaagaaaagtctaaattacaatcttccagttccaaaaatttaataatggcattgagaaaggcctctttgcatccacttttgttcagaaatatctataatgataaaatcatcactaaaatgagtgatgccatattggatgaacctgcttatgctgaaaacggtaacaaagagtatattaaggaagatatgagctatatgacggattttgagttgcacaaattatgctgcaatttcccgaacacgttatccaaataccaacttcataatgacgagtggatgcaatctgggaagatagacgctttgaaaaaattgttgaaaacaatcattgttgacaaacaggaaaaggtgttgatattttccttattcactcaagtcttggatattttagagatggttttgtccaccttagattataaatttttaagattagatggttccacgcaagtgaatgatagacaattattgatagataagttttatgaagataaggatattcccattttcatcttatctacaaaggcaggtggattcggtattaatttggtgtgcgcaaataatgttattatattcgatcaaagttttaacccacatgatgacagacaagctgctgatagggcacatcgtgtgggacaaacaaaggaagttaatataaccactttaattactaaggattccatagaggaaaagattcatcaattggccaaaaataaattggctttagattcttatatcagtgaagataaaaaatctcaagatgtgttggaaagtaaagttagtgatatgttggaggatataatttatgatgaaaactccaaaccgaagggaaccaaagaatga

SEQ ID NO: 105 - DNA, 978 bp, Saccharomyces cerevisiae
atgagttttacaggttcattagcgctggcaggtattggtggtttggtgtacaagtttggcggaggccaatcgtatgaaaaactgccatatgtcaacatccccttcaatcagtacttggataaagtttacaagaagcacttcagcaaagttatgagccgtaccagatacgtgctaatgaactttttcaaagatgcattcacaggaggtgcattcatgtacccgttcaaagggtttttagagttcaacaccaataagagcagttactcaacgactatgttaggtatattatcgagttacttgataatgtttgccctggtaagctttgtgtattgggctacaattacgccaatgtacacagcttttttgattgtgctgggccctattgggcttttcattgccatttttcattcctttttgcaagcaaatgttttcactttattgtttatgagactcagtcattttaataatcatttagtggaggtgtgcttagagaagaatggtttagaggagaatttgagtgaagtcaaaccaatcaagtactatgcacctattaactcgatatatttctgggcttactatttcccattcaagttggtcaagtacatgttaggcctgtcggttctttttgtgctgttggttatatcttttttcccacttattggaccaatcctttttcatattttaatttctcctttcatcactcaaatttacttcacgaaagttttacgtttacaaaatttcgacaacatacaaagacgtgaaaatatttatctccacgctggccaatatgcctcatttggtttcttggccggtttgattgagtccgtgcccattttagcgggctttgccatttctacaaatactattggtagcgttttatttaaccttgatcatccaatggtccctgaaaatttagtagaaactcaagctgaaattgaagcagcaccacaagatatcaatcaacaaccgaatcaataa

SEQ ID NO: 106 - DNA, 978 bp, Artificial Sequence
  Description of Artificial Sequence: Synthetic polynucleotide
atgagttttacaggttctttagcgttggcaggtattggtggtttggtgtacaagtttggcggaggccaaagttatgaaaaattaccatatgtcaacatccccttcaatcagtacttggataaagtttacaagaagcacttcagcaaagttatgagccgtaccagatacgtgttgatgaactttttcaaagatgcattcacaggaggtgcattcatgtacccgttcaaagggtttttagagttcaacaccaataagagcagttactctacgactatgttaggtatattatccagttacttgataatgtttgccttggtaagctttgtgtattgggctacaattacgccaatgtacacagcttttttgattgtgttaggccctattgggcttttcattgccatttttcattcctttttgcaagcaaatgttttcactttattgtttatgagactcagtcattttaataatcatttagtggaggtgtgcttagagaagaatggtttagaggagaatttgagtgaagtcaaaccaatcaagtactatgcacctattaacagcatatatttctgggcttactatttcccattcaagttggtcaagtacatgttaggcctttctgttctttttgtgttattggttatatcttttttcccacttattggaccaatcctttttcatattttaatttctcctttcatcactcaaatttacttcacgaaagttttacgtttacaaaatttcgacaacatacaaagacgtgaaaatatttatctccacgctggccaatatgcctcttttggtttcttggccggtttgattgagtccgtgcccattttagcgggctttgccatttctacaaatactattggtagcgttttatttaaccttgatcatccaatggtccctgaaaatttagtagaaactcaagctgaaattgaagcagcaccacaagatatcaatcaacaaccgaatcaatga

SEQ ID NO: 107 - DNA, 4071 bp, Saccharomyces cerevisiae
atgccctacatcggtgcttccaacctctcagaacattcatttgttaatttgaaggaaaaacatgcgattacacataaaggtacgagcagttctgtagcatctttgcagacaccaccgagccccgatcaagagaaccatattgacaatgaattagaaaattacgatacgtctttaagtgacgtttcaaccccgaataaaaaggaaggtgatgagttcgagcaaagtttaagagatacatttgcgagctttcggaagactaaacccccacctcctttagattttgaacaaccaagacttccttcgacagcttcttcatccgttgattcaaccgtatcatcgcccttaacggatgaagacataaaggagttagagtttcttccgaatgaatcaactcattcttattcgtacaatccactttcgccaaattccctggcagtcagattgaggattttgaagagatcattggaaatcataatacaaaacccaagtatgctactggagcctactccagatgatttgcctcctttgaaagagtttgcgggccgtaggagcagtttaccaaggacatcggcttctgcaaaccatttaatgaacagaaataagagccagatttggaacactacttccgctactttaaatgcatttgtaaataatacctcttcctcctcagcagcatcttctgctttatctaacaaaaaaccgggcaccccagttttccctaatttggatccaacacattctcaaacattccatagagccaactcgttggcttatttaccttccatcttacctgagcaagatccgctgctcaaacataataattctttatttcgtggcgactatggaaacaacataagtcctgaaaggccaagttttagacaacccttcaaggatcaaactagcaatctccgcaatagcagtttactcaatgagagggcatatcaggaagatgaaacttttttaccgcaccatggaccctctatggatctattgaatgaacaaagagcgaacttgaaaagtcttctgaatttattaaacgaaacactggagaaaaatacttccgagagagcttcggatcttcatatgatatcgttgttcaatttgaataaactaatgcttggagatcccaagaaaaataattcagaacgcgataaaagaactgaaaagcttaaaaagattttgctggatagtcttgcagaaccattctttgagcactataattttattggagataatccgatcgcagatacagatgaactaaaggaggaaattgatgaatttacaggttctggagatacgacagcgataacagatatacggccccaacaggactatggccgcatattgaggacattcacttctaccaaaaattccgccccacaggcaatttttacatgtagtcaggaagacccttggcaattcagagctgcgaatgatctagcgtgcttagtattcggtatctcacagaatgccattcgcgctttaaccttgatggatttaattcacaccgatagcagaaattttgttttacacaaattactttctacggagggtcaagaaatggttttcacaggcgaaatcattggtatagttcaaccagaaacactcagctcatccaaagtagtatgggcatcgttttgggcaaaaaggaaaaacggcttattagtttgtgttttcgaaaaggttccttgcgattatgttgatgtacttttgaacctggatgattttggggccgagaatattgtagacaaatgtgagttattatcagatggacccacattgtcttcctcttctacattatcgctacctaagatggcttcttcaccaactggtagtaaattagagtattcgttggagaggaaaatcctggaaaagagttatactaagcctacttcaacagagaatcgcaacggcgatgaaaaccaacttgatggagatagtcattctgaaccatcgctgtcatcatcgccagtaaggtcgaagaaaagtgtaaagttcgcaaatgatattaaagacgtcaagagtataagccaatcgttagccaaattaatggatgatgtgaggaatggggttgtatttgatcccgatgacgaccttttgcctatgcccatcaaagtttgcaaccacattaatgaaacaagatattttactctaaatcatctatcttataatatcccatgcgcggtttcctccactgtgttggaggatgagctgaaattaaagattcacagtttaccttaccaggcgggtttgtttattgtggattcgcatactttagatattgtaagttccaataaatctattttaaaaaacatgtttggttatcattttgctgagctggtgggaaaatccattactgaaataattccttctttcccaaaattcctccaatttataaatgacaaatatcctgcgttggatatcacactccataaaaataaaggtttggtattaacagaacatttttttaggaaaattcaggcagagattatgggtgatcgtaaaagcttttatacgtcggtgggtattgatggccttcatagggatggctgtgaaatcaaaattgatttccagctgcgtgtcatgaattctaaagtgattttgctttgggttacacattcgagagacgtggtatttgaagaatataatacaaatccatctcaattgaagatgctgaaggagagtgaattaagtttaatgagcagtgcaagtagttctgccagctcttccaaaaaatcttcgtctaggatatccaccgggacattaaaggacatgagtaatctgtcaacatatgaggatttggcccaccgaacgaataagcttaagtatgaaatcggagatgattctagagcacattctcaatctactttgtccgagcaggaacaagttcccctggaaaacgataaggacagtggcgagatgatgcttgcagaccccgaaatgaagcacaagttagaattggccagaatttactcaagagataaatctcaatttgtgaaagaaggaaattttaaagttgacgaaaatttgattattagcaaaatttcactttccccaagcactgaatccttagcagattctaaaagttctgggaaagggctttctccacttgaagaggaaaagctaattgacgaaaacgctacagaaaacggattagcgggatcacctaaagacgaagacggaatcataatgactaacaagcgaggaaaccaacctgttagtactttcctacgcacccccgaaaagaacatcggtgctcaaaagcatgttaagaagttttcggacttcgtaagtctgcaaaaaatgggtgaaggtgcatatggtaaggtcaacctatgtattcataagaagaataggtatattgtggtgattaagatgatttttaaagaaagaatccttgtagatacatgggttagagataggaaattaggcactataccttctgagatccaaattatggccacgttgaacaaaaaaccacatgagaatattttacggttactggatttttttgaagacgacgattactattatatcgaaactcccgtacatggtgaaacaggatgtatagatcttttcgatctaattgaatttaaaaccaacatgaccgaatttgaagcaaaattgatattcaagcaggttgtagcgggaataaaacatctacacgaccagggtattgttcacagagatatcaaggatgagaatgttatcgtagattctaaaggctttgttaagattattgattttggatctgctgcgtatgtcaaaagcggaccatttgatgtttttgttgggacaatagattatgctgcccctgaagtcttaggaggaaacccttatgagggccaaccacaggatatttgggctattggtattctattgtatacggtggtcttcaaagaaaaccccttctacaatatagatgaaatattagaaggcgacctgaaattcaataatgcagaggaagttagtgaagattgcattgagttaatcaagagtattttgaaccgttgcgtaccgaagagacccaccattgacgacataaataacgacaaatggttggttatttga

SEQ ID NO: 108 - DNA, 4071 bp, Artificial Sequence
  Description of Artificial Sequence: Synthetic polynucleotide
atgccctacatcggtgcttccaacctctctgaacattcttttgttaatttgaaggaaaaacatgcgattacacataaaggtacgagcagttctgtagcatctttgcagacaccaccgagccccgatcaagagaaccatattgacaatgaattagaaaattacgatacgtctttaagtgacgtttctaccccgaataaaaaggaaggtgatgagttcgagcaaagtttaagagatacatttgcgagctttagaaagactaaacccccacctcctttagattttgaacaaccaagacttccttctacagcttcttcttccgttgattctaccgtatcttctcccttaacggatgaagacataaaggagttagagtttcttccgaatgaatctactcattcttattcttacaatccactttctccaaattccttggcagtcagattgaggattttgaagagaagtttggaaatcataatacaaaacccaagtatgttattggagcctactccagatgatttgcctcctttgaaagagtttgcgggccgtaggagcagtttaccaaggacatctgcttctgcaaaccatttaatgaacagaaataagagccagatttggaacactacttccgctactttaaatgcatttgtaaataatacctcttcctcctctgcagcatcttctgctttatctaacaaaaaaccgggcaccccagttttccctaatttggatccaacacattctcaaacattccatagagccaactctttggcttatttaccttccatcttacctgagcaagatccgttgctcaaacataataattctttatttcgtggcgactatggaaacaacataagtcctgaaaggccaagttttagacaacccttcaaggatcaaactagcaatctccgcaatagcagtttactcaatgagagggcatatcaggaagatgaaacttttttaccgcaccatggaccctctatggatttattgaatgaacaaagagcgaacttgaaaagtcttttgaatttattaaacgaaacattagagaaaaatacttccgagagagcttctgatcttcatatgatatctttgttcaatttgaataaattaatgcttggagatcccaagaaaaataattctgaacgcgataaaagaactgaaaagcttaaaaagattttgttggatagtcttgcagaaccattctttgagcactataattttattggagataatccgatcgcagatacagatgaattgaaggaggaaattgatgaatttacaggttctggagatacgacagcgataacagatataaggccccaacaggactatggccgcatattgaggacattcacttctaccaaaaattccgccccacaggcaatttttacatgtagtcaggaagacccttggcaattcagagctgcgaatgatttggcgtgcttagtattcggtatctctcagaatgccattcgcgctttaaccttgatggatttaattcacaccgatagcagaaattttgttttacacaaattactttctacggagggtcaagaaatggttttcacaggcgaaatcattggtatagttcaaccagaaacactcagctcttccaaagtagtatgggcaagtttttgggcaaaaaggaaaaacggcttattagtttgtgttttcgaaaaggttccttgcgattatgttgatgtacttttgaaccttgatgattttggggccgagaatattgtagacaaatgtgagttattaagtgatggacccacattgtcttcctcttctacattaagtttacctaagatggcttcttctccaactggtagtaaattagagtattctttggagaggaaaatcttggaaaagagttatactaagcctacttctacagagaatcgcaacggcgatgaaaaccaacttgatggagatagtcattctgaaccatctttatcttcttctccagtaaggtctaagaaaagtgtaaagttcgcaaatgatattaaagacgtcaagagtataagccaatctttagccaaattaatggatgatgtgaggaatggggttgtatttgatcccgatgacgaccttttgcctatgcccatcaaagtttgcaaccacattaatgaaacaagatattttactttgaatcatttatcttataatatcccatgcgcggtttcctccactgtgttggaggatgagttgaaattaaagattcacagtttaccttaccaggcgggtttgtttattgtggattctcatactttagatattgtaagttccaataaatctattttaaaaaacatgtttggttatcattttgctgagttggtgggaaaatccattactgaaataattccttctttcccaaaattcctccaatttataaatgacaaatatcctgcgttggatatcacactccataaaaataaaggtttggtattaacagaacatttttttaggaaaattcaggcagagattatgggtgatcgtaaaagcttttatacgtctgtgggtattgatggccttcatagggatggctgtgaaatcaaaattgatttccagttgcgtgtcatgaattctaaagtgattttgctttgggttacacattccagagacgtggtatttgaagaatataatacaaatccatctcaattgaagatgttgaaggagagtgaattaagtttaatgagcagtgcaagtagttctgccagctcttccaaaaaatcttcttctaggatatccaccgggacattaaaggacatgagtaatttatctacatatgaggatttggcccacagaacgaataagcttaagtatgaaatcggagatgattctagagcacattctcaatctactttgtccgagcaggaacaagttcccttagaaaacgataaggacagtggcgagatgatgcttgcagaccccgaaatgaagcacaagttagaattggccagaatttactctagagataaatctcaatttgtgaaagaaggaaattttaaagttgacgaaaatttgattattagcaaaatttctctttccccaagcactgaatccttagcagattctaaaagttctgggaaagggctttctccacttgaagaggaaaagttgattgacgaaaacgctacagaaaacggattagcgggatctcctaaagacgaagacggaatcataatgactaacaagagaggaaaccaacctgttagtactttcttgcgcacccccgaaaagaacatcggtgctcaaaagcatgttaagaagttttctgacttcgtaagtttacaaaaaatgggtgaaggtgcatatggtaaggtcaacttgtgtattcataagaagaataggtatattgtggtgattaagatgatttttaaagaaagaatccttgtagatacatgggttagagataggaaattaggcactataccttctgagatccaaattatggccacgttgaacaaaaaaccacatgagaatattttaagattattagatttttttgaagacgacgattactattatatcgaaactcccgtacatggtgaaacaggatgtatagatcttttcgatttgattgaatttaaaaccaacatgaccgaatttgaagcaaaattgatattcaagcaggttgtagcgggaataaaacatttgcacgaccagggtattgttcacagagatatcaaggatgagaatgttatcgtagattctaaaggctttgttaagattattgattttggatctgctgcgtatgtcaaaagcggaccatttgatgtttttgttgggacaatagattatgctgcccctgaagtcttaggaggaaacccttatgagggccaaccacaggatatttgggctattggtattttattgtatacggtggtcttcaaagaaaaccccttctacaatatagatgaaatattagaaggcgacttgaaattcaataatgcagaggaagttagtgaagattgcattgagttaatcaagagtattttgaaccgttgcgtaccgaagagacccaccattgacgacataaataacgacaaatggttggttatttga

SEQ ID NO: 109 - DNA, 1908 bp, Saccharomyces cerevisiae
atgtctggagcaagatcaacaacggcaggtgccgtgccctcggcagcaacaacatcaacaacatcaacaacgtcaaactctaaggactcagactctaacgagtcattatatcccttggctctgcttatggatgagttaaaacatgatgatattgctaatagggtagaagccatgaaaaaactagataccatcgcgttggcactcggtcccgaaagaacaagaaacgagttgattccctttttaacggaagttgcacaagatgatgaagatgaggtgtttgccgttttagccgaacagttaggaaaatttgtcccctacattggcggtcctcaatacgccacaatcctattaccagttttggaaattttggcatctgcagaagaaactttggttagagaaaaggccgtagattctctgaataacgtggcccaagaactttctcaagaacaattatttagtgacttcgtccctttaattgaacatttagctactgcagattggttttcttcaaaagtttctgcttgtggtcttttcaagtctgttattgttagaatcaaagatgattcattgagaaagaatatcctggctttatacttacaactcgctcaagatgatactccaatggtgaaaagggccgtcggtaaaaacctgcccatcttgatcgatctgttgactcaaaatttgggattatctacagacgaagattgggattacatttctaacattttccagaaaatcattaacgataatcaagattctgtcaagtttctggcagttgattgtttaatttccatcttgaaattttttaacgctaaaggtgatgagtctcacactcaagatttattgaactctgctgtcaaattaattggtgacgaagcgtggagggtacgttacatggctgccgatagattttcagatttagcctcgcaattcagttccaaccaagcatatatcgatgaattagtacaaccatttttgaacctttgtgaggacaacgagggagatgttagggaagctgtggctaaacaagtttctgggtttgccaagttcctaaatgatccttcaattatattgaataagatcttacctgctgtgcagaatttgagtatggacgaaagtgaaacagtgagatctgctttggcttctaagattacaaatattgtattactgttgaataaagatcaagtcattaacaattttcttccgattttactgaatatgctaagagatgagttccctgacgttcgtttaaatatcattgccagcttgaaggttgtcaatgacgtaataggaattgagctgctatcagactctttgttacctgccataacagaattagccaaggacgtgaattggagagttagaatggctataattgagtacatacctatcttggcagaacaattaggtatgcaattttttgaccaacagttaagcgatttatgtctttcatggttgtgggatactgtttattctatcagagaagccgcagtgaataatttaaaaaggttaacggaaatatttggctctgattggtgtcgtgatgaaattatttcaagactgctcaaatttgatctacaattactggaaaattttgtctcgaggttcacaatactctctgctctaaccactttggtgcccgtggtatcgttagatgtcgttactgagcaactattaccattcatttctcacttggctgatgacggtgttccaaatattaggtttaatgtggccaaatcctacgctgtgatagtgaaggttttaattaaggacgaggccaaatatgatgcattaattaagaacacaattttaccctcattgcaaacgctgtgtcaagacgaagatgttgatgtaaaatacttcgctaagaaaagtttggcagaatgtcaagaacttttaaaaaattga

SEQ ID NO: 110 - DNA, 1908 bp, Artificial Sequence
  Description of Artificial Sequence: Synthetic polynucleotide
atgtctggagcaagatctacaacggcaggtgccgtgccctctgcagcaacaacatctacaacatctacaacgtccaactctaaggacagtgactctaacgagtctttatatcccttggctttacttatggatgagttaaaacatgatgatattgctaatagggtagaagccatgaaaaaattggataccatcgcgttggcactcggtcccgaaagaacaagaaacgagttgattccctttttaacggaagttgcacaagatgatgaagatgaggtgtttgccgttttagccgaacagttaggaaaatttgtcccctacattggcggtcctcaatacgccacaatcttattaccagttttggaaattttggcatctgcagaagaaactttggttagagaaaaggccgtagattctttgaataacgtggcccaagaactttctcaagaacaattatttagtgacttcgtccctttaattgaacatttagctactgcagattggttttcttctaaagtttctgcttgtggtcttttcaagtctgttattgttagaatcaaagatgattctttgagaaagaatatcttggctttatacttacaactcgctcaagatgatactccaatggtgaaaagggccgtcggtaaaaacttgcccatcttgatcgatttattgactcaaaatttgggattatctacagacgaagattgggattacatttctaacattttccagaaaatcattaacgataatcaagattctgtcaagtttttggcagttgattgtttaatttccatcttgaaattttttaacgctaaaggtgatgagtctcacactcaagatttattgaactctgctgtcaaattaattggtgacgaagcgtggagggtacgttacatggctgccgatagattttctgatttagcctctcaattcagttccaaccaagcatatatcgatgaattagtacaaccatttttgaacctttgtgaggacaacgagggagatgttagggaagctgtggctaaacaagtttctgggtttgccaagttcttgaatgatccttctattatattgaataagatcttacctgctgtgcagaatttgagtatggacgaaagtgaaacagtgagatctgctttggcttctaagattacaaatattgtattattattgaataaagatcaagtcattaacaattttcttccgattttattgaatatgttgagagatgagttccctgacgttcgtttaaatatcattgccagcttgaaggttgtcaatgacgtaataggaattgagttattaagtgactctttgttacctgccataacagaattagccaaggacgtgaattggagagttagaatggctataattgagtacatacctatcttggcagaacaattaggtatgcaattttttgaccaacagttaagcgatttatgtctttcttggttgtgggatactgtttattctatcagagaagccgcagtgaataatttaaaaaggttaacggaaatatttggctctgattggtgtcgtgatgaaattatttctagattactcaaatttgatttgcaattattggaaaattttgtctccaggttcacaatactctctgctttgaccactttggtgcccgtggtatctttagatgtcgttactgagcaattattaccattcatttctcacttggctgatgacggtgttccaaatattaggtttaatgtggccaaatcctacgctgtgatagtgaaggttttaattaaggacgaggccaaatatgatgcattaattaagaacacaattttaccctctttgcaaacgttgtgtcaagacgaagatgttgatgtaaaatacttcgctaagaaaagtttggcagaatgtcaagaacttttaaaaaattga

SEQ ID NO: 111 - DNA, 1200 bp, Saccharomyces cerevisiae
atgcaaaagatcagtaaatactcatctatggcaattctgaggaaaagaccgctggtaaagactgaaactgggccagaatcagaactcctaccggagaaaaggaccaaaatcaaacaagaagaggttgtccctcaacccgtggatatcgactgggttaaatcgctgccaaataagcagtacttcgaatggattgtggttagaaacggcaatgtgcccaacaggtgggccacaccattggacccctcgatccttgtcactccggcctcgacgaaagtcccttacaagtttcaagaaacatacgctagaatgcgagtactgagatctaagattctagcccccgtcgatataattggtggatcatccattcctgtaacggttgcctctaagtgtggtatctcgaaagagcagatatcaccgagggactacagattacaggtccttcttggggtgatgctatcatcgcaaacaaaagatgaagttaccgcaatggcaatgcttaacataatgcggtattgtatagacgaactgcacagcgaagaaggtatgacattagaggccgttttacaaatcaatgagaccaaattagacgaattgattcattcagttgggttccacacaaggaaggccaagtatattttgtcaacctgcaaaatccttcaagatcagttttcgagtgatgttccagctacgattaatgagctattgggcctgcccggtgtagggcccaaaatggcttatctaacattacaaaaggcatggggcaagattgaaggtatctgcgttgacgttcacgtggatagattgaccaagctttggaaatgggtagatgcgcagaaatgcaagactccagatcagacaagaactcaattacaaaattggctgcctaaggggctttggacagaaataaatgggttgctggttggatttggacaaataatcactaaatcgaggaaccttggtgacatgttacaattcttgccaccggatgatcccagaagctccttagattgggatttgcagtctcaattgtacaaggaaatccagcaaaatatcatgagttatccaaagtgggtgaaatacctggaaggaaaacgtgaactgaacgtggaggcggaaatcaatgttaaacacgaggagaaaacagttgaagaaactatggtcaaactggaaaatgatatttctgttaaagtagaggactaa

SEQ ID NO: 112 - DNA, 1200 bp, Artificial Sequence
  Description of Artificial Sequence: Synthetic polynucleotide
atgcaaaagatcagtaaatactcttctatggcaattttaaggaaaagaccgttagtaaagactgaaactgggccagaaagtgaactcttgccggagaaaaggaccaaaatcaaacaagaagaggttgtccctcaacccgtggatatcgactgggttaaatctttaccaaataagcagtacttcgaatggattgtggttagaaacggcaatgtgcccaacaggtgggccacaccattggacccctccatccttgtcactccggcctctacgaaagtcccttacaagtttcaagaaacatacgctagaatgagagtattaagatctaagattttagcccccgtcgatataattggtggatcttccattcctgtaacggttgcctctaagtgtggtatctccaaagagcagatatctccgagggactacagattacaggtccttcttggggtgatgctttcttctcaaacaaaagatgaagttaccgcaatggcaatgcttaacataatgagatattgtatagacgaattgcacagcgaagaaggtatgacattagaggccgttttacaaatcaatgagaccaaattagacgaattgattcattctgttgggttccacacaaggaaggccaagtatattttgtccacctgcaaaatccttcaagatcagttttctagtgatgttccagctacgattaatgagttattgggcttgcccggtgtagggcccaaaatggcttatttgacattacaaaaggcatggggcaagattgaaggtatctgcgttgacgttcacgtggatagattgaccaagctttggaaatgggtagatgcgcagaaatgcaagactccagatcagacaagaactcaattacaaaattggttacctaaggggctttggacagaaataaatgggttgttggttggatttggacaaataatcactaaatctaggaaccttggtgacatgttacaattcttgccaccggatgatcccagaagctccttagattgggatttgcagtctcaattgtacaaggaaatccagcaaaatatcatgagttatccaaagtgggtgaaatacttggaaggaaaacgtgaattgaacgtggaggcggaaatcaatgttaaacacgaggagaaaacagttgaagaaactatggtcaaattagaaaatgatatttctgttaaagtagaggactga

SEQ ID NO: 113 - DNA, 768 bp, Saccharomyces cerevisiae
atggatgtgttgaagctgggttatgaactggaccagctctctgatctggtcgaagaaagaacaaggctagtgtcggtgttgaagctcgccccgacctcaaacgataacgttactttgaaacggcaattgggctcaatattggagttattgcagaagtgtgcgcccaatgatgaactaatatcccgatacaataccatactggacaaaattcctgatacggcggttgacaaggagttgtataggttccaacagcaggtggcaagaaatactgatgaggtgtccaaagagtctttgaaaaaagtgcggttcaagaatgatgacgagcttacggtcatgtataaggatgacgatgaacaagacgaggagtcgccgctgccttcgacgcatactccatacaaggatgaaccattgcaatcgcagttacagtcacagtcacagccacagccaccacaacccatggtttccaaccaagaactatttattaaccagcaacagcagttgttagagcaagattcccacttgggcgcactgtctcagtctattgggaggactcatgacatttcgctggaccttaataatgagatcgtttctcagaacgactcgctgctggttgatttagaaaacctgattgataataatggtaggaatttgaacagggcctctcggtccatgcatggctttaacaattctaggttcaaggataacggcaactgcgtgattattcttgtgctgatagtggtgctcctgttgcttctattagtattataa

SEQ ID NO: 114 - DNA, 768 bp, Artificial Sequence
  Description of Artificial Sequence: Synthetic polynucleotide
atggatgtgttgaagttgggttatgaattagaccagctctctgatttggtcgaagaaagaacaaggttggtgtctgtgttgaagctcgccccgaccagtaacgataacgttactttgaaaagacaattgggctctatattggagttattgcagaagtgtgcgcccaatgatgaattgatatccagatacaataccatattggacaaaattcctgatacggcggttgacaaggagttgtataggttccaacagcaggtggcaagaaatactgatgaggtgtccaaagagtctttgaaaaaagtgaggttcaagaatgatgacgagcttacggtcatgtataaggatgacgatgaacaagacgaggagtctccgttgccttctacgcatactccatacaaggatgaaccattgcaatctcagttacagtctcagtctcagccacagccaccacaacccatggtttccaaccaagaattatttattaaccagcaacagcagttgttagagcaagattcccacttgggcgcattatctcagtctattgggaggactcatgacatttctttggaccttaataatgagatcgtttctcagaacgactctttattggttgatttagaaaacttgattgataataatggtaggaatttgaacagggcctctagatccatgcatggctttaacaattctaggttcaaggataacggcaactgcgtgattattcttgtgttgatagtggtgctcttattgcttttattagtattatga

SEQ ID NO: 115 - DNA, 1218 bp, Saccharomyces cerevisiae
atgagtcagcaaacaccacaggaaagtgaacagaccacagcgaaagaacaggaccttgatcaagagagcgtgttgagcaacattgacttcaatacggatttgaatcacaatttgaatttatcggaatactgtatatccagtgacgcaggaacagagaagatggatagcgacgaggagaagtcgttggccaatctgccggagttgaaatacgctcccaagctatccagcctggtgaagcaagagacgctcaccgagagcttgaaaagaccacacgaagatgagaaagaggcgatagatgaggccaagaagatgaaagtgccgggagagaacgaggacgaaagcaaggaagaggaaaagagtcaagaactggaagaggcaattgacagcaaggagaagagcaccgacgccagggacgagcaaggggacgaaggtgataatgaggaggaaaacaacgaggaggataatgaaaacgaaaacgagcatacagcaccgcctgcgctggtgatgccctcccccatcgaaatggaggaacagaggatgactgcgctgaaggaaatcaccgacatcgagtacaagttcgcgcaattgcgccaaaaactatatgacaatcaattggtgcggttgcaaacggagctgcagatgtgtctggaagggtcacacccggaattgcaggtctactactcgaagattgccgcgatccgtgactacaagctacaccgagcgtaccagcgacagaagtacgagctttcatgcatcaacacagaaacaatcgctaccaggacattcattcaccaggacttccacaagaaggtcaccgacctgcgagccaggctgctgaacagaaccacgcagacctggtacgatatcaacaaggagcgccgcgatatggatatagtcatcccagatgtcaattaccacgtccccatcaaacttgataacaagacgctgagctgtatcacgggctacgccagcgcagcacagctgtgctatcccggcgagcccgtggcagaggacctcgcttgcgaaagcatcgagtaccgctacagagccaacccggtggacaaactcgaagtcattgtggaccgaatgaggctcaataacgagattagcgacctcgaaggcctgcgcaaatatttccactccttcccgggtgctcctgagttgaacccgcttagagactccgaaatcaacgacgacttccaccagtgggcccagtga

SEQ ID NO: 116 - DNA, 1218 bp, Artificial Sequence
  Description of Artificial Sequence: Synthetic polynucleotide
atgagtcagcaaacaccacaggaaagtgaacagaccacagcgaaagaacaggaccttgatcaagagagcgtgttgagcaacattgacttcaatacggatttgaatcacaatttgaatttatctgaatactgtatatccagtgacgcaggaacagagaagatggatagcgacgaggagaagtctttggccaatttaccggagttgaaatacgctcccaagttatccagcttggtgaagcaagagacgctcaccgagagcttgaaaagaccacacgaagatgagaaagaggcgatagatgaggccaagaagatgaaagtgccgggagagaacgaggacgaaagcaaggaagaggaaaagagtcaagaattggaagaggcaattgacagcaaggagaagagcaccgacgccagggacgagcaaggggacgaaggtgataatgaggaggaaaacaacgaggaggataatgaaaacgaaaacgagcatacagcaccgcctgcgttagtgatgccctcccccatcgaaatggaggaacagaggatgactgcgttaaaggaaatcaccgacatcgagtacaagttcgcgcaattgcgccaaaaactttatgacaatcaattggtgagattgcaaacggagttacagatgtgtttagaagggtctcacccggaattgcaggtctactactccaagattgccgcgatccgtgactacaagttgcacagggcgtaccagagacagaagtacgagctttcttgcatcaacacagaaacaatcgctaccaggacattcattcaccaggacttccacaagaaggtcaccgaccttcgtgccaggttattaaacagaaccacgcagacctggtacgatatcaacaaggagcgccgcgatatggatatagtcatcccagatgtcaattaccacgtccccatcaaacttgataacaagacgttgagctgtatcacgggctacgccagcgcagcacagttatgctatcccggcgagcccgtggcagaggacctcgcttgcgaaagcatcgagtaccgctacagagccaacccggtggacaaactcgaagtcattgtggacagaatgaggctcaataacgagattagcgacctcgaaggcttgcgcaaatatttccactccttcccgggtgctcctgagttgaacccgcttagagactccgaaatcaacgacgacttccaccagtgggcccagtga

SEQ ID NO: 117 - DNA, 1185 bp, Saccharomyces cerevisiae
atgactctacaagaatctgataaatttgctaccaaggccattcatgccggtgaacatgtggacgttcacggttccgtgatcgaacccatttctttgtccaccactttcaaacaatcttctccagctaaccctatcggtacttacgaatactccagatctcaaaatcctaacagagagaacttggaaagagcagttgccgctttagagaacgctcaatacgggttggctttctcctctggttctgccaccaccgccacaatcttgcaatcgcttcctcagggctcccatgcggtctctatcggtgatgtgtacggtggtacccacagatacttcaccaaagtcgccaacgctcacggtgtggaaacctccttcactaacgatttgttgaacgatctacctcaattgataaaggaaaacaccaaattggtctggatcgaaaccccaaccaacccaactttgaaggtcaccgacatccaaaaggtggcagaccttatcaagaagcacgctgccggccaagacgtgatcttggttgtcgacaacaccttcttgtccccatatatctccaatccattgaacttcggtgcagacatcgttgtccactccgctacaaagtacatcaacggtcactcagacgttgtgctcggtgtcctggccactaataacaagccattgtacgagcgtctgcagttcttacaaaacgccattggtgctatcccatctcctttcgatgcttggttgacccacagaggtttgaagactttgcatctacgtgtcagacaagctgccctcagcgccaacaaaatcgctgaattcttggcagcagacaaggaaaacgttgtcgcagtcaactacccaggtttgaagacacaccctaactacgacgtagtgttaaagcaacaccgtgatgcccttggtggtggtatgatctccttcagaatcaagggtggtgctgaagctgcttccaagttcgcctcctccacaagactgttcacattggccgaatcccttggtggtatcgaatctctattggaagtgcccgctgtgatgacccacggtggtatcccaaaggaggccagagaggcctctggtgtttttgacgacttggttagaatctctgtcggtattgaagacactgacgatcttttggaagacatcaagcaagccttgaaacaagccaccaactaa

SEQ ID NO: 118 - DNA, 1185 bp, Artificial Sequence
  Description of Artificial Sequence: Synthetic polynucleotide
atgactttacaagaatctgataaatttgctaccaaggccattcatgccggtgaacatgtggacgttcacggttccgtgatcgaacccatttctttgtccaccactttcaaacaatcttctccagctaaccctatcggtacttacgaatactccagatctcaaaatcctaacagagagaacttggaaagagcagttgccgctttagagaacgctcaatacgggttggctttctcctctggttctgccaccaccgccacaatcttgcaatctcttcctcagggctcccatgcggtctctatcggtgatgtgtacggtggtacccacagatacttcaccaaagtcgccaacgctcacggtgtggaaacctccttcactaacgatttgttgaacgatttacctcaattgataaaggaaaacaccaaattggtctggatcgaaaccccaaccaacccaactttgaaggtcaccgacatccaaaaggtggcagaccttatcaagaagcacgctgccggccaagacgtgatcttggttgtcgacaacaccttcttgtccccatatatctccaatccattgaacttcggtgcagacatcgttgtccactccgctacaaagtacatcaacggtcactctgacgttgtgctcggtgtccttgccactaataacaagccattgtacgagcgtttgcagttcttacaaaacgccattggtgctatcccatctcctttcgatgcttggttgacccacagaggtttgaagactttgcatttacgtgtcagacaagctgccctcagcgccaacaaaatcgctgaattcttggcagcagacaaggaaaacgttgtcgcagtcaactacccaggtttgaagacacaccctaactacgacgtagtgttaaagcaacaccgtgatgcccttggtggtggtatgatctccttcagaatcaagggtggtgctgaagctgcttccaagttcgcctcctccacaagattattcacattggccgaatcccttggtggtatcgaatctttgttggaagtgcccgctgtgatgacccacggtggtatcccaaaggaggccagagaggcctctggtgtttttgacgacttggttagaatctctgtcggtattgaagacactgacgatcttttggaagacatcaagcaagccttgaaacaagccaccaactga

SEQ ID NO: 119 - DNA, 1878 bp, Saccharomyces cerevisiae
atgcctgctgtcttgagaaccaggtccaaagaatcctctatagagcagaagcctgcttccagaactagaacgagatcaagaaggggcaagcgtggtcgtgacgatgatgatgatgacgacgatgaggaaagcgatgatgcatacgatgaagtaggtaatgactatgacgagtatgcttcaagagcgaagctggccaccaataggcccttcgaaatagtcgcgggactgcctgctagtgtggagctgcccaactataactcttcgcttactcatccgcaatcaattaaaaattctggggtgctttacgactctctggtcagttccagaagaacctgggttcagggtgagatgtttgaactgtattggcgaagacctaagaaaattgttagtgaatctaccccagcagcgacggagagtccaacatctggaacgattcctttgattcgagataagatgcagaaaatgtgcgattgtgtaatgagtggaggtcctcacacgttcaaagttagacttttcatactgaagaatgacaaaatcgaacagaaatggcaagatgagcaagagttgaagaaaaaggaaaaggaactgaaacgaaagaacgatgcagaggccaaaagattgaggatggaggaaaggaaaaggcagcagatgcaaaagaaaatagccaaggaacaaaaacttcaattgcagaaggaaaataaagccaagcagaagttggaacaggaggcgctgaagctaaaaagaaaggaagaaatgaaaaaactaaaggaacaaaataaaaataaacagggttcaccttcttcctccatgcatgacccaagaatgataatgaatttgaatttgatggcacaagaagatccaaaactaaacactttaatggaaaccgtcgcaaagggtcttgccaataatagtcaactggaggaatttaaaaagttcattgaaattgccaaaaaaaggtcactagaggagaacccagttaataagcgtccatctgtcacaacaacgcgacctgcacctccctctaaagctaaagacgtagccgaagatcaccggttaaactcgataaccttggtgaaaagttccaaaaccgctgccacggaacctgaaccaaaaaaagctgatgacgagaatgcagagaagcaacagtccaaagaggcaaagacaactgccgaatcgactcaagtagatgtcaagaaagaagaagaagatgtgaaggaaaagggtgtgaaatcagaggatacacaaaagaaagaagataatcaagtggtaccgaaaaggaaaagaagaaagaacgcaataaaggaagataaagatatgcaattgaccgcgttccaacagaaatacgttcaaggtgcggagatcatcctggagtatttagaattcacccattcgaggtattacctgcctaagaaatcagtagtagaatttttggaggatacggatgagattataatatcttggattgttatacacaattctaaagaaattgagaagttcaaaaccaagaaaataaaagctaaactgaaagccgaccaaaaactaaacaaggaggatgccaagccaggctctgatgtggagaaggaagtcagctttaatcctctttttgaagccgattgccctacccctctctacaccccaatgacaatgaagttatcggggattcacaaaagatttaaccaaatcatccgaaatagcgtttctccaatggaagaagttgttaaagaaatggaaaaaattctgcaaattggtactagattgtctggctataatctgtggtaccaattggatggatacgatgatgaagctttgagcgaaagtttgcggttcgaactaaatgagtgggagcacgccatgagaagcagaagacacaaaagataa

SEQ ID NO: 120 - DNA, 1878 bp, Artificial Sequence
  Description of Artificial Sequence: Synthetic polynucleotide
atgcctgctgtcttgagaaccaggtccaaagaatcctctatagagcagaagcctgcttccagaactagaacgagatctagaaggggcaagcgtggtcgtgacgatgatgatgatgacgacgatgaggaaagcgatgatgcatacgatgaagtaggtaatgactatgacgagtatgcttccagagcgaagttggccaccaataggcccttcgaaatagtcgcgggattgcctgctagtgtggagttgcccaactataactcttctcttactcatccgcaatctattaaaaattctggggtgctttacgactctttggtcagttccagaagaacctgggttcagggtgagatgtttgaattgtattggagaagacctaagaaaattgttagtgaatctaccccagcagcgacggagagtccaacatctggaacgattcctttgattagagataagatgcagaaaatgtgcgattgtgtaatgagtggaggtcctcacacgttcaaagttagacttttcatattgaagaatgacaaaatcgaacagaaatggcaagatgagcaagagttgaagaaaaaggaaaaggaattgaaaagaaagaacgatgcagaggccaaaagattgaggatggaggaaaggaaaaggcagcagatgcaaaagaaaatagccaaggaacaaaaacttcaattgcagaaggaaaataaagccaagcagaagttggaacaggaggcgttaaagttgaaaagaaaggaagaaatgaaaaaattgaaggaacaaaataaaaataaacagggttctccttcttcctccatgcatgacccaagaatgataatgaatttgaatttgatggcacaagaagatccaaaattgaacactttaatggaaaccgtcgcaaagggtcttgccaataatagtcaattggaggaatttaaaaagttcattgaaattgccaaaaaaaggtccttggaggagaacccagttaataagcgtccatctgtcacaacaacgagacctgcacctccctctaaagctaaagacgtagccgaagatcacagattaaacagcataaccttggtgaaaagttccaaaaccgctgccacggaacctgaaccaaaaaaagctgatgacgagaatgcagagaagcaacagtccaaagaggcaaagacaactgccgaatctactcaagtagatgtcaagaaagaagaagaagatgtgaaggaaaagggtgtgaaaagtgaggatacacaaaagaaagaagataatcaagtggtaccgaaaaggaaaagaagaaagaacgcaataaaggaagataaagatatgcaattgaccgcgttccaacagaaatacgttcaaggtgcggagatcatcttggagtatttagaattcacccattccaggtattacttacctaagaaatctgtagtagaatttttggaggatacggatgagattataatatcttggattgttatacacaattctaaagaaattgagaagttcaaaaccaagaaaataaaagctaaattgaaagccgaccaaaaattgaacaaggaggatgccaagccaggctctgatgtggagaaggaagtcagctttaatcctctttttgaagccgattgccctacccctctctacaccccaatgacaatgaagttaagtgggattcacaaaagatttaaccaaatcatcagaaatagcgtttctccaatggaagaagttgttaaagaaatggaaaaaattttacaaattggtactagattgtctggctataatttatggtaccaattggatggatacgatgatgaagctttgagcgaaagtttgagattcgaattgaatgagtgggagcacgccatgagaagcagaagacacaaaagatga

SEQ ID NO: 121 - DNA, 1482 bp, Saccharomyces cerevisiae
atgctaccctatatggaccaagtactaagggcattttatcagagcacccattggagtacgcaaaatagctacgaggatataacggccacatcgagaacattattagatttccgaattccctcagcaatacacctgcaaatttccaacaaatctactcccaatacattcaattctttagatttttctacgaggtccaggataaatggttctctgagttatttatactccgatgcacagcaattggagaaattcatgcgcaactctactgatatcccattacaagatgccaccgaaacatacagacaattgcaaccaaacctcaatttcagtgttagtagtgcgaatacgttgagtagtgacaacaccacagtcgacaatgacaagaaattactacatgactcgaaatttgttaaaaaatccctttattatggtagaatgtactaccccagctctgatttagaagcaatgataataaaacgactaagtccacaaacccaatttatgcttaagggtgtcagtagtttcaaagaaagcttaaacgttttaacgtgctattttcaaagagattctcaccgcaatttacaggagtggatattttccaccagtgatctattatgtggttatagagtattacacaatttccttaccacgccttccaagtttaacacctcactgtacaataattcttcgttgtcgcttggtgctgaattttggttagggttagtaagtttaagccccggttgttcgacaactttaagatattacacacattctacaaacacaggacgaccactaactttgacattatcttggaatccattattcggccatatatcctccacatattcggccaagacagggacaaattctactttttgcgcgaagtatgattttaatctttattcgattgaatcaaatctttcatttgggtgcgaattttggcaaaaaaagcatcatttgcttgaaaccaataaaaacaataatgataaattagaaccaatctccgacgaattggttgatataaatccaaacagcagagcgactaaactactgcacgaaaatgtaccggatctgaattcagctgttaacgatattccttctacactagatatacctgttcacaaacaaaagctattaaatgatttaacttatgcattctcgtcgtcattaagaaaaatcgatgaagaaagatctaccatcgaaaaatttgataacaaaataaatagttccatttttaccagtgtttggaaattaagcacgtcattacgtgacaagactttaaaactattatgggaaggcaaatggaggggatttttaatatctgccgggacagagctggtattcactagaggctttcaagaaagtttatccgatgatgaaaagaatgataatgcaatatctatatcagcaactgatacagaaaacggcaatataccagttttcccggcaaagtttggcatacaattccagtactccacatga

SEQ ID NO: 122 - DNA, 1482 bp, Artificial Sequence
  Description of Artificial Sequence: Synthetic polynucleotide
atgttgccctatatggaccaagtattgagggcattttatcagagcacccattggagtacgcaaaatagctacgaggatataacggccacatctagaacattattagatttcagaattccctctgcaatacacttgcaaatttccaacaaatctactcccaatacattcaattctttagatttttctacgaggtccaggataaatggttctttgagttatttatactccgatgcacagcaattggagaaattcatgcgcaactctactgatatcccattacaagatgccaccgaaacatacagacaattgcaaccaaacctcaatttcagtgttagtagtgcgaatacgttgagtagtgacaacaccacagtcgacaatgacaagaaattattacatgactctaaatttgttaaaaaatccctttattatggtagaatgtactaccccagctctgatttagaagcaatgataataaaaagattaagtccacaaacccaatttatgcttaagggtgtcagtagtttcaaagaaagcttaaacgttttaacgtgctattttcaaagagattctcaccgcaatttacaggagtggatattttccaccagtgatttattatgtggttatagagtattacacaatttccttaccacgccttccaagtttaacacctccttgtacaataattcttctttgtctcttggtgctgaattttggttagggttagtaagtttaagccccggttgttctacaactttaagatattacacacattctacaaacacaggaagaccattgactttgacattatcttggaatccattattcggccatatatcctccacatattctgccaagacagggacaaattctactttttgcgcgaagtatgattttaatctttattctattgaaagtaatctttcttttgggtgcgaattttggcaaaaaaagcatcatttgcttgaaaccaataaaaacaataatgataaattagaaccaatctccgacgaattggttgatataaatccaaacagcagagcgactaaattattacacgaaaatgtaccggatttgaattctgctgttaacgatattccttctacattagatatacctgttcacaaacaaaagcttttaaatgatttaacttatgcattctcttcttctttaagaaaaatcgatgaagaaagatctaccatcgaaaaatttgataacaaaataaatagttccatttttaccagtgtttggaaattaagcacgtctttacgtgacaagactttaaaattattatgggaaggcaaatggaggggatttttaatatctgccgggacagagttggtattcactagaggctttcaagaaagtttatccgatgatgaaaagaatgataatgcaatatctatatctgcaactgatacagaaaacggcaatataccagttttcccggcaaagtttggcatacaattccagtactccacatga

SEQ ID NO: 123 - DNA, 780 bp, Saccharomyces cerevisiae
atggagccagagagcataggcgatgtggggaaccatgcccaggatgatagtgccagtatagtgtccgggcctcgcaggcgttctactagcaagacatccagtgcgaagaatatacggaactccagtaatatctctccagcatcgatgattttcaggaatttgttgatactggaggatgatttaagacgccaagctcacgaacaaaagatactgaagtggcaattcactttgttcttagcgtctatggccggtgtaggcgcatttaccttctacgaactttatttcacttcagattatgtcaagggcctccatagggttattttgcaattcactctttctttcatttccattactgtagttctttttcatatcagtggacaatatagaagaactatcgtcattccaagaagattttttacctctactaataaagggattaggcagtttaatgtgaagctagttaaagtacagtctacgtgggacgagaaatacacagattcagtaagatttgtgagtcgaacaattgcttattgtaatatttattgtttgaaaaaatttctgtggcttaaagacgataatgccattgtgaaattttggaaaagtgtcacgatacaatcccaaccgaggatcggagctgtggatgtgaaattagtcctcaaccccagagcatttagtgcagagattagagaaggatgggagatttatagagacgagttttgggccagggaaggtgctagaagacgcaaacaagcgcacgaactccgacctaaatcagaatga

SEQ ID NO: 124 - DNA, 780 bp, Artificial Sequence
  Description of Artificial Sequence: Synthetic polynucleotide
atggagccagagagcataggcgatgtggggaaccatgcccaggatgatagtgccagtatagtgtccgggcctcgcaggcgttctactagcaagacatccagtgcgaagaatataagaaactccagtaatatctctccagcatctatgattttcaggaatttgttgatattggaggatgatttaagacgccaagctcacgaacaaaagatattgaagtggcaattcactttgttcttagcgtctatggccggtgtaggcgcatttaccttctacgaactttatttcacttctgattatgtcaagggcctccatagggttattttgcaattcactctttctttcatttccattactgtagttctttttcatatcagtggacaatatagaagaactatcgtcattccaagaagattttttacctctactaataaagggattaggcagtttaatgtgaagttggttaaagtacagtctacgtgggacgagaaatacacagattctgtaagatttgtgagtaggacaattgcttattgtaatatttattgtttgaaaaaatttttatggcttaaagacgataatgccattgtgaaattttggaaaagtgtcacgatacaatcccaaccgaggatcggagctgtggatgtgaaattagtcctcaaccccagagcatttagtgcagagattagagaaggatgggagatttatagagacgagttttgggccagggaaggtgctagaagacgcaaacaagcgcacgaactcagacctaaaagtgaatga

SEQ ID NO: 125 - DNA, 597 bp, Saccharomyces cerevisiae
atgactttggcttttaatatgcaacggttggtgtttcgtaatttgaatgttgggaagcgcatgttcaagaacgtccccttatggaggtttaatgtcgccaataaattaggaaagcccttaactcgctctgtagggttaggcggtgctggcatagttgctggtggcttttacttgatgaatcgccagccttctaagttgatattcaatgattctttaggggcagctgtcaaacaacagggtcccttggaaccaactgtgggcaacagtacggcaattaccgaggaaaggaggaacaaaataagtagtcacaagcagatgtttttgggatcattattcggtgttgttttaggagttacggtggctaagatatcaattttgtttatgtatgtcggtattacaagcatgcttctttgtgaatggttacggtacaagggatggattcgcattaatttgaaaaatatcaaatctgtaattgttttgaaagatgtagacttgaagaaactgcttattgatgggttattgggtacagaatacatgggttttaaagtattctttacattgagtttcgtattagcaagtttaaatgctaacaaatga

SEQ ID NO: 126 - DNA, 597 bp, Artificial Sequence
  Description of Artificial Sequence: Synthetic polynucleotide
atgactttggcttttaatatgcaaagattggtgtttcgtaatttgaatgttgggaagcgcatgttcaagaacgtccccttatggaggtttaatgtcgccaataaattaggaaagcccttaactcgctctgtagggttaggcggtgctggcatagttgctggtggcttttacttgatgaatcgccagccttctaagttgatattcaatgattctttaggggcagctgtcaaacaacagggtcccttggaaccaactgtgggcaacagtacggcaattaccgaggaaaggaggaacaaaataagtagtcacaagcagatgtttttgggatctttattcggtgttgttttaggagttacggtggctaagatatctattttgtttatgtatgtcggtattacaagcatgcttctttgtgaatggttaagatacaagggatggattcgcattaatttgaaaaatatcaaatctgtaattgttttgaaagatgtagacttgaagaaattacttattgatgggttattgggtacagaatacatgggttttaaagtattctttacattgagtttcgtattagcaagtttaaatgctaacaaatga

SEQ ID NO: 127 - DNA, 648 bp, Saccharomyces cerevisiae
atgatcaaatctacaattgctctaccctctttcttcattgttttaattttggcgttggtcaattcagtggctgcatcttccagttatgcaccagttgctatcagtttaccagcattcagcaaagaatgcctgtactacgatatggttactgaggatgattccctggctgtgggttaccaagttctaaccggtggtaattttgagattgattttgatattactgctcctgatggatctgtgattactagtgagaaacaaaagaagtactcagactttttattaaaatcgtttggagtggggaagtataccttttgtttttccaataactatggtacagcgttgaaaaaggtagaaattacactagaaaaggaaaaaactttgactgacgagcatgaagctgatgtcaataacgatgacattattgccaataacgccgtggaggaaatagatagaaacttgaacaaaatcacgaagactttgaactatttgagagccagagaatggagaaacatgtctaccgtcaattccaccgaatcaaggttgacttggttatctatattgattatcattatcattgccgttataagtattgcccaagttctacttattcaattcctcttcactggtcgtcaaaaaaattacgtttaa

SEQ ID NO: 128 - DNA, 648 bp, Artificial Sequence
  Description of Artificial Sequence: Synthetic polynucleotide
atgatcaaatctacaattgctcttccctctttcttcattgttttaattttggcgttggtcaattctgtggctgcatcttccagttatgcaccagttgctatcagtttaccagcattcagcaaagaatgcttatactacgatatggttactgaggatgattccttggctgtgggttaccaagttttaaccggtggtaattttgagattgattttgatattactgctcctgatggatctgtgattactagtgagaaacaaaagaagtacagtgactttttattaaaaagttttggagtggggaagtataccttttgtttttccaataactatggtacagcgttgaaaaaggtagaaattacattagaaaaggaaaaaactttgactgacgagcatgaagctgatgtcaataacgatgacattattgccaataacgccgtggaggaaatagatagaaacttgaacaaaatcacgaagactttgaactatttgagagccagagaatggagaaacatgtctaccgtcaattccaccgaaagtaggttgacttggttatctatattgattatcattatcattgccgttataagtattgcccaagttttacttattcaattcctcttcactggtcgtcaaaaaaattacgtttga

SEQ ID NO: 129 - DNA, 1929 bp, Saccharomyces cerevisiae
atgtcaaaagctgtcggtattgatttaggtacaacatactcgtgtgttgctcactttgctaatgatcgtgtggacattattgccaacgatcaaggtaacagaaccactccatcttttgtcgctttcactgacactgaaagattgattggtgatgctgctaagaatcaagctgctatgaatccttcgaataccgttttcgacgctaagcgtttgatcggtagaaacttcaacgacccagaagtgcaggctgacatgaagcacttcccattcaagttgatcgatgttgacggtaagcctcaaattcaagttgaatttaagggtgaaaccaagaactttaccccagaacaaatctcctccatggtcttgggtaagatgaaggaaactgccgaatcttacttgggagccaaggtcaatgacgctgtcgtcactgtcccagcttacttcaacgattctcaaagacaagctaccaaggatgctggtaccattgctggtttgaatgtcttgcgtattattaacgaacctaccgccgctgccattgcttacggtttggacaagaagggtaaggaagaacacgtcttgattttcgacttgggtggtggtactttcgatgtctctttgttgtccattgaagacggtatctttgaagttaaggccaccgctggtgacacccatttgggtggtgaagattttgacaacagattggtcaaccacttcatccaagaattcaagagaaagaacaagaaggacttgtctaccaaccaaagagctttgagaagattaagaaccgcttgtgaaagagccaagagaactttgtcttcctccgctcaaacttccgttgaaattgactctttgttcgaaggtatcgatttctacacttccatcaccagagccagattcgaagaattgtgtgctgacttgttcagatctactttggacccagttgaaaaggtcttgagagatgctaaattggacaaatctcaagtcgatgaaattgtcttggtcggtggttctaccagaattccaaaggtccaaaaattggtcactgactacttcaacggtaaggaaccaaacagatctatcaacccagatgaagctgttgcttacggtgctgctgttcaagctgctattttgactggtgacgaatcttccaagactcaagatctattgttgttggatgtcgctccattatccttgggtattgaaactgctggtggtgtcatgaccaagttgattccaagaaactctaccattccaacaaagaagtccgagatcttttccacttatgctgataaccaaccaggtgtcttgattcaagtctttgaaggtgaaagagccaagactaaggacaacaacttgttgggtaagttcgaattgagtggtattccaccagctccaagaggtgtcccacaaattgaagtcactttcgatgtcgactctaacggtattttgaatgtttccgccgtcgaaaagggtactggtaagtctaacaagatcactattaccaacgacaagggtagattgtccaaggaagatatcgaaaagatggttgctgaagccgaaaaattcaaggaagaagatgaaaaggaatctcaaagaattgcttccaagaaccaattggaatccattgcttactctttgaagaacaccatttctgaagctggtgacaaattggaacaagctgacaaggacaccgtcaccaagaaggctgaagagactatttcttggttagacagcaacaccactgccagcaaggaagaattcgatgacaagttgaaggagttgcaagacattgccaacccaatcatgtctaagttgtaccaagctggtggtgctccaggtggcgctgcaggtggtgctccaggcggtttcccaggtggtgctcctccagctccagaggctgaaggtccaaccgttgaagaagttgattaa

SEQ ID NO: 130 - DNA, 1929 bp, Artificial Sequence
  Description of Artificial Sequence: Synthetic polynucleotide
atgtccaaagctgtcggtattgatttaggtacaacatactcttgtgttgctcactttgctaatgatcgtgtggacattattgccaacgatcaaggtaacagaaccactccatcttttgtcgctttcactgacactgaaagattgattggtgatgctgctaagaatcaagctgctatgaatccttccaataccgttttcgacgctaagcgtttgatcggtagaaacttcaacgacccagaagtgcaggctgacatgaagcacttcccattcaagttgatcgatgttgacggtaagcctcaaattcaagttgaatttaagggtgaaaccaagaactttaccccagaacaaatctcctccatggtcttgggtaagatgaaggaaactgccgaatcttacttgggagccaaggtcaatgacgctgtcgtcactgtcccagcttacttcaacgattctcaaagacaagctaccaaggatgctggtaccattgctggtttgaatgtcttgcgtattattaacgaacctaccgccgctgccattgcttacggtttggacaagaagggtaaggaagaacacgtcttgattttcgacttgggtggtggtactttcgatgtctctttgttgtccattgaagacggtatctttgaagttaaggccaccgctggtgacacccatttgggtggtgaagattttgacaacagattggtcaaccacttcatccaagaattcaagagaaagaacaagaaggacttgtctaccaaccaaagagctttgagaagattaagaaccgcttgtgaaagagccaagagaactttgtcttcctccgctcaaacttccgttgaaattgactctttgttcgaaggtatcgatttctacacttccatcaccagagccagattcgaagaattgtgtgctgacttgttcagatctactttggacccagttgaaaaggtcttgagagatgctaaattggacaaatctcaagtcgatgaaattgtcttggtcggtggttctaccagaattccaaaggtccaaaaattggtcactgactacttcaacggtaaggaaccaaacagatctatcaacccagatgaagctgttgcttacggtgctgctgttcaagctgctattttgactggtgacgaatcttccaagactcaagatttattgttgttggatgtcgctccattatccttgggtattgaaactgctggtggtgtcatgaccaagttgattccaagaaactctaccattccaacaaagaagtccgagatcttttccacttatgctgataaccaaccaggtgtcttgattcaagtctttgaaggtgaaagagccaagactaaggacaacaacttgttgggtaagttcgaattgagtggtattccaccagctccaagaggtgtcccacaaattgaagtcactttcgatgtcgactctaacggtattttgaatgtttccgccgtcgaaaagggtactggtaagtctaacaagatcactattaccaacgacaagggtagattgtccaaggaagatatcgaaaagatggttgctgaagccgaaaaattcaaggaagaagatgaaaaggaatctcaaagaattgcttccaagaaccaattggaatccattgcttactctttgaagaacaccatttctgaagctggtgacaaattggaacaagctgacaaggacaccgtcaccaagaaggctgaagagactatttcttggttagacagcaacaccactgccagcaaggaagaattcgatgacaagttgaaggagttgcaagacattgccaacccaatcatgtctaagttgtaccaagctggtggtgctccaggtggcgctgcaggtggtgctccaggcggtttcccaggtggtgctcctccagctccagaggctgaaggtccaaccgttgaagaagttgattga

SEQ ID NO: 131 - DNA, 621 bp, Saccharomyces cerevisiae
atggcatccaccgatttctccaagattgaaactttgaaacaattaaacgcttctttggctgacaagtcatacattgaaggtactgctgtttctcaagctgacgtcactgtcttcaaggctttccaatctgcttacccagaattctccagatggttcaaccacatcgcttccaaggccgatgaattcgactctttcccagctgcctctgctgccgctgccgaagaagaagaagatgacgatgtcgatttattcggttccgacgatgaagaagctgacgctgaagctgaaaagttgaaggctgaaagaattgccgcatacaacgctaagaaggctgctaagccagctaagccagctgctaagtccattgtcactctagatgtcaagccatgggatgatgaaaccaatttggaagaaatggttgctaacgtcaaggccatcgaaatggaaggtttgacctggggtgctcaccaatttatcccaattggtttcggtatcaagaagttgcaaattaactgtgttgtcgaagatgacaaggtttccttggatgacttgcaacaaagcattgaagaagacgaagaccacgtccaatctaccgatattgctgctatgcaaaaattataa

SEQ ID NO: 132 - DNA, 621 bp, Artificial Sequence
  Description of Artificial Sequence: Synthetic polynucleotide
atggcatccaccgatttctccaagattgaaactttgaaacaattaaacgcttctttggctgacaagtcctacattgaaggtactgctgtttctcaagctgacgtcactgtcttcaaggctttccaatctgcttacccagaattctccagatggttcaaccacatcgcttccaaggccgatgaattcgactctttcccagctgcctctgctgccgctgccgaagaagaagaagatgacgatgtcgatttattcggttccgacgatgaagaagctgacgctgaagctgaaaagttgaaggctgaaagaattgccgcatacaacgctaagaaggctgctaagccagctaagccagctgctaagtccattgtcactttagatgtcaagccatgggatgatgaaaccaatttggaagaaatggttgctaacgtcaaggccatcgaaatggaaggtttgacctggggtgctcaccaatttatcccaattggtttcggtatcaagaagttgcaaattaactgtgttgtcgaagatgacaaggtttccttggatgacttgcaacaaagcattgaagaagacgaagaccacgtccaatctaccgatattgctgctatgcaaaaattatga

SEQ ID NO: 133 - DNA, 3825 bp, Saccharomyces cerevisiae
atggagcaaaatggccttgaccacgacagcagatctagcatcgatacgactattaatgacactcaaaagactttcctagaatttagatcgtatacccaattaagtgaaaaactggcatctagttcttcatatacggcacctcccctgaacgaagatggtcctaaaggggtagcttctgcagtgtcacaaggctccgaatccgtagtctcatggacaactttaacacacgtatattccatcctgggtgcttatggagggcccacgtgcttgtatccgacagccacgtattttttgatgggcacttctaaaggatgcgtactcatttttaattataatgaacatttgcagacaatcctagtgccgaccttatctgaggacccttctattcactcaataagaagtccagtgaaatcaattgtcatatgttccgatggtactcatgtagctgcctcatacgagaccggaaatatatgcatttggaacttgaacgtagggtatagagtgaaacccacttctgaaccaacaaatggtatgaccccaacgcctgccttaccggcagtcttacacatcgatgaccatgtgaacaaggaaatcacagggttagacttttttggtgctcggcatacagccctgattgttagtgataggacaggtaaagtatcactctataacggttacagaagaggcttttggcagttggtgtataattcaaaaaaaattttagatgtgaactcttccaaggagaaattaataaggtcaaagttgtctccactaatatcacgggagaaaatttccactaatttgttgagtgtactcacaactacacattttgcccttattttattatcgccacacgtttctttgatgtttcaagaaactgttgaaccctcagtacaaaattctctagtcgtgaatagctctatttcatggactcaaaactgttccagggttgcttattccgtaaataataaaatttctgttatttccatatcttcatcagacttcaatgttcagtccgctagccattctcctgaatttgcagaatctatattatccattcaatggattgaccagctcctacttggtgttttaaccatatcgcaccaatttttggtattgcacccccaacatgacttcaagatcctgttaagattggattttctgattcacgatttgatgatcccacctaataaatattttgtaataagtagaagaagtttctacctgttaacaaactactcatttaaaattggcaaatttgtgtcttggtcagatattactttaagacatattttgaaaggcgactacttgggtgcattggagttcatagaatcacttttgcaaccttactgtccactggcaaacttgttgaagctagataataatacggaagagaggactaagcaacttatggaaccattttacaatctgtccttggctgccctaaggtttcttataaaaaaagataatgccgactacaatagggtttaccaattattaatggtagttgttcgtgttttgcagcaatcttccaaaaaactagactcaattccttctctagacgtctttttggaacagggtctggagttctttgaattgaaggacaacgcggtatattttgaagttgtagcaaatattgttgcccaaggatcagttacgtcaatttccccagttcttttcaggtccataattgattactatgctaaggaggagaatttaaaagtaattgaagacttaatcatcatgttaaatcctactacgcttgatgttgatcttgccgtcaaactatgccaaaagtataatttgttcgatttattaatatatatttggaacaagatctttgatgattatcaaaccccagtggtggacttgatatacaggatttctaaccaaagtgaaaaatgtgtgatcttcaatggtcctcaagtacctcctgaaacgactatatttgattacgtaacgtatatccttactggcaggcaatatccacaaaacttgtctatatcaccaagtgataaatgctccaaaatacaaagggaactttcagcatttatttttagtggcttctccataaaatggccgtcgaacagcaatcataaactttacatatgcgaaaatccagaagaagagccagcatttccttactttcaccttttattgaaatcgaatccgagtaggttcttagcaatgctcaatgaagtgtttgaagcgtccttgtttaacgatgacaatgacatggttgcatcagttggagaagcagaattggtaagtaggcaatatgttattgatctactattggatgctatgaaagatacgggaaattcagacaacatcagggtacttgttgcaattttcattgcaactagtatatcaaaatatcctcaatttattaaagtgtctaaccaagccctcgactgcgttgttaataccatatgctcctctagggttcaaggtatatatgaaatttctcaaatagctctggagtcgcttttaccctattatcattcaagaacaacagaaaattttatactggaactaaaagaaaaaaatttcaataaagttcttttccatatctataaaagtgaaaataagtacgccagtgcgctttcacttattttagaaactaaggacatcgaaaaagaatataacacggacattgtatccataaccgactacatactcaaaaaatgcccacctggaagtttagaatgtggcaaagttactgaagttatcgagacgaactttgatcttcttctctcaaggatcggtatcgaaaaatgcgtcacaattttttctgactttgactataatcttcatcaagaaatcctggaagtaaagaatgaggagactcagcaaaagtatttggataagcttttttctacgccaaatatcaacaataaggtcgataagcgtttaagaaatttacacatcgaattgaactgtaaatacaagagcaaaagggaaatgattctttggcttaatggtacagttctcagcaacgctgagagcttacaaattctggacttattgaatcaagactctaattttgaagctgcagctataattcacgaacgcttggaaagttttaacctagcagtcagggatttattaagttttattgaacaatgtctaaatgaagggaaaacaaatatatctactttattggaatctttgaggagggcctttgatgattgtaattctgctggtaccgagaaaaaatcgtgttggatattattgattacattcctgatcactctatatgggaaatatccttcacacgatgaaaggaaagatttatgtaataaactacttcaagaagcatttttgggattggttaggtccaagagttcctctcagaaggattcaggtggggaattctgggaaataatgtcttctgttcttgagcaccaagacgttattttaatgaaagttcaggatttaaagcaactgctactgaatgtttttaatacttataaattggaaagatctctttctgagttgattcaaaagattatagaggattcttcgcaagatcttgttcaacagtatagaaaatttctgagtgaagggtggtctatacacaccgacgactgcgaaatctgcgggaaaaaaatatggggagctggtctggacccattactttttctagcttgggaaaatgtacagcgccaccaagatatgattagtgtagatctcaaaactccccttgtcatattcaaatgtcaccatggctttcaccagacttgcctcgaaaacttggcccagaaacccgatgaatattcttgtttaatttgccagacggaatctaacccaaaaatagtataa

SEQ ID NO: 134 - DNA, 3825 bp, Artificial Sequence
  Description of Artificial Sequence: Synthetic polynucleotide
atggagcaaaatggccttgaccacgacagcagatctagcatcgatacgactattaatgacactcaaaagactttcttggaatttagatcttatacccaattaagtgaaaaattggcatctagttcttcttatacggcacctcccttaaacgaagatggtcctaaaggggtagcttctgcagtgagtcaaggctccgaatccgtagtctcttggacaactttaacacacgtatattccatcttgggtgcttatggagggcccacgtgcttgtatccgacagccacgtattttttgatgggcacttctaaaggatgcgtactcatttttaattataatgaacatttgcagacaatcttagtgccgaccttatctgaggacccttctattcactccataagaagtccagtgaaatccattgtcatatgttccgatggtactcatgtagctgcctcttacgagaccggaaatatatgcatttggaacttgaacgtagggtatagagtgaaacccacttctgaaccaacaaatggtatgaccccaacgcctgccttaccggcagtcttacacatcgatgaccatgtgaacaaggaaatcacagggttagacttttttggtgctagacatacagccttaattgttagtgataggacaggtaaagtatctctctataacggttacagaagaggcttttggcagttggtgtataattctaaaaaaattttagatgtgaactcttccaaggagaaattaataaggtctaagttgtctccattgatatccagagagaaaatttccactaatttgttgagtgtactcacaactacacattttgcccttattttattatctccacacgtttctttgatgtttcaagaaactgttgaaccctctgtacaaaattctttggtcgtgaatagctctatttcttggactcaaaactgttccagggttgcttattccgtaaataataaaatttctgttatttccatatcttcttctgacttcaatgttcagtccgctagccattctcctgaatttgcagaatctatattatccattcaatggattgaccagctcttacttggtgttttaaccatatctcaccaatttttggtattgcacccccaacatgacttcaagatcttattaagattggattttttgattcacgatttgatgatcccacctaataaatattttgtaataagtagaagaagtttctacttattaacaaactactcttttaaaattggcaaatttgtgtcttggtctgatattactttaagacatattttgaaaggcgactacttgggtgcattggagttcatagaatctcttttgcaaccttactgtccattggcaaacttgttgaagttggataataatacggaagagaggactaagcaacttatggaaccattttacaatttatccttggctgccttaaggtttcttataaaaaaagataatgccgactacaatagggtttaccaattattaatggtagttgttcgtgttttgcagcaatcttccaaaaaattagacagtattccttctttggacgtctttttggaacagggtttagagttctttgaattgaaggacaacgcggtatattttgaagttgtagcaaatattgttgcccaaggatctgttacgtccatttccccagttcttttcaggtccataattgattactatgctaaggaggagaatttaaaagtaattgaagacttaatcatcatgttaaatcctactacgcttgatgttgatcttgccgtcaaattatgccaaaagtataatttgttcgatttattaatatatatttggaacaagatctttgatgattatcaaaccccagtggtggacttgatatacaggatttctaaccaaagtgaaaaatgtgtgatcttcaatggtcctcaagtacctcctgaaacgactatatttgattacgtaacgtatatccttactggcaggcaatatccacaaaacttgtctatatctccaagtgataaatgctccaaaatacaaagggaactttctgcatttatttttagtggcttctccataaaatggccgtctaacagcaatcataaactttacatatgcgaaaatccagaagaagagccagcatttccttactttcaccttttattgaaatctaatccgagtaggttcttagcaatgctcaatgaagtgtttgaagcgtccttgtttaacgatgacaatgacatggttgcatctgttggagaagcagaattggtaagtaggcaatatgttattgatttattattggatgctatgaaagatacgggaaatagtgacaacatcagggtacttgttgcaattttcattgcaactagtatatccaaatatcctcaatttattaaagtgtctaaccaagccctcgactgcgttgttaataccatatgctcctctagggttcaaggtatatatgaaatttctcaaatagctttggagtctcttttaccctattatcattccagaacaacagaaaattttatattggaattgaaagaaaaaaatttcaataaagttcttttccatatctataaaagtgaaaataagtacgccagtgcgctttctcttattttagaaactaaggacatcgaaaaagaatataacacggacattgtatccataaccgactacatactcaaaaaatgcccacctggaagtttagaatgtggcaaagttactgaagttatcgagacgaactttgatcttcttctctccaggatcggtatcgaaaaatgcgtcacaattttttctgactttgactataatcttcatcaagaaatcttggaagtaaagaatgaggagactcagcaaaagtatttggataagcttttttctacgccaaatatcaacaataaggtcgataagcgtttaagaaatttacacatcgaattgaactgtaaatacaagagcaaaagggaaatgattctttggcttaatggtacagttctcagcaacgctgagagcttacaaattttggacttattgaatcaagactctaattttgaagctgcagctataattcacgaacgcttggaaagttttaacttggcagtcagggatttattaagttttattgaacaatgtttgaatgaagggaaaacaaatatatctactttattggaatctttgaggagggcctttgatgattgtaattctgctggtaccgagaaaaaaagttgttggatattattgattacattcttgatcactttatatgggaaatatccttctcacgatgaaaggaaagatttatgtaataaattacttcaagaagcatttttgggattggttaggtccaagagttcctctcagaaggattctggtggggaattctgggaaataatgtcttctgttcttgagcaccaagacgttattttaatgaaagttcaggatttaaagcaattattattgaatgtttttaatacttataaattggaaagatctctttctgagttgattcaaaagattatagaggattcttctcaagatcttgttcaacagtatagaaaatttttgagtgaagggtggtctatacacaccgacgactgcgaaatctgcgggaaaaaaatatggggagctggtttggacccattactttttttggcttgggaaaatgtacagcgccaccaagatatgattagtgtagatctcaaaactccccttgtcatattcaaatgtcaccatggctttcaccagacttgcctcgaaaacttggcccagaaacccgatgaatattcttgtttaatttgccagacggaatctaacccaaaaatagtatga

SEQ ID NO: 135 - DNA, 3483 bp, Saccharomyces cerevisiae
atggtactgacgatttatcctgacgaactcgtacaaatagtgtctgataaaattgcttcaaataagggaaaaatcactttgaatcagctgtgggatatatctggtaaatattttgatttgtctgataaaaaagttaaacagttcgtgctttcatgcgtgatattgaaaaaggacattgaggtgtattgtgatggtgctataacaactaaaaatgtgactgatattataggcgacgctaatcattcatactcggttgggattactgaggacagcctatggacattattaacgggatacacaaaaaaggagtcaactattggaaattctgcatttgaactacttctcgaagttgccaaatcaggagaaaaagggatcaatactatggatttggcgcaggtaactgggcaagatcctagaagtgtgactggacgtatcaagaaaataaaccacctgttaacaagttcacaactgatttataagggacacgtcgtgaagcaattgaagctaaaaaaattcagccatgacggggtggatagtaatccctatattaatattagggatcatttagcaacaatagttgaggtggtaaaacgatcaaaaaatggtattcgccagataattgatttaaagcgtgaattgaaatttgacaaagagaaaagactttctaaagcttttattgcagctattgcatggttagatgaaaaggagtacttaaagaaagtgcttgtagtatcacccaagaatcctgccattaaaatcagatgtgtaaaatacgtgaaagatattccagactctaaaggctcgccttcatttgagtatgatagcaatagcgcggatgaagattctgtatcagatagcaaggcagctttcgaagatgaagacttagtcgaaggtttagataatttcaatgcgactgatttattacaaaatcaaggccttgttatggaagagaaagaggatgctgtaaagaatgaagttcttcttaatcgattttatccacttcaaaatcagacttatgacattgcagataagtctggccttaaaggaatttcaactatggatgttgtaaatcgaattaccggaaaagaatttcagcgagcttttaccaaatcaagcgaatattatttagaaagtgtggataagcaaaaagaaaatacaggggggtataggctttttcgcatatacgattttgagggaaagaagaagttttttaggctgttcacagctcagaactttcaaaagttaacaaatgcggaagacgaaatatccgttccaaaagggtttgatgagctaggcaaatctcgtaccgatttgaaaactctcaacgaggataatttcgtcgcactcaacaacactgttagatttacaacggacagcgatggacaggatatattcttctggcacggtgaattaaaaattcccccaaactcaaaaaaaactccgaataaaaacaaacggaagaggcaggttaaaaacagtactaatgcttctgttgcaggaaacatttcgaatcccaaaaggattaagctagagcagcatgtcagcactgcacaggagccgaaatctgctgaagatagtccaagttcaaacggaggcactgttgtcaaaggcaaggtggttaacttcggcggcttttctgcccgctctttgcgttcactacagagacagagagccattttgaaagttatgaatacgattggtggggtagcatacctgagagaacaattttacgaaagcgtttctaaatatatgggctccacaacgacattagataaaaagactgtccgtggtgatgttgatttgatggtagaaagcgaaaaattaggagccagaacagagcctgtatcaggaagaaaaattatttttttgcccactgttggagaggacgctatccaaaggtacatcctgaaagaaaaagatagtaaaaaagcaacctttactgatgttatacatgatacggaaatatacttctttgaccaaacggaaaaaaataggtttcacagaggaaagaaatcagttgaaagaattcgtaagtttcagaaccgccaaaagaatgctaagatcaaagcttcagatgacgctatctctaagaagagtacgtcggtcaacgtatcagatggaaagatcaaaaggagagacaaaaaagtgtctgctggtaggacaacggtggtcgtggaaaatactaaagaagacaaaactgtctatcatgcaggcactaaagatggtgttcaggctttaatcagagctgttgtagttactaaaagtattaaaaatgaaataatgtgggacaaaataacaaaattatttcctaataattctttagataacctaaaaaagaaatggacggcacggcgagtaagaatgggtcatagtggttggagggcatatgtcgataagtggaaaaaaatgctcgttctagccattaaaagtgaaaagatttcactgagggatgttgaagaactagatcttatcaaattgcttgatatttggacctcttttgatgaaaaggaaataaaaaggccgctctttctttataagaactacgaagagaatagaaaaaaatttactctggtacgtgatgacacacttacacattctggcaacgatctggccatgtcttctatgattcaaagagagatctcttctttaaaaaaaacttacactagaaagatttccgcttctactaaggacttatcgaagagtcaaagcgacgattatattcgcacagtgatccggtccatattaatagaaagtccttcgaccactagaaatgaaatagaggcgttgaagaacgttggaaacgaatcaatagataacgtcatcatggatatggctaaggaaaagcaaatttatctccatggctcaaaacttgaatgtactgatactttaccagacattttggaaaatagaggaaattataaagattttggtgtagcttttcagtatagatgtaaggttaatgaattattggaggccggaaacgctattgttatcaatcaagagccgtccgatatatcctcttgggttttaattgatttgatttcgggagagctattgaatatggatgtaattccaatggtgagaaatgttcgacctttaacgtatacttcaaggagatttgaaatacgaacattaactccccctctgattatatatgccaattctcagacaaaattgaatacagcaaggaagtctgctgtcaaagttccactgggcaaaccattttctcgtttatgggtgaatggatctggttccattaggccaaacatatggaagcaggtagttactatggtcgttaacgaaataatatttcatccagggataacattgagtagattgcaatctaggtgtcgtgaagtactttcgcttcatgaaatatcagaaatatgcaaatggctcctagaaagacaagtattaataactactgattttgatggctattgggtcaatcataattggtattctatatatgaatctacataa

SEQ ID NO: 136 - DNA, 3483 bp, Artificial Sequence
  Description of Artificial Sequence: Synthetic polynucleotide
atggtattgacgatttatcctgacgaactcgtacaaatagtgtctgataaaattgcttctaataagggaaaaatcactttgaatcagttatgggatatatctggtaaatattttgatttgtctgataaaaaagttaaacagttcgtgctttcttgcgtgatattgaaaaaggacattgaggtgtattgtgatggtgctataacaactaaaaatgtgactgatattataggcgacgctaatcattcttactctgttgggattactgaggacagcttgtggacattattaacgggatacacaaaaaaggagtctactattggaaattctgcatttgaattgcttctcgaagttgccaaaagtggagaaaaagggatcaatactatggatttggcgcaggtaactgggcaagatcctagaagtgtgactggacgtatcaagaaaataaaccacttattaacaagttctcaattgatttataagggacacgtcgtgaagcaattgaagttgaaaaaattcagccatgacggggtggatagtaatccctatattaatattagggatcatttagcaacaatagttgaggtggtaaaaagaagtaaaaatggtattcgccagataattgatttaaagcgtgaattgaaatttgacaaagagaaaagactttctaaagcttttattgcagctattgcatggttagatgaaaaggagtacttaaagaaagtgcttgtagtatctcccaagaatcctgccattaaaatcagatgtgtaaaatacgtgaaagatattccagactctaaaggctctccttcttttgagtatgatagcaatagcgcggatgaagattctgtatctgatagcaaggcagctttcgaagatgaagacttagtcgaaggtttagataatttcaatgcgactgatttattacaaaatcaaggccttgttatggaagagaaagaggatgctgtaaagaatgaagttcttcttaatagattttatccacttcaaaatcagacttatgacattgcagataagtctggccttaaaggaatttctactatggatgttgtaaatagaattaccggaaaagaatttcagcgtgcttttaccaaaagtagcgaatattatttagaaagtgtggataagcaaaaagaaaatacaggggggtataggctttttcgcatatacgattttgagggaaagaagaagttttttaggttgttcacagctcagaactttcaaaagttaacaaatgcggaagacgaaatatccgttccaaaagggtttgatgagttgggcaaatctcgtaccgatttgaaaactctcaacgaggataatttcgtcgcactcaacaacactgttagatttacaacggacagcgatggacaggatatattcttctggcacggtgaattaaaaattcccccaaactccaaaaaaactccgaataaaaacaaaagaaagaggcaggttaaaaacagtactaatgcttctgttgcaggaaacatttctaatcccaaaaggattaagttggagcagcatgtcagcactgcacaggagccgaaatctgctgaagatagtccaagtagtaacggaggcactgttgtcaaaggcaaggtggttaacttcggcggcttttctgcccgctctttgcgttctttgcagagacagagagccattttgaaagttatgaatacgattggtggggtagcatacttgagagaacaattttacgaaagcgtttctaaatatatgggctccacaacgacattagataaaaagactgtccgtggtgatgttgatttgatggtagaaagcgaaaaattaggagccagaacagagcctgtatctggaagaaaaattatttttttgcccactgttggagaggacgctatccaaaggtacatcttgaaagaaaaagatagtaaaaaagcaacctttactgatgttatacatgatacggaaatatacttctttgaccaaacggaaaaaaataggtttcacagaggaaagaaatctgttgaaagaattcgtaagtttcagaaccgccaaaagaatgctaagatcaaagcttctgatgacgctatctctaagaagagtacgagtgtcaacgtatctgatggaaagatcaaaaggagagacaaaaaagtgtctgctggtaggacaacggtggtcgtggaaaatactaaagaagacaaaactgtctatcatgcaggcactaaagatggtgttcaggctttaatcagagctgttgtagttactaaaagtattaaaaatgaaataatgtgggacaaaataacaaaattatttcctaataattctttagataacttgaaaaagaaatggacggcacgtcgtgtaagaatgggtcatagtggttggagggcatatgtcgataagtggaaaaaaatgctcgttttggccattaaaagtgaaaagatttctttgagggatgttgaagaattagatcttatcaaattgcttgatatttggacctcttttgatgaaaaggaaataaaaaggccgctctttctttataagaactacgaagagaatagaaaaaaatttactttggtacgtgatgacacacttacacattctggcaacgatttggccatgtcttctatgattcaaagagagatctcttctttaaaaaaaacttacactagaaagatttccgcttctactaaggacttatccaagagtcaaagcgacgattatattcgcacagtgatcagatccatattaatagaaagtccttctaccactagaaatgaaatagaggcgttgaagaacgttggaaacgaaagtatagataacgtcatcatggatatggctaaggaaaagcaaatttatctccatggctctaaacttgaatgtactgatactttaccagacattttggaaaatagaggaaattataaagattttggtgtagcttttcagtatagatgtaaggttaatgaattattggaggccggaaacgctattgttatcaatcaagagccgtccgatatatcctcttgggttttaattgatttgatttctggagagttattgaatatggatgtaattccaatggtgagaaatgttagacctttaacgtatacttctaggagatttgaaataagaacattaactccccctttgattatatatgccaattctcagacaaaattgaatacagcaaggaagtctgctgtcaaagttccattaggcaaaccattttctcgtttatgggtgaatggatctggttccattaggccaaacatatggaagcaggtagttactatggtcgttaacgaaataatatttcatccagggataacattgagtagattgcaatctaggtgtcgtgaagtactttctcttcatgaaatatctgaaatatgcaaatggctcttggaaagacaagtattaataactactgattttgatggctattgggtcaatcataattggtattctatatatgaatctacatga

SEQ ID NO: 137 - DNA, 1620 bp, Saccharomyces cerevisiae
atgcatcgtaaatcattgaggagggctagcgctactgtgccttccgctccctatcgaaagcagattattagcaatgcacacaataaaccaagccttttctctaaaattaaaactttctttacccaaaaagattcagccagagtgagtccaaggaataatgttgctaataaacaaccacgcaatgagtcttttaacagaagaatctcaagtatgcctggaggttatttccattctgagatatccccagattctactgtaaaccgttccgtagttgtttctgcagtgggtgaagccagaaacgacattgagaataaagaagaggagtatgatgaaacacatgaaactaacatctccaatgcaaagcttgcaaacttttttagtaaaaaaggtaatgagcctttatcagaaattgaaatagagggtgtgatgtcattgttacaaaaatcaagcaaatccatgataacttcggaaggagaacaaaaatcagccgaaggtaataatatcgaccagtcgcttatcttgaaggagtcaggaagtacaccaatcagcatatctaatgcgccgaccttcaacccaaaatatgatacttcaaatgcgtcaatgaatacgactttgggaagcattggttcaagaaaatacagtttcaattattctagcctgccctcaccatacaaaacaaccgtttatagatatagtgcagcgaaaaagatccccgatacatacacagccaacacatctgctcaaagtatagcatctgctaaatcggtaagaagtggtgtttcaaagtcagctcctagtaagaaaataagtaatacagctgcggcattggtctcactattagatgaaaatgacagtaagaagaataatgcagcttcagaacttgctaatccatactcctcatatgtaagccaaatacgcaaacataagagagtttctccaaatgctgcaccaaggcaagagatcagtgaagaagaaactactgttaagccattatttcaaaacgttcctgaacaaggcgaagaaccaatgaaacaactgaacgccaccaaaatttcaccatctgcgccaagcaaagattcttttactaaatacaaacctgcaaggtcctcatccttacgctcaaatgtcgtcgtagctgaaacctcacctgaaaagaaggatggtggagataaacctccatcctctgcttttaacttctcgtttaatacttcaagaaacgttgaacctactgagaatgcttataagagcgagaacgcaccatctgcatcatcaaaggaattcaattttaccaacctacaggcgaagccgttagttggaaagccaaaaaccgaacttacaaagggcgattctactcccgtccaaccagatctttcggttactcctcaaaaaagttcatcgaaaggctttgtttttaatagtgttcaaaagaaatcacggtccaatctttcacaagaaaacgataatgaaggtaaacatatcagcgcctcaattgataacgacttttcagaggaaaaggcggaagagtttgatttcaatgttcccgtggtgtctaagcagctaggaaatggcttggttgatgaaaataaagttgaggctttcaagtccctatataccttttga

SEQ ID NO: 138 - DNA, 1620 bp, Artificial Sequence
  Description of Artificial Sequence: Synthetic polynucleotide
atgcatcgtaaatctttgaggagggctagcgctactgtgccttccgctccctatagaaagcagattattagcaatgcacacaataaaccaagccttttctctaaaattaaaactttctttacccaaaaagattctgccagagtgagtccaaggaataatgttgctaataaacaaccacgcaatgagtcttttaacagaagaatctccagtatgcctggaggttatttccattctgagatatccccagattctactgtaaaccgttccgtagttgtttctgcagtgggtgaagccagaaacgacattgagaataaagaagaggagtatgatgaaacacatgaaactaacatctccaatgcaaagcttgcaaacttttttagtaaaaaaggtaatgagcctttatctgaaattgaaatagagggtgtgatgtctttgttacaaaaaagtagcaaatccatgataacttctgaaggagaacaaaaaagtgccgaaggtaataatatcgaccagtctcttatcttgaaggagagtggaagtacaccaatcagcatatctaatgcgccgaccttcaacccaaaatatgatacttccaatgcgtccatgaatacgactttgggaagcattggttccagaaaatacagtttcaattattctagcttgccctctccatacaaaacaaccgtttatagatatagtgcagcgaaaaagatccccgatacatacacagccaacacatctgctcaaagtatagcatctgctaaatctgtaagaagtggtgtttccaagtctgctcctagtaagaaaataagtaatacagctgcggcattggtctctttattagatgaaaatgacagtaagaagaataatgcagcttctgaacttgctaatccatactccagctatgtaagccaaatacgcaaacataagagagtttctccaaatgctgcaccaaggcaagagatcagtgaagaagaaactactgttaagccattatttcaaaacgttcctgaacaaggcgaagaaccaatgaaacaattgaacgccaccaaaatttctccatctgcgccaagcaaagattcttttactaaatacaaacctgcaaggtcctcctccttacgcagtaatgtcgtcgtagctgaaacctctcctgaaaagaaggatggtggagataaacctccatcctctgcttttaacttctcctttaatacttccagaaacgttgaacctactgagaatgcttataagagcgagaacgcaccatctgcatcttccaaggaattcaattttaccaacttacaggcgaagccgttagttggaaagccaaaaaccgaacttacaaagggcgattctactcccgtccaaccagatctttctgttactcctcaaaaaagttcttctaaaggctttgtttttaatagtgttcaaaagaaaagcagatccaatctttctcaagaaaacgataatgaaggtaaacatatcagcgcctctattgataacgacttttctgaggaaaaggcggaagagtttgatttcaatgttcccgtggtgtctaagcagttaggaaatggcttggttgatgaaaataaagttgaggctttcaagtccttatataccttttga

SEQ ID NO: 139 - DNA, 660 bp, Saccharomyces cerevisiae
atgcttttaacctctcttttacaggtttttgcctgctgtctagttttaccagctcaagttactgcgttctattattatacttctggtgctgaacgtaagtgcttccacaaggaattgtctaaaggtactttgttccaagcaacttacaaggcacaaatttacgatgaccaattacaaaattacagagacgctggtgcgcaagattttggtgtcttgattgatattgaggaaacttttgatgataaccacctggttgttcatcagaaaggttcagcaagtggtgatttaactttccttgcgtctgattcgggtgaacataaaatctgtattcagcccgaagctggtggctggttgattaaggctaaaacgaagattgacgttgaattccaagtgggctctgatgaaaagttagattctaagggtaaagccactattgacattctacatgccaaggttaacgtcctaaactccaagatcggcgaaattagaagagagcaaaaattgatgagagatcgtgaagctacctttagagacgcctctgaagctgttaattctcgtgctatgtggtggattgtcattcaattaattgttctcgctgttacttgtggctggcaaatgaaacacctgggcaaattttttgttaagcaaaaaattttatga

SEQ ID NO: 140 - DNA, 660 bp, Artificial Sequence
  Description of Artificial Sequence: Synthetic polynucleotide
atgcttttaacctctcttttacaggtttttgcctgctgtttggttttaccagctcaagttactgcgttctattattatacttctggtgctgaacgtaagtgcttccacaaggaattgtctaaaggtactttgttccaagcaacttacaaggcacaaatttacgatgaccaattacaaaattacagagacgctggtgcgcaagattttggtgtcttgattgatattgaggaaacttttgatgataaccacttggttgttcatcagaaaggttctgcaagtggtgatttaactttccttgcgtctgattctggtgaacataaaatctgtattcagcccgaagctggtggctggttgattaaggctaaaacgaagattgacgttgaattccaagtgggctctgatgaaaagttagattctaagggtaaagccactattgacattttgcatgccaaggttaacgtcttgaactccaagatcggcgaaattagaagagagcaaaaattgatgagagatcgtgaagctacctttagagacgcctctgaagctgttaattctcgtgctatgtggtggattgtcattcaattaattgttctcgctgttacttgtggctggcaaatgaaacacttgggcaaattttttgttaagcaaaaaattttatga

SEQ ID NO: 141 - DNA, 1281 bp, Saccharomyces cerevisiae
atgaacatccttttacaggatccattcgctgttcttaaggaacatcctgagaagctcacacatacgattgagaaccctttacgcactgaatgtctccagttcagtccttgcggtgattacctggctcttgggtgtgccaatggagcacttgttatttacgatatggatacgttcaggcctatttgtgtcccaggaaatatgttgggagcacatgttcgacccattacatctatcgcatggtctccagatggtagattgttgcttacaagctctagagactggtcaataaaactgtgggatctttcaaagccaagtaagcctttgaaagaaatacgattcgattctccaatttggggttgccaatggctggatgctaaaaggcggctttgtgtagctacgatatttgaggaaagtgacgcatatgttattgacttcagcaatgatccggtcgcaagccttctcagtaaatcagacgaaaaacaattgagttcgacacctgatcatggatatgttcttgtttgtacagtacataccaaacatccaaatattattattgttggaacttcaaaaggttggctagacttctataaattccattctctatatcaaacagaatgtattcattcccttaaaatcacgagttctaatatcaaacatttaattgtctcgcaaaatggtgaaagattagctattaactgctccgatagaacaataagacaatacgaaataagtattgatgatgaaaactctgcggttgagttgaccttagagcataagtaccaggatgtgattaataaattacagtggaactgtatcctctttagtaataatactgccgaatacttagtcgcttctacacatggttcttctgcacatgaactatacatctgggaaacgactagtggaacgttggtgagagtcctggaaggggctgaagaggagttgatagatataaattgggacttctatagtatgagtatagtgagtaatggttttgaatctgggaacgtgtatgtgtggtctgttgttattccgccaaagtggagtgctttggcgccagattttgaagaagtagaagagaatgtcgactatttggagaaggaagatgaatttgatgaggtcgatgaggcagaacagcagcaaggactagaacaagaggaagaaatagctatcgatcttcggacgagagagcaatatgatgttagaggtaataacttgcttgtagaacggttcacaatccctacagattatacgaggataattaagatgcagtcatcatag

SEQ ID NO: 142 - DNA, 1281 bp, Artificial Sequence
  Description of Artificial Sequence: Synthetic polynucleotide
atgaacatccttttacaggatccattcgctgttcttaaggaacatcctgagaagctcacacatacgattgagaaccctttacgcactgaatgtctccagttcagtccttgcggtgattacttggctcttgggtgtgccaatggagcacttgttatttacgatatggatacgttcaggcctatttgtgtcccaggaaatatgttgggagcacatgttagacccattacatctatcgcatggtctccagatggtagattgttgcttacaagctctagagactggtccataaaattatgggatctttccaagccaagtaagcctttgaaagaaataagattcgattctccaatttggggttgccaatggcttgatgctaaaaggagactttgtgtagctacgatatttgaggaaagtgacgcatatgttattgacttcagcaatgatccggtcgcaagccttctcagtaaaagtgacgaaaaacaattgagttctacacctgatcatggatatgttcttgtttgtacagtacataccaaacatccaaatattattattgttggaacttctaaaggttggttagacttctataaattccattctttgtatcaaacagaatgtattcattcccttaaaatcacgagttctaatatcaaacatttaattgtctctcaaaatggtgaaagattagctattaactgctccgatagaacaataagacaatacgaaataagtattgatgatgaaaactctgcggttgagttgaccttagagcataagtaccaggatgtgattaataaattacagtggaactgtatcctctttagtaataatactgccgaatacttagtcgcttctacacatggttcttctgcacatgaattatacatctgggaaacgactagtggaacgttggtgagagtcttggaaggggctgaagaggagttgatagatataaattgggacttctatagtatgagtatagtgagtaatggttttgaatctgggaacgtgtatgtgtggtctgttgttattccgccaaagtggagtgctttggcgccagattttgaagaagtagaagagaatgtcgactatttggagaaggaagatgaatttgatgaggtcgatgaggcagaacagcagcaaggattagaacaagaggaagaaatagctatcgatcttagaacgagagagcaatatgatgttagaggtaataacttgcttgtagaaagattcacaatccctacagattatacgaggataattaagatgcagtcttcttga

SEQ ID NO: 143 - DNA, 1866 bp, Saccharomyces cerevisiae
atgagcagtgttcaactttcgaggggcgattttcatagcatcttcaccaataagcaaaggtacgataatcccaccggtggcgtttatcaagtttataacaccaggaaatctgatggggctaacagcaacagaaagaatttgatcatgatttccgatggtatttaccatatgaaggctctgttgagaaaccaagctgcatccaagttccagtcaatggaactacaaaggggtgatatcattcgcgtgataattgcagaacctgctattgtcagggaaagaaagaaatacgttcttttagtagatgactttgagttggtccagtcgcgtgctgatatggtcaaccaaactagtacttttttggataactatttctcagagcatccaaatgaaaccttaaaagacgaagatataactgacagtggtaatgttgccaatcaaacaaacgccagcaatgctggtgtccctgatatgctgcattcaaactcaaacttgaatgcaaatgagagaaaattcgccaatgaaaaccctaattcgcaaaaaaccagaccaatttttgccatcgaacaactgtctccataccaaaacgtttggactatcaaagcaagagtttcctacaagggagaaattaaaacgtggcacaatcaaagaggtgatggtaaactattcaatgtcaacttcttggatacctctggagaaatccgagccacggcgtttaatgattttgctacaaaatttaacgaaattttacaagaaggcaaagtatactatgtatcaaaggcaaaactccaaccagctaagccccaatttactaatctaacacacccttatgaactgaatttggatagagacactgttatagaagaatgtttcgatgaaagtaatgttccgaaaacccatttcaatttcatcaaactagatgctattcagaaccaggaagtaaattccaacgtagacgtcctcggtattatccaaactataaacccacattttgagctaacttcaagggctgggaagaaattcgatcgtcgtgacatcacaattgttgacgactctgggttttctatctctgttggcctatggaatcagcaagcccttgatttcaaccttcctgaaggttctgttgctgccattaaaggtgttcgtgtgacggattttggtggcaaatctttgtctatgggattttctagtaccctgattccgaatccagaaattcctgaggcatatgccttaaagggttggtatgattccaagggccgcaacgcaaacttcatcactttaaagcaagaacccggtatgggtggtcaatcggctgctagcttaacaaaattcattgctcagcgtattactattgctagagctcaagctgaaaatctaggaagaagcgagaaaggtgacttttttagtgttaaagctgctataagtttcttaaaagttgataattttgcatatcctgcctgttctaatgagaattgtaataagaaagttctggaacagcctgatggtacttggagatgtgagaagtgcgacaccaataatgcaaggccaaattggagatacatcttgacaatatcaattattgacgaaaccaatcaactatggctcactttatttgacgaccaagctaaacaattattgggtgttgatgctaatacattaatgtctttgaaggaagaagaccccaacgaattcacaaaaattactcaaagtatccaaatgaacgaatatgactttaggattagagcgcgtgaggatacatacaatgatcaaagcagaattagatataccgttgctaacctacacagcttgaattacagggctgaagccgactatcttgccgatgagttatccaaggctttgttagcttaa

SEQ ID NO: 144 - DNA, 1866 bp, Artificial Sequence
  Description of Artificial Sequence: Synthetic polynucleotide
atgagcagtgttcaactttctaggggcgattttcatagcatcttcaccaataagcaaaggtacgataatcccaccggtggcgtttatcaagtttataacaccaggaaatctgatggggctaacagcaacagaaagaatttgatcatgatttccgatggtatttaccatatgaaggctttattgagaaaccaagctgcatccaagttccagtccatggaattacaaaggggtgatatcattcgcgtgataattgcagaacctgctattgtcagggaaagaaagaaatacgttcttttagtagatgactttgagttggtccagtctcgtgctgatatggtcaaccaaactagtacttttttggataactatttcagtgagcatccaaatgaaaccttaaaagacgaagatataactgacagtggtaatgttgccaatcaaacaaacgccagcaatgctggtgtccctgatatgttgcattccaactccaacttgaatgcaaatgagagaaaattcgccaatgaaaaccctaattctcaaaaaaccagaccaatttttgccatcgaacaattatctccataccaaaacgtttggactatcaaagcaagagtttcctacaagggagaaattaaaacgtggcacaatcaaagaggtgatggtaaattattcaatgtcaacttcttggatacctctggagaaatcagagccacggcgtttaatgattttgctacaaaatttaacgaaattttacaagaaggcaaagtatactatgtatccaaggcaaaactccaaccagctaagccccaatttactaatttgacacacccttatgaattgaatttggatagagacactgttatagaagaatgtttcgatgaaagtaatgttccgaaaacccatttcaatttcatcaaattggatgctattcagaaccaggaagtaaattccaacgtagacgtcctcggtattatccaaactataaacccacattttgagttaacttctagggctgggaagaaattcgatcgtcgtgacatcacaattgttgacgactctgggttttctatctctgttggcttatggaatcagcaagcccttgatttcaaccttcctgaaggttctgttgctgccattaaaggtgttcgtgtgacggattttggtggcaaatctttgtctatgggattttctagtaccttgattccgaatccagaaattcctgaggcatatgccttaaagggttggtatgattccaagggccgcaacgcaaacttcatcactttaaagcaagaacccggtatgggtggtcaatctgctgctagcttaacaaaattcattgctcagcgtattactattgctagagctcaagctgaaaatttaggaagaagcgagaaaggtgacttttttagtgttaaagctgctataagtttcttaaaagttgataattttgcatatcctgcctgttctaatgagaattgtaataagaaagttttggaacagcctgatggtacttggagatgtgagaagtgcgacaccaataatgcaaggccaaattggagatacatcttgacaatatctattattgacgaaaccaatcaattatggctcactttatttgacgaccaagctaaacaattattgggtgttgatgctaatacattaatgtctttgaaggaagaagaccccaacgaattcacaaaaattactcaaagtatccaaatgaacgaatatgactttaggattagagcgcgtgaggatacatacaatgatcaaagcagaattagatataccgttgctaacttgcacagcttgaattacagggctgaagccgactatcttgccgatgagttatccaaggctttgttagcttga

SEQ ID NO: 145 - DNA, 828 bp, Saccharomyces cerevisiae
atgccaccgctagtatttgacatagatcacatcaaacttctaaggaaatggggtatttgtggtgtgttatctggaactttgcctactgcagcacagcaaaatgtatttttgtcggtacctttgaggcttatgttagaagatgtgctgtggctgcatttgaacaatcttgccgatgtgaaattaataagacaagagggagatgagattatggagggaataacattagagcggggcgccaaactatctaaaattgtcaacgatcgtttgaacaagtcatttgaatatcagagaaagttcaaaaaggatgaacacattgcaaaattaaagaaaatcggtagaatcaatgataaaaccacagctgaagaattgcaacggcttgataaatctagcaataatgaccagctaattgaatcttctttgttcattgacattgctaatacctctatgattttaagagacatacggagtgattcagacagcttatcccgcgatgatatcagtgatttgttatttaagcagtacagacaggcaggaaaaatgcagacctatttcttatacaaggcattgagagatcaagggtacgttttgtccccaggtggacgttttggtgggaagtttatagcataccctggtgatcctcttcgtttccattcacatctgacgatacaagatgcgattgattatcataatgagccgattgacctaatatccatgataagtggtgcaagactaggaacgactgtgaaaaaactttgggtcataggcggtgttgcggaagagacaaaggaaactcatttcttctcaatagaatgggctggatttggttaa

SEQ ID NO: 146 - DNA, 828 bp, Artificial Sequence
  Description of Artificial Sequence: Synthetic polynucleotide
atgccaccgttagtatttgacatagatcacatcaaacttttgaggaaatggggtatttgtggtgtgttatctggaactttgcctactgcagcacagcaaaatgtatttttgagtgtacctttgaggcttatgttagaagatgtgttgtggttacatttgaacaatcttgccgatgtgaaattaataagacaagagggagatgagattatggagggaataacattagagagaggcgccaaattatctaaaattgtcaacgatcgtttgaacaagagctttgaatatcagagaaagttcaaaaaggatgaacacattgcaaaattaaagaaaatcggtagaatcaatgataaaaccacagctgaagaattgcaaaggcttgataaatctagcaataatgaccagttgattgaatcttctttgttcattgacattgctaatacctctatgattttaagagacataagaagtgattctgacagcttatcccgcgatgatatcagtgatttgttatttaagcagtacagacaggcaggaaaaatgcagacctatttcttatacaaggcattgagagatcaagggtacgttttgtccccaggtggacgttttggtgggaagtttatagcataccctggtgatcctcttcgtttccattctcatttaacgatacaagatgcgattgattatcataatgagccgattgacttgatatccatgataagtggtgcaagattaggaacgactgtgaaaaaactttgggtcataggcggtgttgcggaagagacaaaggaaactcatttcttctctatagaatgggctggatttggttga

SEQ ID NO: 147 - DNA, 2130 bp, Saccharomyces cerevisiae
atgagtaataaggaagagcatgttgatgagacttccgcaagtggtgtcaaggaggttagttctatagctgctagacatgacaatggttacgcgccttcgctaatcacgtcgacgtcgggcatggactcctttcaatcgcacgcgctactgaatgatccaaccctaatagaggattattcagatatcattaataataggcctacaagtggaagtaaacttactttaggaaacgaggattcggagagtatgggcggaagtgttgtggtgactccgacttcgaataagagttcgcccttcaattcgaaacttaatatactgagtaatgcggcagaaaagggccatgatgttctgcgaaatagagatgatgacaaagagttagaggaggagaacgtggaaaaacatatgcatagcaacagtaaaagggatcagcgacattacaaagaaaattcttcggaattgcccgactcatatgattattcggattctgaatttgaggacaatttggaaagaaggctacaagagatcgaaactgattccgtggatagcgccgataaggatgaggtgcatttttcagtgaataatacaatgaaccctgacgttgacgattttagtgatggcttgaaatacgccatctcggaggacgaggatgaagaggaaaactactctgatgacgatgactttgacagaaaatttcaagattcagggtttcaaggggagaaagacgatttggaggaggaaaacgacgattaccaacccttatcgccgccaagagaactggaccctgataaactatatgctttatatgcgttcaatggccatgattcttcacattgtcaattagggcaagacgaaccttgtatacttttgaatgaccaggatgcctattggtggctggttaagaggatcactgatggtaaaatcgggtttgcgccagcggaaattctagaaacctttccagaaagactagctcgattgaattgctggaaaaatgaaaacatgtcttctcaatcggttgcttcctccgattcgaaagatgattccatcagctctggtaacaagaatcaaagtgatgcagagagtataattccgacacctgcactgaatggatatggtaaggggaacaaatctgttagtttcaatgatgttgtcggttatgcagacaggtttatagatgatgcaattgaagatacctcgttagatagtaacgatgatggcggtgaaggcaatggacagtcgtacgacgatgatgttgataacgacaaggaaacaaaagtaacgcaccgggacgaatacactgaagcgaagttaaattttggcaaattccaggatgatgatacgagcgatgtagtgagcgacgtctcctttagtacatctttgaatacaccactaaatgtgaaaaaagttcggagacaagacaacaaaaacgaaagtgagcctaagacatcatcgagtaaagacagagaagatgattataatgcaaatcggtatgtggggcaagaaaagtctgaaccggttgacagtgattacgataccgatctgaaaaaagtatttgaagcgcctcgtatgccatttgcgaatggtatggcaaaatcagactctcaaaattccctttcaacaattggcgagttttcaccgtcgtcgtcagaatggacaaacgaatcaccatccactccaatagttgaagaaagcagcagtattccatcatctagagcaataaaggacatttcacaatatattcatgcaaaatcgaaaattgaagagacaacaaacgtggaaaacacagaggggcaaattcaagccagcttggggtctagtggaggaatggcaaatcaaactgacgcagaacaacctaaagaggagctagaaaaacatcacagtacccccgaagaagaaaagcaatcaaccttatcgttacactcatcatctgaagaagatttttatatggatgaacaaagggcggtatcatcagcaagcataaatagttcactttccggatcaagggcattgtctaataccaatatgtccgatccggcttcgaagcccaattctttggttcaacatctctatgctccagtttttgacagaatggatgtgttgatgaaacaattggatgaaattattcgtaaatga

SEQ ID NO: 148 - DNA, 2130 bp, Artificial Sequence
  Description of Artificial Sequence: Synthetic polynucleotide
atgagtaataaggaagagcatgttgatgagacttccgcaagtggtgtcaaggaggttagttctatagctgctagacatgacaatggttacgcgccttctttgatcacgtccacgtctggcatggactcctttcaatctcacgcgttattgaatgatccaaccttaatagaggattattctgatatcattaataataggcctacaagtggaagtaaacttactttaggaaacgaggattctgagagtatgggcggaagtgttgtggtgactccgacttccaataagagttctcccttcaattctaaacttaatatattgagtaatgcggcagaaaagggccatgatgttttaagaaatagagatgatgacaaagagttagaggaggagaacgtggaaaaacatatgcatagcaacagtaaaagggatcagaggcattacaaagaaaattcttctgaattgcccgactcttatgattattctgattctgaatttgaggacaatttggaaagaaggttacaagagatcgaaactgattccgtggatagcgccgataaggatgaggtgcatttttctgtgaataatacaatgaaccctgacgttgacgattttagtgatggcttgaaatacgccatctctgaggacgaggatgaagaggaaaactactctgatgacgatgactttgacagaaaatttcaagattctgggtttcaaggggagaaagacgatttggaggaggaaaacgacgattaccaacccttatctccgccaagagaattagaccctgataaactttatgctttatatgcgttcaatggccatgattcttctcattgtcaattagggcaagacgaaccttgtatacttttgaatgaccaggatgcctattggtggttagttaagaggatcactgatggtaaaatcgggtttgcgccagcggaaattttggaaacctttccagaaagattggctagattgaattgctggaaaaatgaaaacatgtcttctcaatctgttgcttcctccgattctaaagatgattccatcagctctggtaacaagaatcaaagtgatgcagagagtataattccgacacctgcattgaatggatatggtaaggggaacaaatctgttagtttcaatgatgttgtcggttatgcagacaggtttatagatgatgcaattgaagataccagtttagatagtaacgatgatggcggtgaaggcaatggacagtcttacgacgatgatgttgataacgacaaggaaacaaaagtaacgcacagagacgaatacactgaagcgaagttaaattttggcaaattccaggatgatgatacgagcgatgtagtgagcgacgtctcctttagtacatctttgaatacaccattgaatgtgaaaaaagttagaagacaagacaacaaaaacgaaagtgagcctaagacatcttccagtaaagacagagaagatgattataatgcaaatagatatgtggggcaagaaaagtctgaaccggttgacagtgattacgataccgatttgaaaaaagtatttgaagcgcctcgtatgccatttgcgaatggtatggcaaaaagtgactctcaaaattccctttctacaattggcgagttttctccgtcttcttctgaatggacaaacgaatctccatccactccaatagttgaagaaagcagcagtattccatcttctagagcaataaaggacatttctcaatatattcatgcaaaatctaaaattgaagagacaacaaacgtggaaaacacagaggggcaaattcaagccagcttggggtctagtggaggaatggcaaatcaaactgacgcagaacaacctaaagaggagttagaaaaacatcacagtacccccgaagaagaaaagcaatccaccttatctttacactcttcttctgaagaagatttttatatggatgaacaaagggcggtatcttctgcaagcataaatagttctctttccggatctagggcattgtctaataccaatatgtccgatccggcttccaagcccaattctttggttcaacatctctatgctccagtttttgacagaatggatgtgttgatgaaacaattggatgaaattattcgtaaatga

SEQ ID NO: 149 - DNA, 921 bp, Saccharomyces cerevisiae
atgtcaattacgaagactgaactggacggtatattgccattggtggccagaggtaaagttagagacatatatgaggtagacgctggtacgttgctgtttgttgctacggatcgtatctctgcatatgacgttattatggaaaacagcattcctgaaaaggggatcctattgaccaaactgtcagagttctggttcaagttcctgtccaacgatgttcgtaatcatttggtcgacatcgccccaggtaagactattttcgattatctacctgcaaaattgagcgaaccaaagtacaaaacgcaactagaagaccgctctctattggttcacaaacataaactaattccattggaagtaattgtcagaggctacatcaccggatctgcttggaaagagtacgtaaaaacaggtactgtgcatggtttgaaacaacctcaaggacttaaagaatctcaagagttcccagaaccaatcttcaccccatcgaccaaggctgaacaaggtgaacatgacgaaaacatctctcctgcccaggccgctgagctggtgggtgaagatttgtcacgtagagtggcagaactggctgtaaaactgtactccaagtgcaaagattatgctaaggagaagggcatcatcatcgcagacactaaattcgaattcggtattgacgaaaagaccaatgaaattattctagtggacgaggtgctaacgccagactcctctagattctggaacggtgcctcttataaggtaggagaatcccaagattcttacgataagcaatttttaagagactggcttactgctaataagttgaacggtgttaacggcgtcaaaatgccccaagacattgtcgacaggacaagggccaaatatatagaggcttatgaaacattgacagggtctaaatggtctcactaa

SEQ ID NO: 150 - DNA, 921 bp, Artificial Sequence
  Description of Artificial Sequence: Synthetic polynucleotide
atgtctattacgaagactgaattagacggtatattgccattggtggccagaggtaaagttagagacatatatgaggtagacgctggtacgttgttatttgttgctacggatcgtatctctgcatatgacgttattatggaaaacagcattcctgaaaaggggatcttgttgaccaaattatctgagttctggttcaagttcttatccaacgatgttcgtaatcatttggtcgacatcgccccaggtaagactattttcgattatttacctgcaaaattgagcgaaccaaagtacaaaacgcaattggaagaccgctctttgttggttcacaaacataaattgattccattggaagtaattgtcagaggctacatcaccggatctgcttggaaagagtacgtaaaaacaggtactgtgcatggtttgaaacaacctcaaggacttaaagaatctcaagagttcccagaaccaatcttcaccccatctaccaaggctgaacaaggtgaacatgacgaaaacatctctcctgcccaggccgctgagttggtgggtgaagatttgtctcgtagagtggcagaattggctgtaaaactttactccaagtgcaaagattatgctaaggagaagggcatcatcatcgcagacactaaattcgaattcggtattgacgaaaagaccaatgaaattattttggtggacgaggtgttaacgccagactcctctagattctggaacggtgcctcttataaggtaggagaatcccaagattcttacgataagcaatttttaagagactggcttactgctaataagttgaacggtgttaacggcgtcaaaatgccccaagacattgtcgacaggacaagggccaaatatatagaggcttatgaaacattgacagggtctaaatggtctcactga

SEQ ID NO: 151 - DNA, 1308 bp, Saccharomyces cerevisiae
atgcatagacgacagtttttccaagaataccgtagtcctcagcagcagcagggacacccaccaaggtcagaataccaagttctcgaagaaattgggagaggttcatttgggtctgtacgaaaagtcatccatatacctaccaagaaacttttggttagaaaggatatcaaatatggccatatgaatagcaaagagagacaacagctgatcgctgaatgtagcattctatcgcagttgaagcatgaaaatattgtagaattttataactgggacttcgatgaacaaaaagaagtgttatacctttatatggaatattgttccaggggtgatttatcccagatgattaagcactacaaacaggagcataaatatataccagaaaaaattgtgtggggtatcctggcccaattattgactgcgctctataaatgtcattatggtgttgaattgccaactttgaccacaatatatgaccggatgaaaccaccggtaaaaggcaaaaacatcgttatccatcgtgatctgaaaccaggaaatatattcttaagctatgatgatagcgattacaatattaatgaacaagtagacggtcacgaggaagtgaatagtaattattacagagaccatagagtgaattcagggaaaagggggagccctatggactatagtcaagttgtggtaaagttaggtgattttgggttagccaaatctctggaaactagtattcaatttgccacaacatacgtcggtacaccatattacatgtcgcctgaagtgttgatggaccaaccatactccccactatccgacatctggtcactaggttgtgttatttttgagatgtgttcgttgcaccccccatttcaggcaaaaaattatctcgagctacaaactaagattaaaaacgggaaatgtgacaccgtccctgagtattactctagagggcttaatgccataatacattcaatgatagatgtgaacttaagaaccaggccttccacttttgaattactgcaagatattcagatacgaactgcaagaaagtcgttgcaattagagagatttgaaaggaagttactggactatgaaaatgagctgacaaacattgaaaaaatcctcgagaagcaagctattgaatacgaaagagaactgagtcagttgaaggaacaatttacccaggcagtggaggagcgagccagggaagtaattagcggtaagaaagttggtaaggttccagaatctataaacggatattatggtaaaaaatttgccaaacctgcataccactggcaaacaagatatcgataa

SEQ ID NO: 152 - DNA, 1308 bp, Artificial Sequence
  Description of Artificial Sequence: Synthetic polynucleotide
atgcatagaagacagtttttccaagaataccgtagtcctcagcagcagcagggacacccaccaaggtctgaataccaagttctcgaagaaattgggagaggttcttttgggtctgtaagaaaagtcatccatatacctaccaagaaacttttggttagaaaggatatcaaatatggccatatgaatagcaaagagagacaacagttaatcgctgaatgtagcattttatctcagttgaagcatgaaaatattgtagaattttataactgggacttcgatgaacaaaaagaagtgttatacctttatatggaatattgttccaggggtgatttatcccagatgattaagcactacaaacaggagcataaatatataccagaaaaaattgtgtggggtatcttggcccaattattgactgcgctctataaatgtcattatggtgttgaattgccaactttgaccacaatatatgacagaatgaaaccaccggtaaaaggcaaaaacatcgttatccatcgtgatttgaaaccaggaaatatattcttaagctatgatgatagcgattacaatattaatgaacaagtagacggtcacgaggaagtgaatagtaattattacagagaccatagagtgaatagtgggaaaagggggagccctatggactatagtcaagttgtggtaaagttaggtgattttgggttagccaaatctttggaaactagtattcaatttgccacaacatacgtcggtacaccatattacatgtctcctgaagtgttgatggaccaaccatactccccattgtccgacatctggtctttgggttgtgttatttttgagatgtgttctttgcaccccccatttcaggcaaaaaattatctcgagttacaaactaagattaaaaacgggaaatgtgacaccgtccctgagtattactctagagggcttaatgccataatacattctatgatagatgtgaacttaagaaccaggccttccacttttgaattattacaagatattcagataagaactgcaagaaagtctttgcaattagagagatttgaaaggaagttattagactatgaaaatgagttgacaaacattgaaaaaatcctcgagaagcaagctattgaatacgaaagagaattaagtcagttgaaggaacaatttacccaggcagtggaggagagagccagggaagtaattagcggtaagaaagttggtaaggttccagaatctataaacggatattatggtaaaaaatttgccaaacctgcataccactggcaaacaagatatcgttga

SEQ ID NO: 153 - DNA, 2925 bp, Saccharomyces cerevisiae
atgaacagtatggccgataccgatagagtcaacttgactcccatccagagggcatctgagaaatccgtgcaataccacttgaagcaggtcattgggaggggttcttacggggtagtttacaaagccattaataaacatactgaccaagtcgtggcaataaaggaggtcgtgtacgaaaatgatgaggaacttaatgacattatggcagaaattagcttgttaaaaaatttaaaccataacaatattgttaaataccacggcttcatacgaaaaagctatgaattgtatatcctcctcgaatactgcgctaatggttctttgaggaggctcatttcaaggagctctaccggattaagtgaaaatgaatcgaaaacctatgtgacacagacactattggggctgaaatatttacacggtgaaggagtcatccacagggacatcaaggcggctaacatcctgctgagtgctgataacactgtcaaacttgctgattttggcgtttccactattgtgaactccagcgccttaacgctagcgggcacactcaattggatggctccagagatcctgggcaacaggggagcttctacgctcagcgacatttggtctctaggtgccactgtagttgaaatgctcacaaagaatccaccctaccacaatttgacagacgccaatatctactacgctgttgaaaatgatacctactacccacctagctctttctctgagccactaaaggatttcttatctaaatgctttgtgaaaaacatgtacaagaggccgacagccgaccagttactcaagcatgtgtggatcaactctaccgaaaatgtgaaggtcgacaagctcaacaagttcaaggaggactttaccgacgctgattatcattgggatgccgattttcaagaagagaaactaaatatatcaccctctaaattcagtcttgcagcggctcccgctgcctgggcagaaaacaatcaagaactagatttaatgccccccactgaaagtcaattgctgagccaattgaagagttcatctaagcctttgacggacttgcatgtgcttttcagtgtttgctccctcgagaacatcgctgatacaattatcgagtgtctgtcgcgcacaactgttgataaacgattaataactgcatttggctccatttttgtttacgatacccagcataaccactctaggttgcgactgaaattcatcgctatgggaggaattccactgatcattaaattcgaacatttagccaaagagttcgtcatcgactaccctcagactttaattgaatgtggaataatgtatcctccgaattttgcatcgctgaaaaccccaaagtatattttagaactcgtctataggttctacgatttaacatccacagccttctggtgtcgctggtgtttcaaacacctcgatatatcactccttctgaataacatccatgaaagaagagcccaatccatactactaaagctatcgtcatatgcaccatggtcttttgagaaaattttgccctctttaattgactctaagctaaaaaagaaaattttaatcagtcctcaaattacttacgtagtcttcaaatcaataaactatatgataaccacgaatgacgataaaatacacaagtccgctattccttcttcttcctctctaccgttatcctcctcacccacgaggaactcaccagtgaattcggtacagtctccatcaaggtcccctgttcattctttgatggcaacgcgtccctcttctccaatgcgacacaagagcatttcaaactttccccatctgaccatatcttcaaaatcaagactactaattgaattaccggagggtttctttacctggctaacatctttttttgttgacatggcccaaatcaaagatttatctgttttaaagtacttcaccaagctttgttaccttacagtacatataaacagcacttttttaaatgatctgcttgacaacgatgctttttttgcttttatccggaatattgataccatcattccctttatcgacgacgcaaagacagcagctttcatttggaaacaaatcactgctatatgcgttgaaatgagtttggatatggaccaaatgagtgcttctttattttctacagctatgaatttcatcagaaaaaagaataacacctccataagtggactggagatcatactgaactgcttgcattttacgttacgcaatgtaaatgatgatgtggctcctacagtgggctcatcagagtctcatagtgttttcctcataaaggtcaacaatgacgctgctattgaattaccgattgatcaattagttgacctgttttatgcattgaatgacgatgacgttaacctcagtaaactaattagcattttcacgaagatatgctcattgcccggttttgaaaaccttacaattaatatcatatttcacccgaacttttatgaaaagattgtttctttctttgatacctatttcaacagtttacttattcaaatcgatctattgaaattcataaagctaatattctcaaaatcgttattgaagctatatgactacacaggacagccggatcctataaagcaaaccgaaccaaatcgtcgtaataaggccactgttttcaaacttcgtgccattttagtacaaataacggagtttttaaacaacaactggaacaaggatgtcccaaaaaggaattcaaatcaagttgggggggactcagttttgatctgtcagctatgtgaggatatccgttcattatcaaaaaaaggaagcctgcaaaaagtttcaagcgtcactgcagcaattggtagttctccaacaaaagatgagcgtagtaatttgcgatcctccaaagataaaagtgacggcttttccgtccccattacaacatttcaaacataa

SEQ ID NO: 154 - DNA, 2925 bp, Artificial Sequence
  Description of Artificial Sequence: Synthetic polynucleotide
atgaacagtatggccgataccgatagagtcaacttgactcccatccagagggcatctgagaaatccgtgcaataccacttgaagcaggtcattgggaggggttcttacggggtagtttacaaagccattaataaacatactgaccaagtcgtggcaataaaggaggtcgtgtacgaaaatgatgaggaacttaatgacattatggcagaaattagcttgttaaaaaatttaaaccataacaatattgttaaataccacggcttcataagaaaaagctatgaattgtatatcctcctcgaatactgcgctaatggttctttgaggaggctcatttctaggagctctaccggattaagtgaaaatgaaagtaaaacctatgtgacacagacattattggggttgaaatatttacacggtgaaggagtcatccacagggacatcaaggcggctaacatcttattaagtgctgataacactgtcaaacttgctgattttggcgtttccactattgtgaactccagcgccttaacgttggcgggcacactcaattggatggctccagagatcttgggcaacaggggagcttctacgctcagcgacatttggtctttgggtgccactgtagttgaaatgctcacaaagaatccaccctaccacaatttgacagacgccaatatctactacgctgttgaaaatgatacctactacccacctagctctttctctgagccattgaaggatttcttatctaaatgctttgtgaaaaacatgtacaagaggccgacagccgaccagttactcaagcatgtgtggatcaactctaccgaaaatgtgaaggtcgacaagctcaacaagttcaaggaggactttaccgacgctgattatcattgggatgccgattttcaagaagagaaattgaatatatctccctctaaattcagtcttgcagcggctcccgctgcctgggcagaaaacaatcaagaattagatttaatgccccccactgaaagtcaattgttgagccaattgaagagttcttctaagcctttgacggacttgcatgtgcttttcagtgtttgctccctcgagaacatcgctgatacaattatcgagtgtctttcccgcacaactgttgataaaagattaataactgcatttggctccatttttgtttacgatacccagcataaccactctaggttgagattgaaattcatcgctatgggaggaattccattgatcattaaattcgaacatttagccaaagagttcgtcatcgactaccctcagactttaattgaatgtggaataatgtatcctccgaattttgcatctttgaaaaccccaaagtatattttagaactcgtctataggttctacgatttaacatccacagccttctggtgtcgctggtgtttcaaacacctcgatatatctctccttttgaataacatccatgaaagaagagcccaatccatattattgaagctttcttcttatgcaccatggtcttttgagaaaattttgccctctttaattgactctaagttgaaaaagaaaattttaatcagtcctcaaattacttacgtagtcttcaaatctataaactatatgataaccacgaatgacgataaaatacacaagtccgctattccttcttcttcctctttaccgttatcctcctctcccacgaggaactctccagtgaattctgtacagtctccatctaggtcccctgttcattctttgatggcaacgcgtccctcttctccaatgaggcacaagagcatttccaactttccccatttgaccatatcttctaaatctagattattgattgaattaccggagggtttctttacctggttgacatctttttttgttgacatggcccaaatcaaagatttatctgttttaaagtacttcaccaagctttgttaccttacagtacatataaacagcacttttttaaatgatttacttgacaacgatgctttttttgcttttatcagaaatattgataccatcattccctttatcgacgacgcaaagacagcagctttcatttggaaacaaatcactgctatatgcgttgaaatgagtttggatatggaccaaatgagtgcttctttattttctacagctatgaatttcatcagaaaaaagaataacacctccataagtggattggagatcatattaaactgcttgcattttacgttacgcaatgtaaatgatgatgtggctcctacagtgggctcttctgagtctcatagtgttttcctcataaaggtcaacaatgacgctgctattgaattaccgattgatcaattagttgacttattttatgcattgaatgacgatgacgttaacctcagtaaattgattagcattttcacgaagatatgctctttgcccggttttgaaaaccttacaattaatatcatatttcacccgaacttttatgaaaagattgtttctttctttgatacctatttcaacagtttacttattcaaatcgatttattgaaattcataaagttaatattctccaaatctttattgaagctttatgactacacaggacagccggatcctataaagcaaaccgaaccaaatcgtcgtaataaggccactgttttcaaacttcgtgccattttagtacaaataacggagtttttaaacaacaactggaacaaggatgtcccaaaaaggaatagtaatcaagttgggggggactctgttttgatctgtcagttgtgtgaggatatccgttccttatccaaaaaaggaagcttacaaaaagtttccagcgtcactgcagcaattggtagttctccaacaaaagatgagcgtagtaatttgcgttcctccaaagataaaagtgacggcttttccgtccccattacaacatttcaaacatga

SEQ ID NO: 155 - DNA, 168 bp, Saccharomyces cerevisiae
atggtcaaattaacttcaatcgctgccggtgtcgccgccattgctgctggtgcctccgccgcagcaaccactacattatctcaatctgacgaaagagttaatttggttgaattaggtgtttatgtttccgatatcagagctcatttggctgaatactactctttctaa

SEQ ID NO: 156 - DNA, 168 bp, Artificial Sequence
  Description of Artificial Sequence: Synthetic polynucleotide
atggtcaaattaacttctatcgctgccggtgtcgccgccattgctgctggtgcctccgccgcagcaaccactacattatctcaatctgacgaaagagttaatttggttgaattaggtgtttatgtttccgatatcagagctcatttggctgaatactactctttctga

SEQ ID NO: 157 - DNA, 540 bp, Saccharomyces cerevisiae
atgatcaatttcctcctttttgtcttgacgattttggcgactttaacaaacatttggttttctggtgttctctcccctgccatggtgatccggatatgtttaggtggctctatggtagtccttcagatatggtcattcagtagaccaataagtaatgaaacattccgtacaaaacttctactagaggtaataactcatagaccatcgatagctgggaaagaatggaaaaccataacgtataacatgaatcaatatttgttcaaggctggcttatggaaaacaccataccactttttttgtgaacaccagtgctatgaatttttcaaggatctcataaagggaaaatatcctgatgtacagtgggatacagcgaatacacagccgttcatcagtgttccagaaaatcaggctgcaactcaaaattctgatgttgaaccaaccgtaaagtggtgcctctttaaagcagccgaaattcaagcccatgctgtgcgggaatattggcaaagtcaatatccagatgtgggcatacctgcaatatga

SEQ ID NO: 158 - DNA, 540 bp, Artificial Sequence
  Description of Artificial Sequence: Synthetic polynucleotide
atgatcaatttcctcctttttgtcttgacgattttggcgactttaacaaacatttggttttctggtgttctctcccctgccatggtgatcagaatatgtttaggtggctctatggtagtccttcagatatggagtttcagtagaccaataagtaatgaaacattccgtacaaaacttttattggaggtaataactcatagaccaagtatagctgggaaagaatggaaaaccataacgtataacatgaatcaatatttgttcaaggctggcttatggaaaacaccataccactttttttgtgaacaccagtgctatgaatttttcaaggatctcataaagggaaaatatcctgatgtacagtgggatacagcgaatacacagccgttcatcagtgttccagaaaatcaggctgcaactcaaaattctgatgttgaaccaaccgtaaagtggtgcctctttaaagcagccgaaattcaagcccatgctgtgagagaatattggcaaagtcaatatccagatgtgggcatacctgcaatatga

SEQ ID NO: 159 - DNA, 708 bp, Saccharomyces cerevisiae
atgcaaaccccttcagaaaataccgacgtcaagttggatactctcgacgaacccagtgcacatttaatcgaggaaaatgtggctcttccagaggatacattcaattcgtactggagttatatacttaatgaaatcgctcgttgtaaaccgctaatgattatgttcctaatacctgtgtgtttggttttattgattacgttttttcatgatatcaaaggtatccttgtgtttttagtgatttctcttatcctctctattatcattttattgatcggtataactgccttcgtgtctgagaccttgaataagggtttcataattaagcttttagtagaagtcattacacgtaaaccagcagtaggggggaaggaatggagaataatcgcatataatatgaaccagtatctgtttgaccatgggatatggcatactccgtattactttttttgtgaacataggtgccataaatttttcaaaagccttatcaaacagacaaggtcgaatgcacatttgagttcaccaacgaacggtgcagagaatacgcagtcaaacacaccagcaaaagaggtttcaaatgagatggtaaaaccttatatctttagttctgatccagttttagaagcttaccttattaaagctgcggaaattcacaaagaagctgaatttgagtattggagaaagcaatacccagaggttgatttgccttag

SEQ ID NO: 160 - DNA, 708 bp, Artificial Sequence
  Description of Artificial Sequence: Synthetic polynucleotide
atgcaaaccccttctgaaaataccgacgtcaagttggatactctcgacgaacccagtgcacatttaatcgaggaaaatgtggctcttccagaggatacattcaattcttactggagttatatacttaatgaaatcgctcgttgtaaaccgttaatgattatgttcttgatacctgtgtgtttggttttattgattacgttttttcatgatatcaaaggtatccttgtgtttttagtgatttctcttatcctctctattatcattttattgatcggtataactgccttcgtgtctgagaccttgaataagggtttcataattaagcttttagtagaagtcattacacgtaaaccagcagtaggggggaaggaatggagaataatcgcatataatatgaaccagtatttatttgaccatgggatatggcatactccgtattactttttttgtgaacataggtgccataaatttttcaaaagccttatcaaacagacaaggtctaatgcacatttgagttctccaacgaacggtgcagagaatacgcagtccaacacaccagcaaaagaggtttctaatgagatggtaaaaccttatatctttagttctgatccagttttagaagcttaccttattaaagctgcggaaattcacaaagaagctgaatttgagtattggagaaagcaatacccagaggttgatttgccttga

SEQ ID NO: 161 - DNA, 705 bp, Saccharomyces cerevisiae
atgcaaacaccttcagaaaataccgacgtaaagatggatactctcgacgaacccagtgcacatttaatcgaagagaatgtagctcttcccgaagacacattcagttcacatctgagttatgtactttatgaaattgctcattgtaaaccgatcatgtttatgatcatcataatcgtgagtttgatctcattgattgtgctttttcatgataacgacgggtgcactgtgatcttagtgatgtcccttatagtagcctccatggctttaatggtggttgcagcattcacattcgggaaagcgatcactgaacaggagttcatgataaagcttttagtggaggtgatcgcacgcaagcctgcggggaaggaatggggtactgtcgcatataatatgaaccaatatctattcatgaagagactatggtataccccgtactatttctatagcggcaagaagtgccatgagttcttcaccactcttatcaaggaagtgaattctggttcgcactcggattcctcatcgaatagtgccgaggatacacaatcacctgtctcagcagggaagacttcaaatggtctaaacaacttttatagtattagatcagaccctattttgatggcatatgttttgaaggcaacacaaatagaaaaggaggctcaaagtgaatactggagaaagcaatatcctgacgctgatttaccttga

SEQ ID NO: 162 - DNA, 705 bp, Artificial Sequence
  Description of Artificial Sequence: Synthetic polynucleotide
atgcaaacaccttctgaaaataccgacgtaaagatggatactctcgacgaacccagtgcacatttaatcgaagagaatgtagctcttcccgaagacacattcagttctcatttgagttatgtactttatgaaattgctcattgtaaaccgatcatgtttatgatcatcataatcgtgagtttgatctctttgattgtgctttttcatgataacgacgggtgcactgtgatcttagtgatgtcccttatagtagcctccatggctttaatggtggttgcagcattcacattcgggaaagcgatcactgaacaggagttcatgataaagcttttagtggaggtgatcgcacgcaagcctgcggggaaggaatggggtactgtcgcatataatatgaaccaatatcttttcatgaagagattatggtataccccgtactatttctatagcggcaagaagtgccatgagttcttcaccactcttatcaaggaagtgaattctggttctcacagtgattcctcttccaatagtgccgaggatacacaaagtcctgtctctgcagggaagacttccaatggtttgaacaacttttatagtattagaagtgaccctattttgatggcatatgttttgaaggcaacacaaatagaaaaggaggctcaaagtgaatactggagaaagcaatatcctgacgctgatttaccttga

SEQ ID NO: 163 - DNA, 225 bp, Saccharomyces cerevisiae
atgaataaatatctatttgaccataaaatatggagtactccttactacttttattgcgaagaagattgccaccgtctttttctaagttttattgagggaagaactttcgagaagccaacaagcaacgctgaggaaaatgtacaggagactgaagctggcgaatctttcacattaaatcccggagaagattttcaaaattgctttccaagacagcggatattgtag

SEQ ID NO: 164 - DNA, 225 bp, Artificial Sequence
  Description of Artificial Sequence: Synthetic polynucleotide
atgaataaatatttatttgaccataaaatatggagtactccttactacttttattgcgaagaagattgccaccgtctttttttgagttttattgagggaagaactttcgagaagccaacaagcaacgctgaggaaaatgtacaggagactgaagctggcgaatctttcacattaaatcccggagaagattttcaaaattgctttccaagacagaggatattgtga

SEQ ID NO: 165 - DNA, 897 bp, Saccharomyces cerevisiae
atgtcgcctcaataccatttttattttgtatcattccggaacttagtattgaatgaaaaatgcctccgaagtaaaaagcaggtgatgaaaagtttcaattggtataagacagatcgctattttgatccgcataacatccttcaacaccatagcagagctatagagaagacaagatataaactgggcatgcaaacatcttcagaaagtaccgacgccaagtcggattttctcgacgaacccagtgcatatttaattgagaaaaatgtggctcttcccaaggacatattcggttcgtacttaagttattggatatatgaagttactcgtcataaagcggcagtaattttgctcgtacttattgtgacttcaattttattattagtgtttttttataatacggaattttgcgttgcctttgagatactattgttttccttttgctttccaggaacatgcatggttgtaattgcatttagtgaaccgatcggtgatcgggaatttaaagttaagcttctgatggaaattatcacacgtaaaccggcggtaaaggggaaagaatggaggacaattacatacaagatgaaccagtatttatttgatcatgggctatgggatactccctactacttttaccgtgatgaagattgccaccgttattttctaagtcttattaagggaagaactttcaagaagcaaaaggaatcgtcagccagcaatgttaaagacgcacaatcaaatgacgaaaccgctggcacaccaaacgaagccgctgagtcttctagttttagtgccggaccgaactttataaagctcctcaccaaggcagccgaaatcgaacaacaatttcaaaaggaatattggcgacaagagtatcctggtgtcgatgagtttttttag

SEQ ID NO: 166 - DNA, 897 bp, Artificial Sequence
  Description of Artificial Sequence: Synthetic polynucleotide
atgtctcctcaataccatttttattttgtatctttcagaaacttagtattgaatgaaaaatgcctcagaagtaaaaagcaggtgatgaaaagtttcaattggtataagacagatcgctattttgatccgcataacatccttcaacaccatagcagagctatagagaagacaagatataaattgggcatgcaaacatcttctgaaagtaccgacgccaagagtgattttctcgacgaacccagtgcatatttaattgagaaaaatgtggctcttcccaaggacatattcggttcttacttaagttattggatatatgaagttactcgtcataaagcggcagtaattttgctcgtacttattgtgacttctattttattattagtgtttttttataatacggaattttgcgttgcctttgagatattattgttttccttttgctttccaggaacatgcatggttgtaattgcatttagtgaaccgatcggtgatagagaatttaaagttaagcttttgatggaaattatcacacgtaaaccggcggtaaaggggaaagaatggaggacaattacatacaagatgaaccagtatttatttgatcatgggttgtgggatactccctactacttttaccgtgatgaagattgccaccgttattttttgagtcttattaagggaagaactttcaagaagcaaaaggaatcttctgccagcaatgttaaagacgcacaaagcaatgacgaaaccgctggcacaccaaacgaagccgctgagtcttctagttttagtgccggaccgaactttataaagctcctcaccaaggcagccgaaatcgaacaacaatttcaaaaggaatattggagacaagagtatcctggtgtcgatgagtttttttga

SEQ ID NO: 167 - DNA, 705 bp, Saccharomyces cerevisiae
atgcagacccctccagaaagtaccgacgtcaagttagatacacttaacgaacctagtgcacatttaattgagaaaaatgtggctcttcctaaggacatattccgttcgtacttgagttattggatctatgaaatcgctcgctatacaccagtcatgattttgtccctggtaataggggttttggttttattaattatattttttaatgacaacgaagcttgtgttttcaattctgcaatatttgcttttacttctcttgtaggtttgttaataatattaagtgatggtaatccaaagctagtcagtcgtcgaaattttaggaccgagcttttagtggatgtcatcacacgtaaaccggcggtagaagggaaagaatggaggatcatcacatacaacatgaaccaatatttgtttaatcatgggcaatggcatactccgtattacttttacagcgatgaggattgctaccgttattttctacgccttgttgagggagtaacccccaagaagcaaacagccacgtcaattggcaattctccggtcaccgctaagcctgaagatgccatcgagtcagcttctcctagttccagactgaattatcaaaactttttgctcaaggcagcggagatcgaacgacaagctcaggaaaattactggcgaaggcggcatcccaatatcgatgcgcttcttaaaaagacggaatag

SEQ ID NO: 168 - DNA, 705 bp, Artificial Sequence
  Description of Artificial Sequence: Synthetic polynucleotide
atgcagacccctccagaaagtaccgacgtcaagttagatacacttaacgaacctagtgcacatttaattgagaaaaatgtggctcttcctaaggacatattccgttcttacttgagttattggatctatgaaatcgctcgctatacaccagtcatgattttgtccttagtaataggggttttggttttattaattatattttttaatgacaacgaagcttgtgttttcaattctgcaatatttgcttttacttctcttgtaggtttgttaataatattaagtgatggtaatccaaagttggtcagtcgtagaaattttaggaccgagcttttagtggatgtcatcacacgtaaaccggcggtagaagggaaagaatggaggatcatcacatacaacatgaaccaatatttgtttaatcatgggcaatggcatactccgtattacttttacagcgatgaggattgctaccgttattttttacgccttgttgagggagtaacccccaagaagcaaacagccacgtccattggcaattctccggtcaccgctaagcctgaagatgccatcgagtctgcttctcctagttccagattgaattatcaaaactttttgctcaaggcagcggagatcgaaagacaagctcaggaaaattactggagaaggagacatcccaatatcgatgcgcttcttaaaaagacggaatga

SEQ ID NO: 169 - DNA, 2064 bp, Saccharomyces cerevisiae
atgccaaacttaaagagactacccatcccgccactgcaggacacgctcaaccgctacctggcacgcgtggaacccctgcaggacgagcgccaaaaccgccgtacgcgccgcactgtgctctccgcagaaaacctggacgcattgaacacgctgcacgagcggctgctagaatacgacgcacggctcgcggaaagcaacccagagtcctcatacatcgagcagttctggtatgacgcgtacttgctatatgatgcaactgtcgttctcaacgtcaacccgtacttccaactgcaggacgacccaaccatcaaagacacaccagagacggcggcacagggcccctatggcgcacacacggtgcaggttcgtcgtgccgcacgactcaccacctctattctcaagttcatccgccagattcgccacggcacactccgcacagacactgtgcgcggcaaaacgccgctgtcgatggaccagtatgagcggctattcggctccagtagaatccctccgggtcccggcgagccctcttgccacttgcaaacagacgccacgtcgcatcacgtggtggcgatgtatcgtggccagttctactggttcgacgtgctggacacacgcaacgagcccatcttcgccaccccagaacaactggagtggaacctctactcgatcatcatggacgcggaatccgccggaagcggatccgcgccctttggcgtgttcaccacagagtcgcgccgggtgtggtccaacatcagggactatctgttccatgcggacgactgcaccaactggcgcaatctcaagctgatcgactccgcgctgttcgtggtctgtctcgacgacgtggcgtttgccgccgatcagcaggacgagctcacgcgttcgatgctgtgcgggacttctaccatcaatctcgacccgcaccaacaccagccgccattgaacgtgcagacaggcacctgtctcaaccgctggtacgacaagttacaactgatcgtgaccaagaacggtaaggcgggcatcaacttcgaacacaccggtgtggacggccacactgtgctgcggctcgccacagacatctacacagactcgatcctgagcttcgcacgcggtgtcaccaagaacgtcgtcgacatctttagcgacgacgatggaaaaccatcgtcgtcgtcgttggcctcggcggctcactccgccaacttgatcaccatccctcgtaaactggaatggcgcactgacaatttcctgcaatcgtcgctgcactttgccgagacgcgcatctcggacttgatctcgcaatacgagtttgttaatcttgacttctccaactacggcgcgtcccatatcaagacagtgttcaagtgctcgccagacgccttcgtgcagcaggtgttccaggtcgcatacttcgcgttgtacggtcgcttcgagaccgtgtacgagcctgccatgaccaaggcgttccaaaacggccgcacagaggccatccgctccgtcacgggccaatcgaagctctttgtcaagtcactactggaccaggatgcctcggacgccaccaaaattcagctcttgcacgacgcctgtacggcgcactcgcaaatcacaagggaatgctcccaggggctcggccaggaccgtcacttgtatgcgctctactgcctctggaaccaatggtacaaggacaagttggagctcccacccatcttccgcgacaagtcctggactaccatgcagaacaacgtcttgagcacctccaactgcggtaacccctgcctcaagagcttcgggttcgggcctgtcaccgccaacggcttcggcatcggctacatcatcagagaccactccgtctctgtggtggtgtcctcaaggcatcgccagactgctcggtttgcgtcgctcatggaaaagtcgctgctggagatcgaccgcatcttcaaacggcagcaagctcgcgcagcaaaacccgctgccaggaccactgctagcgccaacaccaaatcagaagacatgaaatacctgttgtccggctacgattacttcgacgtgagcgtgtccggttga

SEQ ID NO: 170 - DNA, 2064 bp, Artificial Sequence
  Description of Artificial Sequence: Synthetic polynucleotide
atgccaaacttaaagagattacccatcccgccattacaggacacgctcaaccgctacttggcacgcgtggaacccttgcaggacgagcgccaaaaccgccgtacgcgccgcactgtgctctccgcagaaaacttggacgcattgaacacgttgcacgagaggcttttagaatacgacgcaaggctcgcggaaagcaacccagagtcctcttacatcgagcagttctggtatgacgcgtacttgttatatgatgcaactgtcgttctcaacgtcaacccgtacttccaattgcaggacgacccaaccatcaaagacacaccagagacggcggcacagggcccctatggcgcacacacggtgcaggttcgtcgtgccgcaaggctcaccacctctattctcaagttcatccgccagattcgccacggcacactccgcacagacactgtgcgcggcaaaacgccgttatctatggaccagtatgagagattattcggctccagtagaatccctccgggtcccggcgagccctcttgccacttgcaaacagacgccacgagtcatcacgtggtggcgatgtatcgtggccagttctactggttcgacgtgcttgacacacgcaacgagcccatcttcgccaccccagaacaattggagtggaacctctactctatcatcatggacgcggaatccgccggaagcggatccgcgccctttggcgtgttcaccacagagtcccgcagggtgtggtccaacatcagggactatcttttccatgcggacgactgcaccaactggcgcaatctcaagttaatcgactccgcgttattcgtggtctgtctcgacgacgtggcgtttgccgccgatcagcaggacgagctcacgcgttccatgttgtgcgggacttctaccatcaatctcgacccgcaccaacaccagccgccattgaacgtgcagacaggcacctgtctcaaccgctggtacgacaagttacaattgatcgtgaccaagaacggtaaggcgggcatcaacttcgaacacaccggtgtggacggccacactgtgttaagactcgccacagacatctacacagactctatcttaagcttcgcacgcggtgtcaccaagaacgtcgtcgacatctttagcgacgacgatggaaaaccatcttcttcttctttggcctctgcggctcactccgccaacttgatcaccatccctcgtaaattagaatggcgcactgacaatttcttacaatcttctttacactttgccgagacgcgcatcagtgacttgatctctcaatacgagtttgttaatcttgacttctccaactacggcgcgtcccatatcaagacagtgttcaagtgctctccagacgccttcgtgcagcaggtgttccaggtcgcatacttcgcgttgtacggtcgcttcgagaccgtgtacgagcctgccatgaccaaggcgttccaaaacggccgcacagaggccatccgctccgtcacgggccaatccaagctctttgtcaagtctttattagaccaggatgccagtgacgccaccaaaattcagctcttgcacgacgcctgtacggcgcactctcaaatcacaagggaatgctcccaggggctcggccaggaccgtcacttgtatgcgctctactgcctctggaaccaatggtacaaggacaagttggagctcccacccatcttccgcgacaagtcctggactaccatgcagaacaacgtcttgagcacctccaactgcggtaacccctgcctcaagagcttcgggttcgggcctgtcaccgccaacggcttcggcatcggctacatcatcagagaccactccgtctctgtggtggtgtccagcaggcatcgccagactgctagatttgcgtctctcatggaaaagtctttattggagatcgaccgcatcttcaaaagacagcaagctcgcgcagcaaaacccgctgccaggaccactgctagcgccaacaccaaaagtgaagacatgaaatacttgttgtccggctacgattacttcgacgtgagcgtgtccggttga

SEQ ID NO: 171 - DNA, 81 bp, Saccharomyces cerevisiae
atgagattaaattacagtcgctgctattatagtagccagcggcggcgccagtcacttccaaagcgttttcctcttatttag

SEQ ID NO: 172 - DNA, 81 bp, Artificial Sequence
  Description of Artificial Sequence: Synthetic oligonucleotide
atgagattaaattacagtcgctgctattatagtagccagagaagacgccagtctcttccaaagcgttttcctcttatttga

SEQ ID NO: 173 - DNA, 3567 bp, Saccharomyces cerevisiae
atggaacaacctgatctatcgtctgtggccatcagtaagccgctgctgaagttgaaacttctcgacgcccttcgccagggaagtttccccaacctacaagatctcctaaagaaacaattccagccgctagacgacccaaacgtccaacaagtgctccatctcatgctccactatgccgtgcaagtcgcccccatggctgtcataaaggaaatcgtccatcattgggtctcaactacaaacaccacttttctaaacatccatcttgatctaaacgaacgggactccaacggcaacaccccattgcacatcgccgcctaccagtcccgcggtgatatcgtagccttcctcctggaccaaccaaccatcaacgactgcgtgctcaacaactcccacttgcaggccatcgaaatgtgcaagaacctaaacatcgcgcagatgatgcaggtgaaacgctccacatacgttgcagagaccgcccaggaattcagaacagcttttaacaacagggacttcggccacctagaatctatcctctccagccctcgaaacgcagaactgctcgacatcaacggtatggacccggagactggcgataccgttctgcacgaattcgtcaagaaaagagacgtcatcatgtgccgttggttgcttgaacacggtgctgaccccttcaagagagaccgcaagggcaaactgcccatcgagctcgttaggaaagtcaatgaaaacgacaccgccaccaacaccaagatcgccatcgacatcgaactgaaaaaactattggaaagggccaccagggagcaaagtgtcatcgacgtcacaaacaacaacttgcacgaggcccccacttacaaaggctacctgaaaaaatggaccaacttcgctcaaggctacaaattgcgttggttcatccttagtagcgatgggaaactatcctactacatcgatcaggccgacactaagaatgcctgcaggggctccctaaacatgtcttcgtgctctctgcatttggattcgtctgaaaagttgaaattcgaaattatcggcggtaacaacggtgttatcaggtggcatttaaaggggaaccaccccatcgagacaaatagatgggtttgggccatccagggcgccataagatacgcaaaggacagagaaattttgctgcacaatggcccctattcgccttctctggccttaagccatggcttgtcatccaaagtgtccaataaagaaaacttgcatgcaacttcaaaacggttgaccaagagcccgcatctgtccaaatccacactgacacaaaacgatcacgataatgacgatgacagcactaacaacaacaacaacaaaagtaataatgattatgacgataataataataataataataatgacgatgatgattatgatgatgatgatgaaagtagacccctcatagaaccattaccgttgatttcatccagaagccaaagcttaagcgaaatcactcccggtccacattctaggaagtctacagtctcgtctacaagggcagccgatataccatcagatgatgagggttactctgaggacgattctgatgacgacggtaactcctcttacacaatggaaaacggcggtgaaaacgatggcgacgaagatctaaatgccatttatggtccctatattcaaaaactacacatgctacaaagatccatttccatcgagttggcatctttgaacgaattgctgcaagataaacaacaacacgatgagtactggaacaccgtcaacacttctattgaaaccgtcagcgaatttttcgacaaattaaatcggttgacctctcaaagggaaaaaagaatgattgcccaaatgaccaagcaacgggatgttaacaatgtttggattcaatcggtaaaagatctggaaatggaactggttgataaagacgaaaaattggttgccttggataaagaacggaaaaatctgaaaaaaatgcttcaaaaaaaattgaacaatcaaccacaggttgaaactgaggctaatgaagaatccgatgatgcaaattcaatgataaaaggatcccaagaatcaacaaatacccttgaggaaatcgtaaaatttatcgaagcaacaaaggaaagtgatgaggattctgacgccgacgaatttttcgacgcagaagaagctgcttccgacaaaaaagccaatgattcggaagacttaaccacaaacaaggagactccagctaatgcgaaaccacaagaagaagctcctgaagacgagagccttattgtgatcagttctccacaggtggaaaagaagaaccaactattaaaagagggatcattcgtcggatatgaagacccagtgagaaccaaactggctttagacgaagataatcgtcccaagattggtctctggtctgttttaaagtctatggtcggtcaagacttaaccaaactaactctaccggtatcgttcaatgagccaacatccttactacagagagtatctgaagatattgagtattctcatattcttgaccaagctgccacttttgaagactcctctttaagaatgctatatgtagctgcctttactgcatcaatgtacgcatctaccactaacagagtgtctaaaccattcaaccccttactcggtgaaacttttgaatatgccagaactgatggtcagtaccgattcttcaccgaacaagtctctcaccacccacctatctctgctacttggacagaatcgcccaaatgggatttttacggtgaatgtaatgttgattcgtcattcaatgggcgcacgttcgccgtgcaacatttaggattatggtacattactatccggcctgatcataatattagtgttcccgaggaaacttattcctggaaaaaaccaaataacactgttatcggtattttaatggggaaaccacaagtagacaacagtggggacgtcaaagtcacaaaccataccacaggcgactattgtatgctgcattacaaagcccatggctggacctcagccggtgcatatgaagtcagaggtgaagtattcaacaaggacgataaaaaattatgggttcttggtgggcattggaatgattccatttacgggaaaaaagtaactgctagaggcggagaactgacattagacagaataaaaacggcaaattctgccacgggaggaccaaaactagatgggtctaagtttctgatatggaaagcaaatgaaaggccttcagtgccatttaatttaacgtcgtttgcattgactttgaatgctttgccaccccacttgataccatatttagcacccacagatagtcgtttaaggcccgatcaaagggctatggaaaatggtgaatacgataaagctgccgcggaaaagcatcgtgttgaagtaaaacaaagggcagcaaaaaaagaaagggaacaaaaaggagaagaatacagacctaagtggtttgtccaggaggagcaccccgttaccaaaagtctatactggaaatttaatggagagtattggaacaaaagaaaaaatcatgactttaaagattgtgctgatattttctaa

SEQ ID NO: 174 - DNA, 3567 bp, Artificial Sequence
  Description of Artificial Sequence: Synthetic polynucleotide
atggaacaacctgatttatcttctgtggccatcagtaagccgttattgaagttgaaacttctcgacgcccttcgccagggaagtttccccaacttacaagatctcttgaagaaacaattccagccgttagacgacccaaacgtccaacaagtgctccatctcatgctccactatgccgtgcaagtcgcccccatggctgtcataaaggaaatcgtccatcattgggtctctactacaaacaccacttttttgaacatccatcttgatttgaacgaaagagactccaacggcaacaccccattgcacatcgccgcctaccagtcccgcggtgatatcgtagccttcctcttggaccaaccaaccatcaacgactgcgtgctcaacaactcccacttgcaggccatcgaaatgtgcaagaacttgaacatcgcgcagatgatgcaggtgaaacgctccacatacgttgcagagaccgcccaggaattcagaacagcttttaacaacagggacttcggccacttggaatctatcctctccagccctagaaacgcagaattactcgacatcaacggtatggacccggagactggcgataccgttttgcacgaattcgtcaagaaaagagacgtcatcatgtgccgttggttgcttgaacacggtgctgaccccttcaagagagaccgcaagggcaaattgcccatcgagctcgttaggaaagtcaatgaaaacgacaccgccaccaacaccaagatcgccatcgacatcgaattgaaaaaacttttggaaagggccaccagggagcaaagtgtcatcgacgtcacaaacaacaacttgcacgaggcccccacttacaaaggctacttgaaaaaatggaccaacttcgctcaaggctacaaattgcgttggttcatccttagtagcgatgggaaactttcctactacatcgatcaggccgacactaagaatgcctgcaggggctccttgaacatgtctagttgctctttgcatttggattcttctgaaaagttgaaattcgaaattatcggcggtaacaacggtgttatcaggtggcatttaaaggggaaccaccccatcgagacaaatagatgggtttgggccatccagggcgccataagatacgcaaaggacagagaaattttgttgcacaatggcccctattctccttctttggccttaagccatggcttgtcttccaaagtgtccaataaagaaaacttgcatgcaacttctaaaagattgaccaagagcccgcatttgtccaaatccacattaacacaaaacgatcacgataatgacgatgacagcactaacaacaacaacaacaaaagtaataatgattatgacgataataataataataataataatgacgatgatgattatgatgatgatgatgaaagtagacccctcatagaaccattaccgttgatttcttccagaagccaaagcttaagcgaaatcactcccggtccacattctaggaagtctacagtcagctctacaagggcagccgatataccaagtgatgatgagggttactctgaggacgattctgatgacgacggtaactcctcttacacaatggaaaacggcggtgaaaacgatggcgacgaagatttgaatgccatttatggtccctatattcaaaaattacacatgttacaaagatccatttccatcgagttggcatctttgaacgaattgttgcaagataaacaacaacacgatgagtactggaacaccgtcaacacttctattgaaaccgtcagcgaatttttcgacaaattaaatagattgacctctcaaagggaaaaaagaatgattgcccaaatgaccaagcaaagagatgttaacaatgtttggattcaaagtgtaaaagatttggaaatggaattggttgataaagacgaaaaattggttgccttggataaagaaagaaaaaatttgaaaaaaatgcttcaaaaaaaattgaacaatcaaccacaggttgaaactgaggctaatgaagaatccgatgatgcaaattctatgataaaaggatcccaagaatctacaaatacccttgaggaaatcgtaaaatttatcgaagcaacaaaggaaagtgatgaggattctgacgccgacgaatttttcgacgcagaagaagctgcttccgacaaaaaagccaatgattctgaagacttaaccacaaacaaggagactccagctaatgcgaaaccacaagaagaagctcctgaagacgagagccttattgtgatcagttctccacaggtggaaaagaagaaccaattattaaaagagggaagtttcgtcggatatgaagacccagtgagaaccaaattggctttagacgaagataatcgtcccaagattggtctctggtctgttttaaagtctatggtcggtcaagacttaaccaaattaactttaccggtatctttcaatgagccaacatccttattgcagagagtatctgaagatattgagtattctcatattcttgaccaagctgccacttttgaagactcctctttaagaatgctttatgtagctgcctttactgcatctatgtacgcatctaccactaacagagtgtctaaaccattcaaccccttactcggtgaaacttttgaatatgccagaactgatggtcagtacagattcttcaccgaacaagtctctcaccacccacctatctctgctacttggacagaaagtcccaaatgggatttttacggtgaatgtaatgttgattcttctttcaatgggcgcacgttcgccgtgcaacatttaggattatggtacattactatcagacctgatcataatattagtgttcccgaggaaacttattcctggaaaaaaccaaataacactgttatcggtattttaatggggaaaccacaagtagacaacagtggggacgtcaaagtcacaaaccataccacaggcgactattgtatgttgcattacaaagcccatggctggacctctgccggtgcatatgaagtcagaggtgaagtattcaacaaggacgataaaaaattatgggttcttggtgggcattggaatgattccatttacgggaaaaaagtaactgctagaggcggagaattaacattagacagaataaaaacggcaaattctgccacgggaggaccaaaattggatgggtctaagtttttaatatggaaagcaaatgaaaggccttctgtgccatttaatttaacgtcttttgcattgactttgaatgctttgccaccccacttgataccatatttagcacccacagatagtcgtttaaggcccgatcaaagggctatggaaaatggtgaatacgataaagctgccgcggaaaagcatcgtgttgaagtaaaacaaagggcagcaaaaaaagaaagggaacaaaaaggagaagaatacagacctaagtggtttgtccaggaggagcaccccgttaccaaaagtttatactggaaatttaatggagagtattggaacaaaagaaaaaatcatgactttaaagattgtgctgatattttctga

SEQ ID NO: 175 - DNA, 4614 bp, Saccharomyces cerevisiae
atgacaatgcctcatcgctatatgtttttggcagtctttacacttctggcactaactagtgtggcctcaggagccacagaggcgtgcttaccagcaggccagaggaaaagtgggatgaatataaatttttaccagtattcattgaaagattcctccacatattcgaatgcagcatatatggcttatggatatgcctcaaaaaccaaactaggttctgtcggaggacaaactgatatctcgattgattataatattccctgtgttagttcatcaggcacatttccttgtcctcaagaagattcctatggaaactggggatgcaaaggaatgggtgcttgttctaatagtcaaggaattgcatactggagtactgatttatttggtttctatactaccccaacaaacgtaaccctagaaatgacaggttattttttaccaccacagacgggttcttacacattcaagtttgctacagttgacgactctgcaattctatcagtaggtggtgcaaccgcgttcaactgttgtgctcaacagcaaccgccgatcacatcaacgaactttaccattgacggtatcaagccatggggtggaagtttgccacctaatatcgaaggaaccgtctatatgtacgctggctactattatccaatgaaggttgtttactcgaacgctgtttcttggggtacacttccaattagtgtgacacttccagatggtaccactgtaagtgatgacttcgaagggtacgtctattcctttgacgatgacctaagtcaatctaactgtactgtccctgacccttcaaattatgctgtcagtaccactacaactacaacggaaccatggaccggtactttcacttctacatctactgaaatgaccaccgtcaccggtaccaacggcgttccaactgacgaaaccgtcattgtcatcagaactccaacaactgctagcaccatcataactacaactgagccatggaacagcacttttacctctacttctaccgaattgaccacagtcactggcaccaatggtgtacgaactgacgaaaccatcattgtaatcagaacaccaacaacagccactactgccataactacaactgagccatggaacagcacttttacctctacttctaccgaattgaccacagtcaccggtaccaatggtttgccaactgatgagaccatcattgtcatcagaacaccaacaacagccactactgccatgactacaactcagccatggaacgacacttttacctctacttctaccgaattgaccacagtcaccggtaccaatggtttgccaactgatgagaccatcattgtcatcagaacaccaacaacagccactactgccatgactacaactcagccatggaacgacacttttacctctacttctaccgaattgaccacagtcaccggtaccaatggtttgccaactgatgagaccatcattgtcatcagaacaccaacaacagccactactgccatgactacaactcagccatggaacgacacttttacctctacatccactgaaatcaccaccgtcaccggtaccaatggtttgccaactgatgagaccatcattgtcatcagaacaccaacaacagccactactgccatgactacacctcagccatggaacgacacttttacctctacatccactgaaatgaccaccgtcaccggtaccaacggtttgccaactgatgaaaccatcattgtcatcagaacaccaacaacagccactactgccataactacaactgagccatggaacagcacttttacctctacatccactgaaatgaccaccgtcaccggtaccaacggtttgccaactgatgaaaccatcattgtcatcagaacaccaacaacagccactactgccataactacaactcagccatggaacgacacttttacctctacatccactgaaatgaccaccgtcaccggtaccaacggtttgccaactgatgaaaccatcattgtcatcagaacaccaacaacagccactactgccatgactacaactcagccatggaacgacacttttacctctacatccactgaaatcaccaccgtcaccggtaccaccggtttgccaactgatgagaccatcattgtcatcagaacaccaacaacagccactactgccatgactacaactcagccatggaacgacacttttacctctacatccactgaaatgaccaccgtcaccggtaccaacggcgttccaactgacgaaaccgtcattgtcatcagaactccaactagtgaaggtctaatcagcaccaccactgaaccatggactggtactttcacctctacatccactgagatgaccaccgtcaccggtactaacggtcaaccaactgacgaaaccgtgattgttatcagaactccaaccagtgaaggtttggttacaaccaccactgaaccatggactggtacttttacttctacatctactgaaatgaccaccattactggaaccaacggcgttccaactgacgaaaccgtcattgtcatcagaactccaaccagtgaaggtctaatcagcaccaccactgaaccatggactggtacttttacttctacatctactgaaatgaccaccattactggaaccaatggtcaaccaactgacgaaaccgttattgttatcagaactccaactagtgaaggtctaatcagcactacaacggaaccatggaccggtactttcacttctacatctactgaaatgacgcacgtcaccggtaccaacggcgttccaactgacgaaaccgtcattgtcatcagaactccaaccagtgaaggtctaatcagcaccaccactgaaccatggactggcactttcacttcgacttccactgaggttaccaccatcactggaaccaacggtcaaccaactgacgaaactgtgattgttatcagaactccaaccagtgaaggtctaatcagcaccaccactgaaccatggactggtactttcacttctacatctactgaaatgaccaccgtcaccggtactaacggtcaaccaactgacgaaaccgtgattgttatcagaactccaaccagtgaaggtttggttacaaccaccactgaaccatggactggtacttttacttcgacttccactgaaatgtctactgtcactggaaccaatggcttgccaactgatgaaactgtcattgttgtcaaaactccaactactgccatctcatccagtttgtcatcatcatcttcaggacaaatcaccagctctatcacgtcttcgcgtccaattattaccccattctatcctagcaatggaacttctgtgatttcttcctcagtaatttcttcctcagtcacttcttctctattcacttcttctccagtcatttcttcctcagtcatttcttcttctacaacaacctccacttctatattttctgaatcatctaaatcatccgtcattccaaccagtagttccacctctggttcttctgagagcgaaacgagttcagctggttctgtctcttcttcctcttttatctcttctgaatcatcaaaatctcctacatattcttcttcatcattaccacttgttaccagtgcgacaacaagccaggaaactgcttcttcattaccacctgctaccactacaaaaacgagcgaacaaaccactttggttaccgtgacatcctgcgagtctcatgtgtgcactgaatccatctcccctgcgattgtttccacagctactgttactgttagcggcgtcacaacagagtataccacatggtgccctatttctactacagagacaacaaagcaaaccaaagggacaacagagcaaaccacagaaacaacaaaacaaaccacggtagttacaatttcttcttgtgaatctgacgtatgctctaagactgcttctccagccattgtatctacaagcactgctactattaacggcgttactacagaatacacaacatggtgtcctatttccaccacagaatcgaggcaacaaacaacgctagttactgttacttcctgcgaatctggtgtgtgttccgaaactgcttcacctgccattgtttcgacggccacggctactgtgaatgatgttgttacggtctatcctacatggaggccacagactgcgaatgaagagtctgtcagctctaaaatgaacagtgctaccggtgagacaacaaccaatactttagctgctgaaacgactaccaatactgtagctgctgagacgattaccaatactggagctgctgagacgaaaacagtagtcacctcttcgctttcaagatctaatcacgctgaaacacagacggcttccgcgaccgatgtgattggtcacagcagtagtgttgtttctgtatccgaaactggcaacaccaagagtctaacaagttccgggttgagtactatgtcgcaacagcctcgtagcacaccagcaagcagcatggtaggatatagtacagcttctttagaaatttcaacgtatgctggcagtgccaacagcttactggccggtagtggtttaagtgtcttcattgcgtccttattgctggcaattatttaa

SEQ ID NO: 176 - DNA, 4614 bp, Artificial Sequence
  Description of Artificial Sequence: Synthetic polynucleotide
atgacaatgcctcatcgctatatgtttttggcagtctttacacttttagcattgactagtgtggccagtggagccacagaggcgtgcttaccagcaggccagaggaaaagtgggatgaatataaatttttaccagtattctttgaaagattcctccacatattctaatgcagcatatatggcttatggatatgcctccaaaaccaaattgggttctgtcggaggacaaactgatatctctattgattataatattccctgtgttagttcttctggcacatttccttgtcctcaagaagattcctatggaaactggggatgcaaaggaatgggtgcttgttctaatagtcaaggaattgcatactggagtactgatttatttggtttctatactaccccaacaaacgtaaccttagaaatgacaggttattttttaccaccacagacgggttcttacacattcaagtttgctacagttgacgactctgcaattttaagtgtaggtggtgcaaccgcgttcaactgttgtgctcaacagcaaccgccgatcacaagtacgaactttaccattgacggtatcaagccatggggtggaagtttgccacctaatatcgaaggaaccgtctatatgtacgctggctactattatccaatgaaggttgtttactctaacgctgtttcttggggtacacttccaattagtgtgacacttccagatggtaccactgtaagtgatgacttcgaagggtacgtctattcctttgacgatgacttgagtcaatctaactgtactgtccctgacccttccaattatgctgtcagtaccactacaactacaacggaaccatggaccggtactttcacttctacatctactgaaatgaccaccgtcaccggtaccaacggcgttccaactgacgaaaccgtcattgtcatcagaactccaacaactgctagcaccatcataactacaactgagccatggaacagcacttttacctctacttctaccgaattgaccacagtcactggcaccaatggtgtaagaactgacgaaaccatcattgtaatcagaacaccaacaacagccactactgccataactacaactgagccatggaacagcacttttacctctacttctaccgaattgaccacagtcaccggtaccaatggtttgccaactgatgagaccatcattgtcatcagaacaccaacaacagccactactgccatgactacaactcagccatggaacgacacttttacctctacttctaccgaattgaccacagtcaccggtaccaatggtttgccaactgatgagaccatcattgtcatcagaacaccaacaacagccactactgccatgactacaactcagccatggaacgacacttttacctctacttctaccgaattgaccacagtcaccggtaccaatggtttgccaactgatgagaccatcattgtcatcagaacaccaacaacagccactactgccatgactacaactcagccatggaacgacacttttacctctacatccactgaaatcaccaccgtcaccggtaccaatggtttgccaactgatgagaccatcattgtcatcagaacaccaacaacagccactactgccatgactacacctcagccatggaacgacacttttacctctacatccactgaaatgaccaccgtcaccggtaccaacggtttgccaactgatgaaaccatcattgtcatcagaacaccaacaacagccactactgccataactacaactgagccatggaacagcacttttacctctacatccactgaaatgaccaccgtcaccggtaccaacggtttgccaactgatgaaaccatcattgtcatcagaacaccaacaacagccactactgccataactacaactcagccatggaacgacacttttacctctacatccactgaaatgaccaccgtcaccggtaccaacggtttgccaactgatgaaaccatcattgtcatcagaacaccaacaacagccactactgccatgactacaactcagccatggaacgacacttttacctctacatccactgaaatcaccaccgtcaccggtaccaccggtttgccaactgatgagaccatcattgtcatcagaacaccaacaacagccactactgccatgactacaactcagccatggaacgacacttttacctctacatccactgaaatgaccaccgtcaccggtaccaacggcgttccaactgacgaaaccgtcattgtcatcagaactccaactagtgaaggtttgatcagcaccaccactgaaccatggactggtactttcacctctacatccactgagatgaccaccgtcaccggtactaacggtcaaccaactgacgaaaccgtgattgttatcagaactccaaccagtgaaggtttggttacaaccaccactgaaccatggactggtacttttacttctacatctactgaaatgaccaccattactggaaccaacggcgttccaactgacgaaaccgtcattgtcatcagaactccaaccagtgaaggtttgatcagcaccaccactgaaccatggactggtacttttacttctacatctactgaaatgaccaccattactggaaccaatggtcaaccaactgacgaaaccgttattgttatcagaactccaactagtgaaggtttgatcagcactacaacggaaccatggaccggtactttcacttctacatctactgaaatgacgcacgtcaccggtaccaacggcgttccaactgacgaaaccgtcattgtcatcagaactccaaccagtgaaggtttgatcagcaccaccactgaaccatggactggcactttcacttctacttccactgaggttaccaccatcactggaaccaacggtcaaccaactgacgaaactgtgattgttatcagaactccaaccagtgaaggtttgatcagcaccaccactgaaccatggactggtactttcacttctacatctactgaaatgaccaccgtcaccggtactaacggtcaaccaactgacgaaaccgtgattgttatcagaactccaaccagtgaaggtttggttacaaccaccactgaaccatggactggtacttttacttctacttccactgaaatgtctactgtcactggaaccaatggcttgccaactgatgaaactgtcattgttgtcaaaactccaactactgccatctcttccagtttgagttcttcttcttctggacaaatcaccagctctatcacgtcttctcgtccaattattaccccattctatcctagcaatggaacttctgtgatttcttcctctgtaatttcttcctctgtcacttcttctttattcacttcttctccagtcatttcttcctctgtcatttcttcttctacaacaacctccacttctatattttctgaaagctctaaatcttccgtcattccaaccagtagttccacctctggttcttctgagagcgaaacgagttctgctggttctgtctcttcttcctcttttatctcttctgaatcttctaaatctcctacatattcttcttcttctttaccacttgttaccagtgcgacaacaagccaggaaactgcttcttctttaccacctgctaccactacaaaaacgagcgaacaaaccactttggttaccgtgacatcctgcgagtctcatgtgtgcactgaatccatctcccctgcgattgtttccacagctactgttactgttagcggcgtcacaacagagtataccacatggtgccctatttctactacagagacaacaaagcaaaccaaagggacaacagagcaaaccacagaaacaacaaaacaaaccacggtagttacaatttcttcttgtgaatctgacgtatgctctaagactgcttctccagccattgtatctacaagcactgctactattaacggcgttactacagaatacacaacatggtgtcctatttccaccacagaaagtaggcaacaaacaacgttagttactgttacttcctgcgaatctggtgtgtgttccgaaactgcttcccctgccattgtttccacggccacggctactgtgaatgatgttgttacggtctatcctacatggaggccacagactgcgaatgaagagtctgtcagctctaaaatgaacagtgctaccggtgagacaacaaccaatactttagctgctgaaacgactaccaatactgtagctgctgagacgattaccaatactggagctgctgagacgaaaacagtagtcacctcttctctttctagatctaatcacgctgaaacacagacggcttccgcgaccgatgtgattggtcacagcagtagtgttgtttctgtatccgaaactggcaacaccaagagtttgacaagttccgggttgagtactatgtctcaacagcctcgtagcacaccagcaagcagcatggtaggatatagtacagcttctttagaaatttctacgtatgctggcagtgccaacagcttattagccggtagtggtttaagtgtcttcattgcgtccttattgttggcaattatttga

SEQ ID NO: 177 - DNA, 300 bp, Saccharomyces cerevisiae
atgttgattgatttttgctgtagttatatagcagggacccacggaagagagcgagcgccttctttcacagggacttttgtcagccacgtctccggggaaaacaattgccgtccgcgtcgcagtgagattacgcagccgtgcgcttcagggacagaaaagaagcatttcgcggctacggagaaaccgtgcactaactctctcgagggtagccgcaaagatttcttgtctcttccattaggacatagctatctttttcttttctgtttttggcgtatgatctgttctgagccaaagttatag

SEQ ID NO: 178 - DNA, 300 bp, Artificial Sequence
  Description of Artificial Sequence: Synthetic polynucleotide
atgttgattgatttttgctgtagttatatagcagggacccacggaagagagagagcgccttctttcacagggacttttgtcagccacgtctccggggaaaacaattgccgtccgcgtcgcagtgagattacgcagccgtgcgcttctgggacagaaaagaagcatttcgcggctacggagaaaccgtgcactaactctctcgagggtagccgcaaagatttcttgtctcttccattaggacatagctatctttttcttttctgtttttggcgtatgatctgttctgagccaaagttatga

SEQ ID NO: 179 - DNA, 612 bp, Saccharomyces cerevisiae
atgttcaatcgttttaacaaattccaagctgctgtcgctttggccctactctctcgcggcgctctcggtgactcttacaccaatagcacctcctccgcagacttgagttctatcacttccgtctcgtcagctagtgcaagtgccaccgcttccgactcactttcttccagtgacggtaccgtttatttgccatccacaacaattagcggtgatctcacagttactggtaaagtaattgcaaccgaggccgtggaagtcgctgccggtggtaagttgactttacttgacggtgaaaaatacgtcttctcatctgatctaaaagttcacggtgatttggttgtcgaaaagtctgaagcaagctacgaaggtaccgcgttcgacgtttctggtgagacttttgaagtttccggtaacttcagtgctgaagaaactggcgctgtctccgcatctatctattcattcacacctagctcgttcaagagcagcggtgacatttctttgagtttgtcaaaggccaagaagggtgaagtcaccttttctccatactctaacgctggtaccttttctttgtcaaatgctattctcaacggtggttctgtttccggtttgtaa

SEQ ID NO: 180 - DNA, 612 bp, Artificial Sequence
  Description of Artificial Sequence: Synthetic polynucleotide
atgttcaatcgttttaacaaattccaagctgctgtcgctttggccttactctctcgcggcgctctcggtgactcttacaccaatagcacctcctccgcagacttgagttctatcacttccgtcagttctgctagtgcaagtgccaccgcttccgactctctttcttccagtgacggtaccgtttatttgccatccacaacaattagcggtgatctcacagttactggtaaagtaattgcaaccgaggccgtggaagtcgctgccggtggtaagttgactttacttgacggtgaaaaatacgtcttcagttctgatttgaaagttcacggtgatttggttgtcgaaaagtctgaagcaagctacgaaggtaccgcgttcgacgtttctggtgagacttttgaagtttccggtaacttcagtgctgaagaaactggcgctgtctccgcatctatctattctttcacacctagctctttcaagagcagcggtgacatttctttgagtttgtccaaggccaagaagggtgaagtcaccttttctccatactctaacgctggtaccttttctttgagcaatgctattctcaacggtggttctgtttccggtttgtga

SEQ ID NO: 181 - DNA, 486 bp, Saccharomyces cerevisiae
atgccacaagtacagtcgtggtttcctgttcagaaacaaccgacgctagcggtaacatttacaccattaccacaactgtcccatgctcatctaccactgccaccatcacatcttgtgacgaaaacggatgccatgttccagcaccaactgctaccgacgcaactgcaaccgtttcctccaagtcatacaccactgttactgttactcactgtgacaacaatggctgtaacaccaagactgtcacttctgaatgttctaaagaaactgcagcaaccaccatttctccaaaatcatacactactgttaccgttactcactgtgacgacaacggctgtaacaccaagactgtcacttccgaggcttccaaacaaacatcattggccactagcacagtcaccaagtctgctgctccaacttctcatactgctgcttccagcaccttcactggtattgtcgttcaatccgaaggtatggctgctggtttga

SEQ ID NO: 182 - DNA, 486 bp, Artificial Sequence
  Description of Artificial Sequence: Synthetic polynucleotide
atgccacaagtacagagttggtttcctgttcagaaacaaccgacgttggcggtaacatttacaccattaccacaattatcccatgctcatttaccattaccaccatctcatcttgtgacgaaaacggatgccatgttccagcaccaattattaccgacgcaattacaaccgtttcctccaagtcatacaccattattattattactcactgtgacaacaatggctgtaacaccaagattatctcttttgaatgttttgaagaaattacagcaaccaccatttctccaaaatcatacattattattaccgttactcactgtgacgacaacggctgtaacaccaagattatctcttccgaggcttccaaacaaacatcattggccattggcacagtctccaagtttacttctccaacttctcatattattacttccagcaccttctttagtattgagtttcaatccgaaggtatggttgttggtttga

SEQ ID NO: 183 - DNA, 1404 bp, Saccharomyces cerevisiae
atgttgaagtcagccgtttattcaattttagccgcttctttggttaatgcaggtaccatacccctcggaaagttatctgacattgacaaaatcggaactcaaacggaaattttcccatttttgggtggttctgggccatactactctttccctggtgattatggtatttctcgtgatttgccggaaagttgtgaaatgaagcaagtgcaaatggttggtagacacggtgaaagataccccactgtcagcaaagccaaaagtatcatgacaacatggtacaaattgagtaactataccggtcaattcagcggagcattgtctttcttgaacgatgactacgaatttttcattcgtgacaccaaaaacctagaaatggaaaccacacttgccaattcggtcaatgttttgaacccatataccggtgagatgaatgctaagagacacgctcgtgatttcttggcgcaatatggctacatggtcgaaaaccaaaccagttttgccgtttttacgtctaactcgaacagatgtcatgatactgcccagtatttcattgacggtttgggtgataaattcaacatatccttgcaaaccatcagtgaagccgagtctgctggtgccaatactctgagtgcccaccattcgtgtcctgcttgggacgatgatgtcaacgatgacattttgaaaaaatatgataccaaatatttgagtggtattgccaagagattaaacaaggaaaacaagggtttgaatctgacttcaagtgatgcaaacactttttttgcatggtgtgcatatgaaataaacgctagaggttacagtgacatctgtaacatcttcaccaaagatgaattggtccgtttctcctacggccaagacttggaaacttattatcaaacgggaccaggctatgacgtcgtcagatccgtcggtgccaacttgttcaacgcttcagtgaaactactaaaggaaagtgaggtccaggaccaaaaggtttggttgagtttcacccacgataccgatattctgaactatttgaccactatcggcataatcgatgacaaaaataacttgaccgccgaacatgttccattcatggaaaacactttccacagatcctggtacgttccacaaggtgctcgtgtttacactgaaaagttccagtgttccaatgacacctatgttagatacgtcatcaacgatgctgtcgttccaattgaaacctgttctactggtccagggttctcctgtgaaataaatgacttctacgactatgctgaaaagagagtagccggtactgacttcctaaaggtctgtaacgtcagcagcgtcagtaactctactgaattgacctttttctgggactggaataccaagcactacaacgacactttattaaaacagtaa

SEQ ID NO: 184 - DNA, 1404 bp, Artificial Sequence
  Description of Artificial Sequence: Synthetic polynucleotide
atgttgaagtctgccgtttattctattttagccgcttctttggttaatgcaggtaccatacccctcggaaagttatctgacattgacaaaatcggaactcaaacggaaattttcccatttttgggtggttctgggccatactactctttccctggtgattatggtatttctcgtgatttgccggaaagttgtgaaatgaagcaagtgcaaatggttggtagacacggtgaaagataccccactgtcagcaaagccaaaagtatcatgacaacatggtacaaattgagtaactataccggtcaattcagcggagcattgtctttcttgaacgatgactacgaatttttcattcgtgacaccaaaaacttggaaatggaaaccacacttgccaattctgtcaatgttttgaacccatataccggtgagatgaatgctaagagacacgctcgtgatttcttggcgcaatatggctacatggtcgaaaaccaaaccagttttgccgtttttacgtctaactccaacagatgtcatgatactgcccagtatttcattgacggtttgggtgataaattcaacatatccttgcaaaccatcagtgaagccgagtctgctggtgccaatactttaagtgcccaccattcttgtcctgcttgggacgatgatgtcaacgatgacattttgaaaaaatatgataccaaatatttgagtggtattgccaagagattaaacaaggaaaacaagggtttgaatttaacttctagtgatgcaaacactttttttgcatggtgtgcatatgaaataaacgctagaggttacagtgacatctgtaacatcttcaccaaagatgaattggtccgtttctcctacggccaagacttggaaacttattatcaaacgggaccaggctatgacgtcgtcagatccgtcggtgccaacttgttcaacgcttctgtgaaattattgaaggaaagtgaggtccaggaccaaaaggtttggttgagtttcacccacgataccgatattttgaactatttgaccactatcggcataatcgatgacaaaaataacttgaccgccgaacatgttccattcatggaaaacactttccacagatcctggtacgttccacaaggtgctcgtgtttacactgaaaagttccagtgttccaatgacacctatgttagatacgtcatcaacgatgctgtcgttccaattgaaacctgttctactggtccagggttctcctgtgaaataaatgacttctacgactatgctgaaaagagagtagccggtactgacttcttgaaggtctgtaacgtcagcagcgtcagtaactctactgaattgacctttttctgggactggaataccaagcactacaacgacactttattaaaacagtga

SEQ ID NO: 185 - DNA, 2379 bp, Saccharomyces cerevisiae
atggacttgaatcaaagaaaggaaaaaaagggccagcatgttggatgctgtggctccaggacagacctgtctgctgacacagtggaactgatagaaagaatggacagattggctgaaaatcaggcgacagcttccatgtcgatcgttgcgttaccgtctagcttccaggagagcaatagcagtgacaggtgcagaaagtattgcagcagtgatgaggacagcgacacgtgcattcatggtagtgctaatgccagtaccaatgcgactaccaactccagcactaatgctactaccactgccagcatcaacgtcaggactagtgcgactaccactgccagcatcaacgtcaggactagtgcgactaccactgaaagtaccaactccaacactaatgctactaccactgaaagtaccaactccagcactaatgctactaccactgccagcatcaacgtcaggactagtgcgactaccactgaaagtaccaactccagcactaatgctactaccactgccagcatcaacgtcaggactagtgcgactaccactgaaagtaccaactccagcactaatgctactaccactgccagcatcaacgtcaggactagtgcgactaccactgaaagtaccaactccaacactaatgccagtaccaatgcgactaccaactccagcactaatgctactaccactgccagcaccaacgtcaggactagtgctactaccaatgcgactaccaactccagcactaatgctactaccactgccagcaccaacgtcaggactagtgctactaccactgccagcaccaacgtcaggactagtgctactaccactgccagcatcaacgtcaggactagtgctactaccactgaaagtatcaactctagcactaatgctactaccactgaaagtaccaactccaacactagtgctactaccaccgaaagtaccgactccaacactaatgctactaccactgctagcatcaacgtcaggactagtgcgactaccactgaaagtaccaactccaacactagtgctactaccaccgaaagtaccgactccaacactagtgctactaccactgctagcaccaactccagcactaatgccactaccactgctagcaccaactccagcactaatgccactaccactgaaagtaccaacgctagtgccaaggaggacgccaataaagatggcaatgctgaggataatagattccatccagtcaccgacattaacaaagagtcgtataagcggaaagggagtcaaatggttttcctagagagaaagaaactgaaagcacaatttcccaatacttccgagaatatgaatgtcttacagtttcttggatttcggtctgacgaaattaaacatcttttcctctatggtattgacatatacttctgcccagagggagtattcacacaatacggattatgcaagggctgtcaaaagatgttcgggctctgtgtctgttgggctggccagaaagtatcgtatcggaggatagcttgggaagcactagctgtggagagaatgctgcgaaatgatgaggaatacaaagaatacttggaagacatcgagccatatcatggggaccctgtaggatatttgaaatattttagcgtaaaaaggagagagatctactctcagatacagagaaattatgcttggtacctggccattactagaagaagagaaacaattagtgtattggattcgacaagaggcaagcaagggagccaagttttccgcatgtctggaaggcagatcaaagagttgtattataaagtatggagcaacttgcgtgaatcgaagacagaggtgctgcagtactttttgaactgggacgaaaaaaagtgccgggaagaatgggaggcaaaagacgatacggtctttgtggaagcgctcgagaaagttggagtttttcagcgtttgcgttccatgacgagcgctggactgcagggtccgcagtacgtcaagctgcagtttagcaggcatcatcgacagttgaggagcagatatgaattaagtctaggaatgcacttgcgagatcagcttgcgctgggagttaccccatctaaagtgccgcattggacggcattcctgtcgatgctgatagggctgttctacaataaaacatttcggcagaaactggaatatcttttggagcagatttcggagatgtggttgttaccacattggcttgatttggcaaacgttgaagttctcgctgcagataacacgagggtaccactgtacatgctgatggtagcggttcacaaagagctggatagcgatgatgttccagacggtagatttgatataatattactatgtagagattcgagcagagaagttggagagtga

SEQ ID NO: 186 - DNA, 2379 bp, Artificial Sequence
  Description of Artificial Sequence: Synthetic polynucleotide
atggacttgaatcaaagaaaggaaaaaaagggccagcatgttggatgctgtggctccaggacagacttgtctgctgacacagtggaattgatagaaagaatggacagattggctgaaaatcaggcgacagcttccatgtccatcgttgcgttaccgtctagcttccaggagagcaatagcagtgacaggtgcagaaagtattgcagcagtgatgaggacagcgacacgtgcattcatggtagtgctaatgccagtaccaatgcgactaccaactccagcactaatgctactaccactgccagcatcaacgtcaggactagtgcgactaccactgccagcatcaacgtcaggactagtgcgactaccactgaaagtaccaactccaacactaatgctactaccactgaaagtaccaactccagcactaatgctactaccactgccagcatcaacgtcaggactagtgcgactaccactgaaagtaccaactccagcactaatgctactaccactgccagcatcaacgtcaggactagtgcgactaccactgaaagtaccaactccagcactaatgctactaccactgccagcatcaacgtcaggactagtgcgactaccactgaaagtaccaactccaacactaatgccagtaccaatgcgactaccaactccagcactaatgctactaccactgccagcaccaacgtcaggactagtgctactaccaatgcgactaccaactccagcactaatgctactaccactgccagcaccaacgtcaggactagtgctactaccactgccagcaccaacgtcaggactagtgctactaccactgccagcatcaacgtcaggactagtgctactaccactgaaagtatcaactctagcactaatgctactaccactgaaagtaccaactccaacactagtgctactaccaccgaaagtaccgactccaacactaatgctactaccactgctagcatcaacgtcaggactagtgcgactaccactgaaagtaccaactccaacactagtgctactaccaccgaaagtaccgactccaacactagtgctactaccactgctagcaccaactccagcactaatgccactaccactgctagcaccaactccagcactaatgccactaccactgaaagtaccaacgctagtgccaaggaggacgccaataaagatggcaatgctgaggataatagattccatccagtcaccgacattaacaaagagtcttataagagaaaagggagtcaaatggttttcttggagagaaagaaattgaaagcacaatttcccaatacttccgagaatatgaatgtcttacagtttcttggatttagatctgacgaaattaaacatcttttcctctatggtattgacatatacttctgcccagagggagtattcacacaatacggattatgcaagggctgtcaaaagatgttcgggctctgtgtctgttgggctggccagaaagtatcttatagaaggatagcttgggaagcattggctgtggagagaatgttaagaaatgatgaggaatacaaagaatacttggaagacatcgagccatatcatggggaccctgtaggatatttgaaatattttagcgtaaaaaggagagagatctactctcagatacagagaaattatgcttggtacttggccattactagaagaagagaaacaattagtgtattggattctacaagaggcaagcaagggagccaagttttccgcatgtctggaaggcagatcaaagagttgtattataaagtatggagcaacttgcgtgaatccaagacagaggtgttacagtactttttgaactgggacgaaaaaaagtgcagagaagaatgggaggcaaaagacgatacggtctttgtggaagcgctcgagaaagttggagtttttcagcgtttgcgttccatgacgagcgctggattacagggtccgcagtacgtcaagttacagtttagcaggcatcatagacagttgaggagcagatatgaattaagtttgggaatgcacttgagagatcagcttgcgttgggagttaccccatctaaagtgccgcattggacggcattcttgtccatgttgatagggcttttctacaataaaacatttagacagaaattagaatatcttttggagcagatttctgagatgtggttgttaccacattggcttgatttggcaaacgttgaagttctcgctgcagataacacgagggtaccattgtacatgttaatggtagcggttcacaaagagttagatagcgatgatgttccagacggtagatttgatataatattattatgtagagattctagcagagaagttggagagtga

SEQ ID NO: 187 - DNA, 318 bp, Saccharomyces cerevisiae
atgcaagttctcatcggaacgaaattagtgactgaaggaattgacattaagcaattgatgatggtgatcatgcttgataatagacttaatattattgagctcattcaaggcgtagggagactaagagatgggggcctctgttatctattatctagaaaaaacagttgggcggcaaggaatcgtaagggtgaattaccaccgattaaggaaggctgtataaccgaacaggtacgcgagttctatggacttgaatcaaagaaaggaaaaaaagggccagcatgttggatgctgtggctccaggacagacctgtctgctga

SEQ ID NO: 188 - DNA, 318 bp, Artificial Sequence
  Description of Artificial Sequence: Synthetic polynucleotide
atgcaagttctcatcggaacgaaattagtgactgaaggaattgacattaagcaattgatgatggtgatcatgcttgataatagacttaatattattgagctcattcaaggcgtagggagattgagagatgggggcctctgttatcttttatctagaaaaaacagttgggcggcaaggaatcgtaagggtgaattaccaccgattaaggaaggctgtataaccgaacaggtacgcgagttctatggacttgaatccaagaaaggaaaaaaagggccagcatgttggatgttatggctccaggacagacctgtctgctga

SEQ ID NO: 189 - DNA, 2004 bp, Saccharomyces cerevisiae
atgaaagtttccgataggcgtaagtttgaaaaagcaaactttgacgagtttgagtcggctctaaataacaaaaacgacttggtacattgtccctcaataactttatttgaatcgatccccacggaagtgcggtcattctacgaagacgaaaagtctggtctaatcaaagtggtaaaattcagaactggtgcaatggataggaaaaggtcttttgaaaaaattgtcgtttccgtcatggtcgggaaaaatgtacaaaagttcctgacgtttgttgaagacgaaccagatttccagggcggaccaatcccttcaaagtatcttattcccaagaaaatcaacttgatggtctacacgttgtttcaagtgcatactttgaaattcaatagaaaggattacgataccctttctcttttttacctcaacagaggatactataatgagttgagtttccgtgtcctggaacgttgttacgaaatagcgagtgccaggccgaacgacagctctacgatgcgtactttcactgactttgtttctggcacacctattgtaaggagtcttcagaaaagcaccataaggaaatatggatacaatttggcaccctacatgttcttgttactacacgtagatgagctatcgattttttctgcataccaagcaagtttacctggcgaaaagaaagtcgacacagagcggctgaagcgtgatctatgcccacgtaaacccactgagataaagtacttttcacagatatgtaacgatatgatgaacaaaaaggaccgattgggtgatgttttagctacagcgcaacgtatacgtcgacgatacaacaagaacggttcatcggagcctcgactaaagacgcttgacggactcacttccgagcgctggattcaatggttaggccttgaaagcgactaccattgttcattctctagtactcggaatgcggaagacgtagtggcaggtgaggcggcgagttcagatcatgatcaaaaaatttcaagagtaacgcgaaaaaggccccgagagcccaagagtacaaacgatatcctcgtcgcaggccggaaactctttggcagctcctttgaattcagggacttgcatcagttgcgcttatgtcatgaaatatacatggcagacacaccctctgtggcagtacaggccccaccgggctatggtaagacggagttatttcatctccccttgatagcactggcatctaagggcgacgtgaaatatgtgtcgtttctgtttgtaccgtacacagtgttgcttgctaattgcatgatcaggttgggccgacgcggttgcttgaatgtggcccctgtaagaaactttattgaagaaggttgcgatggcgttactgatttatacgtggggatctacgatgatcttgctagcactaatttcacagacaggatagctgcgtgggagaatattgttgagtgcacctttaggaccaacaacgtaaaattgggttacctcattgtagatgagtttcacaactttgaaacggaggtctaccggcagtcgcaatttgggggcataactaaccttgattttgacgcttttgagaaagcaatctttttgagcggcacagcccctgaggctgttgctgatgctgcgttgcagcgtattgggcttacgggactggccaagaagtcgatggacatcaacgagctcaaacggtcggaagatctcagcagaggtctatccagctatccaacacggatgtttaatctaatcaaggagaaatccgaggtgcctttagggcatgttcataaaatttggaagaaagtggaatcacagcccgaagaagcactgaagcttcttttagccctctttgaaattgaaccagagtcgaaggccattgtagttgcaagcacaaccaacgaagtggaagaattggcctgctcttggagaaagtattttagggtggtatggatacacgggaagcttgggtgctgcagaaaaggtgtctcgcacaaaggagtttgtcactga

SEQ ID NO: 190 - DNA, 2004 bp, Artificial Sequence
  Description of Artificial Sequence: Synthetic polynucleotide
atgaaagtttccgataggcgtaagtttgaaaaagcaaactttgacgagtttgagtctgctttgaataacaaaaacgacttggtacattgtccctccataactttatttgaaagtatccccacggaagtgagatctttctacgaagacgaaaagtctggtttgatcaaagtggtaaaattcagaactggtgcaatggataggaaaaggtcttttgaaaaaattgtcgtttccgtcatggtcgggaaaaatgtacaaaagttcttgacgtttgttgaagacgaaccagatttccagggcggaccaatcccttctaagtatcttattcccaagaaaatcaacttgatggtctacacgttgtttcaagtgcatactttgaaattcaatagaaaggattacgataccctttctcttttttacctcaacagaggatactataatgagttgagtttccgtgtcttggaacgttgttacgaaatagcgagtgccaggccgaacgacagctctacgatgcgtactttcactgactttgtttctggcacacctattgtaaggagtcttcagaaaagcaccataaggaaatatggatacaatttggcaccctacatgttcttgttattacacgtagatgagttatccattttttctgcataccaagcaagtttacctggcgaaaagaaagtcgacacagagaggttaaagcgtgatttatgcccacgtaaacccactgagataaagtacttttcccagatatgtaacgatatgatgaacaaaaaggacagattgggtgatgttttagctacagcgcaacgtatacgtaggcgttacaacaagaacggttcttctgagcctcgtttgaagacgcttgacggactcacttccgagcgctggattcaatggttaggccttgaaagcgactaccattgttctttctctagtactagaaatgcggaagacgtagtggcaggtgaggcggcgagttctgatcatgatcaaaaaatttctagagtaacgagaaaaaggcccagagagcccaagagtacaaacgatatcctcgtcgcaggcagaaaactctttggcagctcctttgaattcagggacttgcatcagttgcgcttatgtcatgaaatatacatggcagacacaccctctgtggcagtacaggccccaccgggctatggtaagacggagttatttcatctccccttgatagcattggcatctaagggcgacgtgaaatatgtgtcctttttgtttgtaccgtacacagtgttgcttgctaattgcatgatcaggttgggcaggcgcggttgcttgaatgtggcccctgtaagaaactttattgaagaaggttgcgatggcgttactgatttatacgtggggatctacgatgatcttgctagcactaatttcacagacaggatagctgcgtgggagaatattgttgagtgcacctttaggaccaacaacgtaaaattgggttacctcattgtagatgagtttcacaactttgaaacggaggtctacagacagtctcaatttgggggcataactaaccttgattttgacgcttttgagaaagcaatctttttgagcggcacagcccctgaggctgttgctgatgctgcgttgcagcgtattgggcttacgggattggccaagaagtctatggacatcaacgagctcaaaagaagtgaagatctcagcagaggtttatccagctatccaacaagaatgtttaatttgatcaaggagaaatccgaggtgcctttagggcatgttcataaaatttggaagaaagtggaatctcagcccgaagaagcattgaagcttcttttagccctctttgaaattgaaccagagtctaaggccattgtagttgcaagcacaaccaacgaagtggaagaattggcctgctcttggagaaagtattttagggtggtatggatacacgggaagcttgggtgctgcagaaaaggtgtctcccacaaaggagtttgtcactga

SEQ ID NO: 191 - DNA, 129 bp, Saccharomyces cerevisiae
atgttgactggtattgccccagaccaagtgaccagaatgatcaccggtgttccatggtactccagcagattaaagccagccatctccagtgctctatccaaggacggtatctacactatcgcaaactag

SEQ ID NO: 192 - DNA, 129 bp, Artificial Sequence
  Description of Artificial Sequence: Synthetic polynucleotide
atgttgactggtattgccccagaccaagtgaccagaatgatcaccggtgttccatggtactccagcagattaaagccagccatctccagtgctttgtccaaggacggtatctacactatcgcaaactga

SEQ ID NO: 193 - DNA, 591 bp, Saccharomyces cerevisiae
atggttgataataggcgtacgtttacggcaccccaaagcttacttgaaacaaatcttacttttccgaatgatgaaccgtcacttactacaatcacagttacgcgagaaagatgtgttgatccaagcttgatagattcatttttgaggtttctaaggcatggaagtgatgatataataagacaaaaattaaacaactataggaaaggctctattaatggaaaaaataagtgtaaggaatttttgaagcaagaactatatccgaactggcaaatacggaataatataatttcattttgcgaaaaagaggcagcagagatgaagaacgagaccgatcagcagtgcggtaataataaaaagactactgcggaaccacttatagacgcaagaattgatccttacgctgcaagagaaagagcggagaaacaggaagctcaatataaggattggacgaaggtgacagagtgggtggcaaataatagaaaaatagaacaaattttaacttctacaacagagggcattttaaggcaaaactgcgagcaaaataatgactacttgaaggagtttacgcaattctgcaaggacaacagttga

SEQ ID NO: 194 - DNA, 591 bp, Artificial Sequence
  Description of Artificial Sequence: Synthetic polynucleotide
atggttgataataggcgtacgtttacggcaccccaaagcttacttgaaacaaatcttacttttccgaatgatgaaccgagtcttactacaatcacagttacgagagaaagatgtgttgatccaagcttgatagattcttttttgaggtttttaaggcatggaagtgatgatataataagacaaaaattaaacaactataggaaaggctctattaatggaaaaaataagtgtaaggaatttttgaagcaagaattgtatccgaactggcaaataagaaataatataatttccttttgcgaaaaagaggcagcagagatgaagaacgagaccgatcagcagtgcggtaataataaaaagactactgcggaaccacttatagacgcaagaattgatccttacgctgcaagagaaagagcggagaaacaggaagctcaatataaggattggacgaaggtgacagagtgggtggcaaataatagaaaaatagaacaaattttaacttctacaacagagggcattttaaggcaaaactgcgagcaaaataatgactacttgaaggagtttacgcaattctgcaaggacaacagttga

SEQ ID NO: 195 - DNA, 3033 bp, Saccharomyces cerevisiae
atgtttaagaaaagcaggcatttgaagaatgtgtcaaatgctatcaaatccgcgagagttcatgacgtctcaaatggtattaactccaaatttttcgatactaagaaaatatgcacatacggcataaatggacgaatcactgttaccacattcgactatactcaaagccttttggcagttgcaactactgctggggagatacatgtttatgggcaaaagcaaatagaggtcgtatttacgttaaaaaatcgacctcaaattaaacacatgcggtttattaaaggaatttatctgatagctgtagatgagaagagcaacataatagttctttcagtacactcgaaacagattctaactactgttttctgtccaaacagcatcacttgtattgagactgatccgtccttggattggatgctgattggcctcgagagtggatccatattgatctatgatgtggatagaaatcaaatgtccaaattgaaaattgaaaacttccagaaaagtgtgtttttgccaaaagagaggctatcaccggttatttctatccaatggaatcctagagacataggaacgatacttatatcatatgagcatattacagtcatatattctttcattgactacaaagtcaagcaacattttttttaccaattagaaccgtatgctccgggcggtgatctatccacaaacatagaaaagaaacgcactccaaaggtcattcagtcactttatcacccaaattccttacatatattaactgtccatgaagataattccttggtattttgggatgtcaatagcggtaaactgattcacgctagaagtatatttgaaacacatgtgaattttccaaatcctgccttgaaagactgttcctttacagaaacacccgctatctttaaagtaagctggctttgccagcgtaatcctgagtatacatcgttgttgattgcaacaaaagctacagaaaatccctgtttacctcaggaaataaccatgattgacttaggcggcacaccaatgtattctgtgacatcatttgacgcaatgagcaagtactatgctaaaccggttcaacaaaaactattttcgttgattggcaaagctccactaataaattttctacccttgccgaaggcttctccatattttggtggatgccatgacacaaacctcattttattacttttagaagatggcgaacttgaaacattgatatacccagcaggctcttttagttccaaggcctccattttccctcggagcttagcatgggttcgaccaacggttactacttgtatagcgcaatcagttcaaaaaaatctttggctggggatgatgacaatcgctcaaagtgaatcgtttttaaaaggtggtattcctgccaccagaaatattagaaggcatgagaccagatctgctttactaactgggcatagtaatggttcagtcagaatatgggatgcttcacacagtgaagtaactgacaacgctgtatttgaagtgaatactgctaaagtacttaacagagctactaacctggccataaaaaatatctcctttgcatcggaaacattggaattggcggtatcatctgaggttggggatgttattcttttcaaattcgaaacaaacaagttttacggacaacttcccaaaagcgatgcactgcaattgaagtttagcagattttcattggatgattcaaaaactattttagttgatgtttcggatagagggcctacgaacgttaaacaaggctttataccaagtacggtaatacatgctaaaaaaggtgcggtgtccgcaatcatgaatagtaatatcgggttcgttgccgttggtttcattgaaggaaccttaataatattggacagaagaggcccggctataatcttcaatgaaaatattagggtcatttctaaagctggtagctcttacgtttcaaccgttcacttttgcgtcatggaatatggagatgatgggttctctagtattttgatgctatgtggaacggatatcggggaattgatgactttcaaaatactgcctgcaactaatggaagatttgaggttaaattcactgatgcaacaaagaccaacaatcaaggaaaaattctaggaataaattcttttgccaaagatactggctacagttgttctgctactatatcaaagatgcagggtttaagcaagggtatcgcaatacctggatttgttactatcagtggcgcaaatgacattcgtttagtatcaccaggtaaatctaaggacactcatgcgcttttcaagtatccaattgccactagtggattatcatttattcccattattgacggtaaaggagaaagaaagctttcaactattatgatcgttttgctaattaatggagatattaaagttttgacagtacctgagcttaaggaagtcaaaaatctacgctgcccggtccctctaagcgctcaatacgttgaaaattcatctatattagaaaatggtgacattgtcattcgcacagggaaattccaagcctctttgatttcagtacttaatgaaagtgccaccggaacgaatcatactgctgacatatcacaacatactcctattgataccttgtacaatcctgatttaaagattggttataggcctcaagtgaattccttacaatgggctagaggaactatttattgcacaccatatcaacttgatgagctactgggcggtatagaaaggcccgaatcgaagtatgaggaaagcgcaattgctcgaggatgcatatcttccagtagtagtaatgcagccagaaagttacctcccggtacggaagatcacaggtatgccagacctgtaagaagctctggaagaagtaatggatatggtgtccttaaaagtgtttctagggcaattgaaactcgtttagacacggtagaaaccactattaatgactatgcaaccacaatgggacaaaccatgaatgacgcaatggaagaaacgggaagggatatgatgaagagcgctgtaggtttttag

SEQ ID NO: 196 - DNA, 3033 bp, Artificial Sequence
  Description of Artificial Sequence: Synthetic polynucleotide
atgtttaagaaaagcaggcatttgaagaatgtgagtaatgctatcaaatccgcgagagttcatgacgtctccaatggtattaactccaaatttttcgatactaagaaaatatgcacatacggcataaatggaagaatcactgttaccacattcgactatactcaaagccttttggcagttgcaactactgctggggagatacatgtttatgggcaaaagcaaatagaggtcgtatttacgttaaaaaatagacctcaaattaaacacatgagatttattaaaggaatttatttgatagctgtagatgagaagagcaacataatagttctttctgtacactctaaacagattttgactactgttttctgtccaaacagcatcacttgtattgagactgatccgtccttggattggatgttgattggcctcgagagtggatccatattgatctatgatgtggatagaaatcaaatgtccaaattgaaaattgaaaacttccagaaaagtgtgtttttgccaaaagagaggttatctccggttatttctatccaatggaatcctagagacataggaacgatacttatatcttatgagcatattacagtcatatattctttcattgactacaaagtcaagcaacattttttttaccaattagaaccgtatgctccgggcggtgatttatccacaaacatagaaaagaaacgcactccaaaggtcattcagtctctttatcacccaaattccttacatatattaactgtccatgaagataattccttggtattttgggatgtcaatagcggtaaattgattcacgctagaagtatatttgaaacacatgtgaattttccaaatcctgccttgaaagactgttcctttacagaaacacccgctatctttaaagtaagctggctttgccagcgtaatcctgagtatacatctttgttgattgcaacaaaagctacagaaaatccctgtttacctcaggaaataaccatgattgacttaggcggcacaccaatgtattctgtgacatcttttgacgcaatgagcaagtactatgctaaaccggttcaacaaaaattattttctttgattggcaaagctccattgataaattttttgcccttgccgaaggcttctccatattttggtggatgccatgacacaaacctcattttattacttttagaagatggcgaacttgaaacattgatatacccagcaggctcttttagttccaaggcctccattttccctcgtagcttagcatgggttagaccaacggttactacttgtatagcgcaatctgttcaaaaaaatctttggttagggatgatgacaatcgctcaaagtgaaagttttttaaaaggtggtattcctgccaccagaaatattagaaggcatgagaccagatctgctttattaactgggcatagtaatggttctgtcagaatatgggatgcttctcacagtgaagtaactgacaacgctgtatttgaagtgaatactgctaaagtacttaacagagctactaacttggccataaaaaatatctcctttgcatctgaaacattggaattggcggtatcttctgaggttggggatgttattcttttcaaattcgaaacaaacaagttttacggacaacttcccaaaagcgatgcattacaattgaagtttagcagattttctttggatgattctaaaactattttagttgatgtttctgatagagggcctacgaacgttaaacaaggctttataccaagtacggtaatacatgctaaaaaaggtgcggtgtccgcaatcatgaatagtaatatcgggttcgttgccgttggtttcattgaaggaaccttaataatattggacagaagaggcccggctataatcttcaatgaaaatattagggtcatttctaaagctggtagctcttacgtttctaccgttcacttttgcgtcatggaatatggagatgatgggttctctagtattttgatgctttgtggaacggatatcggggaattgatgactttcaaaatattacctgcaactaatggaagatttgaggttaaattcactgatgcaacaaagaccaacaatcaaggaaaaattttaggaataaattcttttgccaaagatactggctacagttgttctgctactatatccaagatgcagggtttaagcaagggtatcgcaatacctggatttgttactatcagtggcgcaaatgacattcgtttagtatctccaggtaaatctaaggacactcatgcgcttttcaagtatccaattgccactagtggattatcttttattcccattattgacggtaaaggagaaagaaagctttctactattatgatcgttttgttaattaatggagatattaaagttttgacagtacctgagcttaaggaagtcaaaaatttacgctgcccggtccctttaagcgctcaatacgttgaaaattcttctatattagaaaatggtgacattgtcattcgcacagggaaattccaagcctctttgattagtgtacttaatgaaagtgccaccggaacgaatcatactgctgacatatctcaacatactcctattgataccttgtacaatcctgatttaaagattggttataggcctcaagtgaattccttacaatgggctagaggaactatttattgcacaccatatcaacttgatgagttattaggcggtatagaaaggcccgaatccaagtatgaggaaagcgcaattgctagaggatgcatatcttccagtagtagtaatgcagccagaaagttacctcccggtacggaagatcacaggtatgccagacctgtaagaagctctggaagaagtaatggatatggtgtccttaaaagtgtttctagggcaattgaaactcgtttagacacggtagaaaccactattaatgactatgcaaccacaatgggacaaaccatgaatgacgcaatggaagaaacgggaagggatatgatgaagagcgctgtaggtttttga

SEQ ID NO: 197 - DNA, 3456 bp, Saccharomyces cerevisiae
atgagtttttcacaattggagcagaacattaaaaaaaagatagccgtcgaagaaaatattattcggggagcttctgccctcaagaaaaagactagcaatgttatggtcattcagaaatgtaatacgaatattagagaggcacgtcaaaatcttgagtacttggaggatagcttaaaaaaattacggttgaagaccgctcaacaaagtcagggtgaaaatggcagcgaagataatgagcgatgcaattcgaaggaatacgggtttctttctaccaaatcgccaaatgaacacatattttctcgtttggatttagtaaaatatgattgcccttctttggcgcaaagaatccaatacatgttgcaacaattagaattcaaattacaggtggaaaagcaataccaagaagccaatactaaattgactaaattgtatcaaattgacggtgatcaacgtagtagttctgcggcagaagggggtgctatggaatccaaatacaggattcaaatgcttaacaaagctttgaagaaataccaagctattaacgttgactttgatcaatttaaacaccaacccaatgacataatggataatcaacaaccgaaattccgaagaaaacaactgactggcgttctaacaattggaataactgctgctagagatgttgaccatatacaatcaccgatgtttgccaggaagccagagagctacgttactataaaaatcgatgatacgatcaaagccagaacgaagccttctagaaatgacaggtggagtgaagattttcaaattccagttgaaaaagggaatgaaatcgagattactgtatatgataaggtgaacgactcgctcattccagtggctataatgtggttactgctttccgatatcgctgaagaaattcgtaagaagaaagccggacaaacaaatgaacaacaaggatgggtcaacgcttcaaacattaatggtggttcttctctcgctagcgaagagggaagcacattgacttctacatactcaaactcagccattcagtctacttcagcaaagaatgtgcaaggcgaaaatacatcaactagtcaaatcagtacgaattcatggtttgtcttagaaccatccgggcagattttgttaacactaggattccacaagtcttctcaaatagaaaggaagcagttgatgggtggactacatcgtcatggtgctattatcaataggaaagaagagatattcgaacagcatggccaccactttgtacaaaaatcattttacaacattatgtgctgtgcatattgtggtgatttccttcggtatactgggttccaatgtcaagattgtaaatttttatgtcacaaaaaatgttacaccaatgttgttactaagtgtattgctaaaacttctactgatacggatccggacgaggcaaagttgaaccaccgtattcctcatagattcctgcctacttcaaaccgtggtactaaatggtgctgtcactgtggttatattttaccatggggtagacataaagtacgcaaatgttctgaatgtggtataatgtgtcatgctcaatgtgctcatttggttcccgatttctgtggcatgtcgatggaaatggctaataaaattctgaaaacgattcaagacacaaaacgtaatcaagagaaaaagaagaggacagttccgtcggcacagttggggtcatctattggtactgccaatggtagtgatctttccccatccaaattagctgaaagggcaaacgctcctttgcctcctcagccaagaaaacatgataaaactccttcgcctcagaaggtaggaagagattctccaactaagcagcatgatcctattattgataaaagaatttcactacaaacgcacgggcgtgagaaactaaataaatttatcgatgaaaatgaggcctatttaaattttacagaaggtgcacaacaaaccgccgaattttcatcaccagagaaaacactggatccaacgtcgaatagacgttccttgggactcactgatttatctattgagcatagtcaaacttgggaatctaaagatgatttaatgagagatgaacttgaactgtggaaagcacaacgtgaggaaatggaacttgaaataaaacaagatagtggggaaatccaagaggatctagaagttgatcacattgatttagagaccaaacagaaactagactgggagaacaaaaatgatttccgtgaagctgatttgacaatagattccacacacacaaatccattccgcgatatgaatagtgaaacctttcaaattgaacaagaccatgcttcaaaggaagtactacaagaaacagtgtccttggctcctacaagtactcatgcctccagaaccactgatcaacaatctccgcagaaatcacaaaccagcacaagcgcaaagcataaaaagagagcggctaaacgtcgtaaggtttcattagataatttcgtattactcaaagttcttggtaaaggtaattttggtaaagttattttatctaaatcaaagaatactgacaggctttgtgccataaaagttctgaagaaagataatattattcaaaatcatgacatcgagagtgcaagagcagaaaagaaagtatttttgttagccacaaaaactaaacacccattcttaaccaatctatactgctcttttcaaactgaaaaccgtatatattttgctatggagtttattgggggcggtgacttaatgtggcatgttcaaaaccaaagactatctgtaagaagggccaaattttatgccgccgaggtcttactggctctgaaatattttcatgataatggtgtaatataccgtgatttgaagttggaaaacattctattaactccagaaggtcatataaaaattgccgattatggtttgtgtaaagatgaaatgtggtatggtaatagaacttctacattttgtggcacaccagaatttatggctccagaaattttaaaagagcaagaatataccaaagctgtcgattggtgggcatttggggtgctgctatatcaaatgctactgtgccaatctccattctcaggagatgacgaagatgaagtttttaacgctatccttaccgatgaacccttatacccaatagatatggcaggtgagattgtacaaatattccaaggcctattaacaaaagatcctgaaaagaggttgggtgctggtcccagggacgcagacgaagttatggaagaacctttcttccgtaacatcaactttgacgatatcttaaaccttcgcgtgaaaccaccctacatcccagaaattaaatctccggaagatacatcatatttcgagcaagaattcacctctgcgccacccacacttacacctctgccctctgttttgacaacgagccagcaagaagagtttagaggattttcctttatgccagatgatttggatttatga

SEQ ID NO: 198 - DNA, 3456 bp, Artificial Sequence
  Description of Artificial Sequence: Synthetic polynucleotide
atgagtttttctcaattggagcagaacattaaaaaaaagatagccgtcgaagaaaatattattagaggagcttctgccctcaagaaaaagactagcaatgttatggtcattcagaaatgtaatacgaatattagagaggcacgtcaaaatcttgagtacttggaggatagcttaaaaaaattaagattgaagaccgctcaacaaagtcagggtgaaaatggcagcgaagataatgagcgttgcaattctaaggaatacgggtttctttctaccaaatctccaaatgaacacatattttctcgtttggatttagtaaaatatgattgcccttctttggcgcaaagaatccaatacatgttgcaacaattagaattcaaattacaggtggaaaagcaataccaagaagccaatactaaattgactaaattgtatcaaattgacggtgatcaacgtagtagttctgcggcagaagggggtgctatggaatccaaatacaggattcaaatgcttaacaaagctttgaagaaataccaagctattaacgttgactttgatcaatttaaacaccaacccaatgacataatggataatcaacaaccgaaattcagaagaaaacaattgactggcgttttgacaattggaataactgctgctagagatgttgaccatatacaatctccgatgtttgccaggaagccagagagctacgttactataaaaatcgatgatacgatcaaagccagaacgaagccttctagaaatgacaggtggagtgaagattttcaaattccagttgaaaaagggaatgaaatcgagattactgtatatgataaggtgaacgactctctcattccagtggctataatgtggttattactttccgatatcgctgaagaaattcgtaagaagaaagccggacaaacaaatgaacaacaaggatgggtcaacgcttctaacattaatggtggttcttctctcgctagcgaagagggaagcacattgacttctacatactctaactctgccattcagtctacttctgcaaagaatgtgcaaggcgaaaatacatctactagtcaaatcagtacgaattcttggtttgtcttagaaccatccgggcagattttgttaacattaggattccacaagtcttctcaaatagaaaggaagcagttgatgggtggattgcatcgtcatggtgctattatcaataggaaagaagagatattcgaacagcatggccaccactttgtacaaaaaagtttttacaacattatgtgctgtgcatattgtggtgatttccttcgttatactgggttccaatgtcaagattgtaaatttttatgtcacaaaaaatgttacaccaatgttgttactaagtgtattgctaaaacttctactgatacggatccggacgaggcaaagttgaaccaccgtattcctcatagattcttacctacttctaaccgtggtactaaatggtgctgtcactgtggttatattttaccatggggtagacataaagtacgcaaatgttctgaatgtggtataatgtgtcatgctcaatgtgctcatttggttcccgatttctgtggcatgtccatggaaatggctaataaaattttgaaaacgattcaagacacaaaacgtaatcaagagaaaaagaagaggacagttccgagtgcacagttggggagttctattggtactgccaatggtagtgatctttccccatccaaattagctgaaagggcaaacgctcctttgcctcctcagccaagaaaacatgataaaactccttctcctcagaaggtaggaagagattctccaactaagcagcatgatcctattattgataaaagaatttctttacaaacgcacgggcgtgagaaattgaataaatttatcgatgaaaatgaggcctatttaaattttacagaaggtgcacaacaaaccgccgaattttcttctccagagaaaacattagatccaacgtccaatagacgttccttgggactcactgatttatctattgagcatagtcaaacttgggaatctaaagatgatttaatgagagatgaacttgaattatggaaagcacaacgtgaggaaatggaacttgaaataaaacaagatagtggggaaatccaagaggatttggaagttgatcacattgatttagagaccaaacagaaattagactgggagaacaaaaatgatttccgtgaagctgatttgacaatagattccacacacacaaatccattccgcgatatgaatagtgaaacctttcaaattgaacaagaccatgcttccaaggaagtattacaagaaacagtgtccttggctcctacaagtactcatgcctccagaaccactgatcaacaatctccgcagaaatctcaaaccagcacaagcgcaaagcataaaaagagagcggctaaacgtcgtaaggtttctttagataatttcgtattactcaaagttcttggtaaaggtaattttggtaaagttattttatctaaatccaagaatactgacaggctttgtgccataaaagttttgaagaaagataatattattcaaaatcatgacatcgagagtgcaagagcagaaaagaaagtatttttgttagccacaaaaactaaacacccattcttaaccaatctttactgctcttttcaaactgaaaaccgtatatattttgctatggagtttattgggggcggtgacttaatgtggcatgttcaaaaccaaagattatctgtaagaagggccaaattttatgccgccgaggtcttattagctttgaaatattttcatgataatggtgtaatataccgtgatttgaagttggaaaacattttattaactccagaaggtcatataaaaattgccgattatggtttgtgtaaagatgaaatgtggtatggtaatagaacttctacattttgtggcacaccagaatttatggctccagaaattttaaaagagcaagaatataccaaagctgtcgattggtgggcatttggggtgcttttatatcaaatgttattatgccaatctccattcagtggagatgacgaagatgaagtttttaacgctatccttaccgatgaacccttatacccaatagatatggcaggtgagattgtacaaatattccaaggcttattaacaaaagatcctgaaaagaggttgggtgctggtcccagggacgcagacgaagttatggaagaacctttcttccgtaacatcaactttgacgatatcttaaaccttcgcgtgaaaccaccctacatcccagaaattaaatctccggaagatacatcttatttcgagcaagaattcacctctgcgccacccacacttacacctttgccctctgttttgacaacgagccagcaagaagagtttagaggattttcctttatgccagatgatttggatttatga

SEQ ID NO: 199 - DNA, 3117 bp, Saccharomyces cerevisiae
atgggtctcatcaaaaaagtgacccattggtcatatgataatttgattgattatctttcagtgaaccctacaagagatgaagtgacccactataaagtggatccggaaaatgaatctgatgaatcaattattaaattacacactgtgaaagacttcggcagtatcacctgcttagactattcagaatcagaaattggtatgattggagttggtgaaaagaatggatatttaaggatttttaatatctctggacaaaattcctcatcgccagcgagccatgcgccagtgggcttaaatgccaataacgagacttctatgacaaatgccagcggtggtaaggcagctcaggcggaaaatatagttggatctgtctcaaatttaaaggatacccaagggtaccctgtttcagaaaccaattatgatatacgtgtacgagcaaagaagcagcggtgtataaactctctgggaataaatacgaatggtcttatagcaatgggtcttgacagaaataagcatgattcatctttacaaatttgggacatgaattatcatgatgattcgcatgaaactatcaacccaatgtttagttattgcacaaatgaaagcatagtatccctaaagttcctcaacgataccagtgtattggctgcaagtacgaaatttttgaaagaaattgacgtcagatcccccaacccaatttatcaacatccgacacgattgacgtatgatatcaaactgaacccgtttaacgattggcaatttagtacttatggggatgatgggaccttagctatttgggataggagaaaattatctgaccaagcttcacttggtgatttaaatgtagcttcccctttattaacttttgaaaaattggttggatccggtgcagcgtcaaggaaatacatgaactcttgctttaggtggtcatgtgtgaggaacaatgaatttgccaccttacatagaggtgataccatcaaaagatggaggttaggctattactgcgatagcaatcgtgatattgcggcagatgacgataacgagatgaatattgagaatttgtttgtttcttccgtgcatgacacaaatacgatgtacgatagagttgctacatttgattatattccaagaagtaataatggaacaagtctaatctgtatgagacaatcgggaacaatatacagaatgccaatttcagaggtatgctccaaggctatactcaataataggaactctctcttattgtcaaattttgaaaatactgagatagatgaaattagagtcaacaatgagcatgaaaagtccaacttagagaatgtaaaaacaatcctaaagaatctatcgtttgaggatttagatgttagcgaagattactttccgtctggacatgatgaacctaataatgaaattgagtactccgagttgagtgaagaggaaaatgaagggagtaatgatgtccttgacagtaagcgtggatttgaactgttctggaagccagaaaaacttctggaaaaagatataagtgtaataatgaggacgcgagcttcattgggatatggtttggatccaatgaacacggtagagatgattgattcttctaaaaatctacaaaacaatgcttatataaggaacacatggaggtggatcgcgattgcaaaggcttctgttgacgatggtacgatggtttctggtgatcttgacttaggttacgaaggtgtgataggtatttggaatggtataaacggaatatcgaaccaagacagatatagacaagagacaattctttctgataaacaactaaataaagaaatggaaaaaatcatcaaactaagaaggaaaaatagggatcggaacagtcctattgccaatgccgctggttcaccaaagtacgttcagagaagactctgtttaattatctcaggatgggacctttccagatctgattatgaagacaagtacaacataattatgaaaaacggccattatgaaaaagctgccgcttgggcggtattttttggtgatatcccaaaggctgtagaaatattgggatctgcaaaaaaggaaagattgagactaattgccaccgctattgcaggttacttggcgtataaggatctgccaggtaacaatgcatggaggcagcaatgcagaaaaatgtcctccgaattagatgatccttacttgagagttattttcgcctttatcgcagacaatgattggtgggatattctttatgaacctgccatatctttgagagaacgattaggggtagctctaaggtttttgaatgatacagacctaaccactttcttagatagaacttcatctacagttattgaaaacggcgaattagaaggtttaattctcaccggaataacacctaatggtatcgatctactgcaatcatacgttaataaaaccagcgatgttcagagtgccgcactgatatcaattttcggctcccctagatatttccgcgaccaacgagtagatgaatggatacaaacttatagagatatgcttaaatcgtgggaattattctccatgcgagccaggttcgatgttttaagatcaaaattatcgagaactaaaactggtgtattaactgcagacataaagccccggcaaatatatatccaatgtcaaaactgtaaacaaaacatcaacactccgcgcacatcctcaccttctagcgccgtctctactagtgctggaaattacaaaaatggtgaagcctatagaagaaataacgctgactacaagaaatttaatactggaagttctgaagcacaagcagctgatgaaaagccaagacataagtattgttgcccacactgtgggtcttcatttccaagatgtgccatatgtctcatgcctctaggaacgtcaaacttaccttttgtaataaatgggacgcaatcacgcgatccaatgcagacagaagactctcaagatggtgcaaatcgcgaactcgtaagtagaaaactgaagttgaacgagtggttcagcttctgtttgagttgcaaccatggtatgcatgccggtcacgctgaagaatggtttgacagacataatgtttgtcccactccaggttgcacctgccagtgtaataagtag

SEQ ID NO: 200 - DNA, 3117 bp, Artificial Sequence
  Description of Artificial Sequence: Synthetic polynucleotide
atgggtctcatcaaaaaagtgacccattggagttatgataatttgattgattatctttctgtgaaccctacaagagatgaagtgacccactataaagtggatccggaaaatgaatctgatgaaagtattattaaattacacactgtgaaagacttcggcagtatcacctgcttagactattctgaaagtgaaattggtatgattggagttggtgaaaagaatggatatttaaggatttttaatatctctggacaaaattcctcttctccagcgagccatgcgccagtgggcttaaatgccaataacgagacttctatgacaaatgccagcggtggtaaggcagctcaggcggaaaatatagttggatctgtctccaatttaaaggatacccaagggtaccctgtttctgaaaccaattatgatatacgtgtaagagcaaagaagcagcgttgtataaactctttgggaataaatacgaatggtcttatagcaatgggtcttgacagaaataagcatgattcttctttacaaatttgggacatgaattatcatgatgattctcatgaaactatcaacccaatgtttagttattgcacaaatgaaagcatagtatccttgaagttcctcaacgataccagtgtattggctgcaagtacgaaatttttgaaagaaattgacgtcagatcccccaacccaatttatcaacatccgacaagattgacgtatgatatcaaattgaacccgtttaacgattggcaatttagtacttatggggatgatgggaccttagctatttgggataggagaaaattatctgaccaagcttctcttggtgatttaaatgtagcttcccctttattaacttttgaaaaattggttggatccggtgcagcgtccaggaaatacatgaactcttgctttaggtggtcttgtgtgaggaacaatgaatttgccaccttacatagaggtgataccatcaaaagatggaggttaggctattactgcgatagcaatcgtgatattgcggcagatgacgataacgagatgaatattgagaatttgtttgtttcttccgtgcatgacacaaatacgatgtacgatagagttgctacatttgattatattccaagaagtaataatggaacaagtttaatctgtatgagacaaagtggaacaatatacagaatgccaatttctgaggtatgctccaaggctatactcaataataggaactctctcttattgagcaattttgaaaatactgagatagatgaaattagagtcaacaatgagcatgaaaagtccaacttagagaatgtaaaaacaatcttgaagaatttatcttttgaggatttagatgttagcgaagattactttccgtctggacatgatgaacctaataatgaaattgagtactccgagttgagtgaagaggaaaatgaagggagtaatgatgtccttgacagtaagcgtggatttgaattattctggaagccagaaaaacttttagaaaaagatataagtgtaataatgaggacgagggcttctttgggatatggtttggatccaatgaacacggtagagatgattgattcttctaaaaatttacaaaacaatgcttatataaggaacacatggaggtggatcgcgattgcaaaggcttctgttgacgatggtacgatggtttctggtgatcttgacttaggttacgaaggtgtgataggtatttggaatggtataaacggaataagcaaccaagacagatatagacaagagacaattctttctgataaacaattgaataaagaaatggaaaaaatcatcaaattgagaaggaaaaatagggatagaaacagtcctattgccaatgccgctggttctccaaagtacgttcagagaagactctgtttaattatcagtggatgggacctttccagatctgattatgaagacaagtacaacataattatgaaaaacggccattatgaaaaagctgccgcttgggcggtattttttggtgatatcccaaaggctgtagaaatattgggatctgcaaaaaaggaaagattgagattgattgccaccgctattgcaggttacttggcgtataaggatttaccaggtaacaatgcatggaggcagcaatgcagaaaaatgtcctccgaattagatgatccttacttgagagttattttcgcctttatcgcagacaatgattggtgggatattctttatgaacctgccatatctttgagagaaagattaggggtagctttgaggtttttgaatgatacagacttgaccactttcttagatagaacttcttctacagttattgaaaacggcgaattagaaggtttaattctcaccggaataacacctaatggtatcgatttattacaatcttacgttaataaaaccagcgatgttcagagtgccgcattaatatctattttcggctcccctagatatttccgcgaccaaagagtagatgaatggatacaaacttatagagatatgcttaaaagttgggaattattctccatgagagccaggttcgatgttttaagaagtaaattatctagaactaaaactggtgtattaactgcagacataaagcccaggcaaatatatatccaatgtcaaaactgtaaacaaaacatcaacactccgcgcacatcctccccttctagcgccgtctctactagtgctggaaattacaaaaatggtgaagcctatagaagaaataacgctgactacaagaaatttaatactggaagttctgaagcacaagcagctgatgaaaagccaagacataagtattgttgcccacactgtgggtcttcttttccaagatgtgccatatgtctcatgcctttgggaacgtccaacttaccttttgtaataaatgggacgcaaagtcgcgatccaatgcagacagaagactctcaagatggtgcaaatcgcgaactcgtaagtagaaaattgaagttgaacgagtggttcagcttctgtttgagttgcaaccatggtatgcatgccggtcacgctgaagaatggtttgacagacataatgtttgtcccactccaggttgcacctgccagtgtaataagtga

SEQ ID NO: 201 - DNA, 1461 bp, Saccharomyces cerevisiae
atgatgaacaataacgaaagtgaggctgagaaccaacgtctactggacgaattaatgaaccagacaaaagtcctccaggaaactttagatttttcgttagtgacacccactccacaccacaatgatgattacaagatacacggaagtgcctacccaggtggtgagactcctgcccaacagcatgaaaaactctcatacatcaatacgcacaactctaacgataataataacttaatgggcagtcaagcgaggtccaattcacaaactcctacagcttcgaccatatatgaggaagcagaatcgcaatcgtcttacctggatgatatgtttagaacaagccaaggcggtagacctgtcactcaaaattccatatcttccatagggcagggtcccttgagatcatcttattctatggcttacgactcacctgtggatagagcaatgaatactccattacagcaacaagaaggcttaaaagctgagttaccacatgactttttatttcagcatggcaccgatgacacaatgtataacttaactgatgatttgagctcctctttatcttctagcatcaattctgatatgatgacaccaaacacatattcatcatcattttcttataatccacaaagcttgggcccagcatccgtatcttccacatattccccaaaggtaagatcaccatcatcgtcatttcgtgcaggaagtttcctttcatcttcttttaggcatggtagcataaacacacccagaacaagacacacttcaataagtagcaatatgactgaaaatataggacctggaagtgttccaaagattttaggcgggttaacttctgatgagaaactgaggcgcaaaagagagtttcataatgccgtcgaaaggagaagaagagaattaataaagcaaaagataaaagaactcggccagttggttccaccatctttattgaattacgatgacctaggtaaacaaatcaaaccaaataagggtatcattttggatagaacggtcgaatatttacaatacctggccgaaattttagaaatacaagcacgaaaaaagaaggcgttattggcgaagataaaagaattggaagagaagaaaagttctgtcgcagcattatctccttttaccaataaccaccatgccagttcggggcaaaataatagcgagaatagtgaggaaagaattatagatattagatctgtcccaaatgctttgatgaatgaacaaaatagtaaggctgaattgcacaattgggagccaccgttatatgattcggtcggtaaccacaatcatgctggcactatggagagtcatccacatacaaacattcatgaagaattaaaggagttcttatcaggcgatttgattgaagccgaagataatgcaaaattaatgtttggagatgacaactctaatccagctgactatcttttagaatttggttcggggtag

SEQ ID NO: 202 - DNA, 1461 bp, Artificial Sequence
  Description of Artificial Sequence: Synthetic polynucleotide
atgatgaacaataacgaaagtgaggctgagaaccaacgtttattagacgaattaatgaaccagacaaaagtcctccaggaaactttagatttttctttagtgacacccactccacaccacaatgatgattacaagatacacggaagtgcctacccaggtggtgagactcctgcccaacagcatgaaaaactctcttacatcaatacgcacaactctaacgataataataacttaatgggcagtcaagcgaggtccaattctcaaactcctacagctagcaccatatatgaggaagcagaatctcaatcttcttacttggatgatatgtttagaacaagccaaggcggtagacctgtcactcaaaattccatatcttccatagggcagggtcccttgagatcttcttattctatggcttacgactctcctgtggatagagcaatgaatactccattacagcaacaagaaggcttaaaagctgagttaccacatgactttttatttcagcatggcaccgatgacacaatgtataacttaactgatgatttgagctcctctttatcttctagcatcaattctgatatgatgacaccaaacacatattcttcttctttttcttataatccacaaagcttgggcccagcatccgtatcttccacatattccccaaaggtaagatctccatcttcttcttttcgtgcaggaagtttcctttcttcttcttttaggcatggtagcataaacacacccagaacaagacacacttccataagtagcaatatgactgaaaatataggacctggaagtgttccaaagattttaggcgggttaacttctgatgagaaattgaggcgcaaaagagagtttcataatgccgtcgaaaggagaagaagagaattaataaagcaaaagataaaagaactcggccagttggttccaccatctttattgaattacgatgacttgggtaaacaaatcaaaccaaataagggtatcattttggatagaacggtcgaatatttacaatacttggccgaaattttagaaatacaagcaagaaaaaagaaggcgttattggcgaagataaaagaattggaagagaagaaaagttctgtcgcagcattatctccttttaccaataaccaccatgccagttccgggcaaaataatagcgagaatagtgaggaaagaattatagatattagatctgtcccaaatgctttgatgaatgaacaaaatagtaaggctgaattgcacaattgggagccaccgttatatgattctgtcggtaaccacaatcatgctggcactatggagagtcatccacatacaaacattcatgaagaattaaaggagttcttaagtggcgatttgattgaagccgaagataatgcaaaattaatgtttggagatgacaactctaatccagctgactatcttttagaatttggttctgggtga

SEQ ID NO: 203 - DNA, 648 bp, Saccharomyces cerevisiae
atgagcgaggaaccaccttctgaccaggtcaatagtctccgtgactcattgaatcgatggaatcaaacaagacagcagaactcgcagggttttaatgaatctgcgaagacattgttctcaagctgggcggattctctcaataccagggcccaggatatatatcagacgttgcctgtatctagacaggacttggtgcaagaccaggagccgtcgtggttccaattgtcaagaacggaaagaatggtactttttgtctgttttcttttgggtgcaacagcctgtttcactctttgtactttccttttccccgttctagccgctaaaccaagaaagtttggtttactatggacaatggggtccctactatttgttcttgcgtttggggtacttatgggaccactcgcgtacttaaaacatttgactgcaagggaaaggctgcctttttcgatgttctttttcgccacatgcttcatgacgatttatttcgcagccttttccaagaacacggtgctgactattacatgtgctcttcttgaattagttgccgtcatttattatgctatttcatatttcccattcggtgcaacaggtttgaggatgttaagctctgctggtgtcaattcggcaagaggtgttctgcgcatctga

SEQ ID NO: 204 - DNA, 648 bp, Artificial Sequence
  Description of Artificial Sequence: Synthetic polynucleotide
atgagcgaggaaccaccttctgaccaggtcaatagtctccgtgactctttgaatagatggaatcaaacaagacagcagaactctcagggttttaatgaatctgcgaagacattgttcagtagctgggcggattctctcaataccagggcccaggatatatatcagacgttgcctgtatctagacaggacttggtgcaagaccaggagccgagctggttccaattgtccagaacggaaagaatggtactttttgtctgttttcttttgggtgcaacagcctgtttcactctttgtactttccttttccccgttttggccgctaaaccaagaaagtttggtttattatggacaatggggtccttactttttgttcttgcgtttggggtacttatgggaccactcgcgtacttaaaacatttgactgcaagggaaaggttgcctttttccatgttctttttcgccacatgcttcatgacgatttatttcgcagccttttccaagaacacggtgttgactattacatgtgctcttcttgaattagttgccgtcatttattatgctatttcttatttcccattcggtgcaacaggtttgaggatgttaagctctgctggtgtcaattctgcaagaggtgttttgcgcatctga

SEQ ID NO: 205 - DNA, 3354 bp, Saccharomyces cerevisiae
atgccgtttataacatcaagaccggtggcgaaaaattcatcccactctttatcagaaacagatttaaaccagtctaaaggacagccgtttcaaccctctcccaccaagaaattagggtccatgcaacaacgaagaagatcctccaccattaggcacgcgctatcatctttacttggtggcgctaatgttcactcacctgccgtcttgaacaacacaacgaaaggcggcaataataacggcaacatcagaagcagcaatacagacgcccaactccttggcaaaaaacagaacaaacagccgccgccaaacgcaaggcgacacagtaccactgccatacagggctctatcagcgatagtgctactacgactccgagatcctcgacttccgacaccaaccgtcgcacttcgggaagattgtcggtagaccaagagcccagaatctctgggggacgctattcacagattgaggaggatagcacagtactagattttgatgatgaccataactcatcagctgtagtgtcaagcgatttatcatcaacttctctaacaaggttggcaaactcgaaaaagtttaacgagcaatttctcatagaatatttaaccgctagaggtctcctgggcccaaaaaccgttctatccaatgagtacttgaagatttctatttctacaagcggtgaaagcgttttcttaccaacgatatcctcgaatgacgatgagtacctgtccagactaaacggactcaatgatggtacggacgatgctgaggcggatttttttatggatggtatagaccagcaagaaggtaacactccatctctcgctacaacggcagcggctaccgaaagtggtggcagcataaatgaaaatagagacacactcctgagagaaaataattcaggagaccatccaggctccggctcggaacttaatacaaggtctgttgaaatcgacagttccatggtctcttacagcatagcagttatagtatccgttaaaaaaccaacccgatttacggacatgcaattggaattatgttcaagggttaaagtgttttggaatacaggtgttcctcctacaaagacgtttaatgaagaattttataatgctgcatcaatgaaatggaatttgaatgatgaaaacttcgatttgtttgtaccattaagcatatccccagatgatcaaatgattgaaaacaactccaacgatcgtcaaatgaggttgttcaagaatattcctacagaggagagactgtatttggacaagactaaaacaaaagccagccttttaaacgccatagacgtaaataagactcatctttaccaacctggagactatgtattcttagtaccagtggttttctctaatcatattccggagactatctatttaccctctgcacgtgttagttacagactaaggcttgcaacaaaggcaatcaatagaaagggtttctatcgtcaagattcaaactctccgcaacctattgtgtcgccagactcttcttcatcactaagctccactacatcttcattaaaacttaccgaaacagaatccgctcaggcccataggaggataagcaacactttgtttagtaaagttaaaaatcatctacacatgagctcacatcaactgaaaaatgaagaatcaggagaagaggacattttcgcagagtatccaataaaagttattagaactccaccgcccgttgccgtatccactgcgaataaaccaatctatattaatagggtttggacagattctttgtcatacgagatttcctttgctcagaaatacgtttcactaaacagtgaagtcccaatcaagataaaattggcaccgatatgcaaaaacgtttgtgttaaacgtattcatgtcagtattactgaaagagtcacatttgttagtaaaggttatgaatatgagtatgatcaaacagatcccgttgctaaagacccttataatccgtattatttagatttcgcctccaagagaagaaaggaaagaagtgtatcattatttgaaatcagaactaaggagaagggcacgagagctctaagggaggaaattgttgaaaattcattcaatgacaatctcttatcttatagtccttttgatgacgacagcgattcaaaaggcaatccgaaagaaaggctcggtataacggaaccaataattattgaaacaaaattgaagttccccaaatacgaagatttggataaaagaaccgcaaagataataccaccttatggtatcgatgcatacacgagcatccccaatcccgaacatgccgtagccaatggaccctcacaccgtcgtcccagtgtaataggctttttatccggtcataaaggctcgaaaagtcatgaagaaaatgaaaaacctgtttatgatccaaaattccatcaaacaataatcaaatccaattctggtttgcccgtgaaaacacataccagattaaacacaccgaaaagaggcttgtacttggatagtttacacttcagtaatgtttactgtagacataagctggaaattatgctacgaatcagtaaacctgatcctgagtgtccgtccaaattaagacattatgaggttctaatcgatacgcccatattcctggtgtctgaacagtgcaacagtggtaatatggagttacccacttatgatatggccacaatggaaggcaaaggcaaccaggttcctctaagtatgaacagcgacttttttggtaacacatgtccacctccgccaacttttgaagaagccatatccgttccagcttctcccattgtctcaccgatgggatcacctaatatcatggcctcgtatgaccctgatttactatctattcaacaattgaacttatcaagaactacgtcagttagtgggccatccggatacagcgatgatgccggtgtgccaaatgttaatcggaacagtatttcaaatgccaatgccatgaacggcagtatttcgaattccgcatttgtttcgggcaatagtggccaaggtgttgctagagcaagagcaacgtcagtgaatgacaggtcaagattcaataatctcgataaattattgagcactccatcgcccgtcaatagatctcacaattcatcaccaacaaatggcttatcacaagcaaatggtactgtgaggattccaaacgctaccactgaaaactctaaggacaaacagaacgaatttttcaaaaagggttacactttagcgaatgtaaaagatgatgaagaacaagaaggaatagtaagttcgagctccgcagattcgctactctctcatggtaacgagcctccgcgttatgacgaaatagtgcctttgatgagtgatgaagaatga

SEQ ID NO: 206 - DNA, 3354 bp, Artificial Sequence
  Description of Artificial Sequence: Synthetic polynucleotide
atgccgtttataacatctagaccggtggcgaaaaattcttcccactctttatctgaaacagatttaaaccagtctaaaggacagccgtttcaaccctctcccaccaagaaattagggtccatgcaacaaagaagaagatcctccaccattaggcacgcgttatcttctttacttggtggcgctaatgttcactctcctgccgtcttgaacaacacaacgaaaggcggcaataataacggcaacatcagaagcagcaatacagacgcccaactccttggcaaaaaacagaacaaacagccgccgccaaacgcaaggaggcacagtaccactgccatacagggctctatcagcgatagtgctactacgactccgagatccagcacttccgacaccaaccgtcgcacttctggaagattgagtgtagaccaagagcccagaatctctgggggacgctattctcagattgaggaggatagcacagtattggattttgatgatgaccataactcttctgctgtagtgagtagcgatttatcttctacttctttaacaaggttggcaaactccaaaaagtttaacgagcaatttctcatagaatatttaaccgctagaggtctcttaggcccaaaaaccgttttatccaatgagtacttgaagatttctatttctacaagcggtgaaagcgttttcttaccaacgatatcctctaatgacgatgagtacttgtccagattgaacggactcaatgatggtacggacgatgctgaggcggatttttttatggatggtatagaccagcaagaaggtaacactccatctctcgctacaacggcagcggctaccgaaagtggtggcagcataaatgaaaatagagacacactcttgagagaaaataattctggagaccatccaggctccggctctgaacttaatacaaggtctgttgaaatcgacagttccatggtctcttacagcatagcagttatagtatccgttaaaaaaccaaccagatttacggacatgcaattggaattatgttctagggttaaagtgttttggaatacaggtgttcctcctacaaagacgtttaatgaagaattttataatgctgcatctatgaaatggaatttgaatgatgaaaacttcgatttgtttgtaccattaagcatatccccagatgatcaaatgattgaaaacaactccaacgatcgtcaaatgaggttgttcaagaatattcctacagaggagagattatatttggacaagactaaaacaaaagccagccttttaaacgccatagacgtaaataagactcatctttaccaacctggagactatgtattcttagtaccagtggttttctctaatcatattccggagactatctatttaccctctgcacgtgttagttacagattaaggcttgcaacaaaggcaatcaatagaaagggtttctatcgtcaagattccaactctccgcaacctattgtgtctccagactcttcttcttctttaagctccactacatcttctttaaaacttaccgaaacagaatccgctcaggcccataggaggataagcaacactttgtttagtaaagttaaaaatcatttgcacatgagctctcatcaattgaaaaatgaagaatctggagaagaggacattttcgcagagtatccaataaaagttattagaactccaccgcccgttgccgtatccactgcgaataaaccaatctatattaatagggtttggacagattctttgagttacgagatttcctttgctcagaaatacgtttctttgaacagtgaagtcccaatcaagataaaattggcaccgatatgcaaaaacgtttgtgttaaacgtattcatgtcagtattactgaaagagtcacatttgttagtaaaggttatgaatatgagtatgatcaaacagatcccgttgctaaagacccttataatccgtattatttagatttcgcctccaagagaagaaaggaaagaagtgtatctttatttgaaatcagaactaaggagaagggcacgagagctttgagggaggaaattgttgaaaattctttcaatgacaatctcttatcttatagtccttttgatgacgacagcgattctaaaggcaatccgaaagaaaggctcggtataacggaaccaataattattgaaacaaaattgaagttccccaaatacgaagatttggataaaagaaccgcaaagataataccaccttatggtatcgatgcatacacgagcatccccaatcccgaacatgccgtagccaatggaccctctcaccgtcgtcccagtgtaataggctttttatccggtcataaaggctctaaaagtcatgaagaaaatgaaaaacctgtttatgatccaaaattccatcaaacaataatcaaatccaattctggtttgcccgtgaaaacacataccagattaaacacaccgaaaagaggcttgtacttggatagtttacacttcagtaatgtttactgtagacataagttggaaattatgttaagaatcagtaaacctgatcctgagtgtccgtccaaattaagacattatgaggttttgatcgatacgcccatattcttggtgtctgaacagtgcaacagtggtaatatggagttacccacttatgatatggccacaatggaaggcaaaggcaaccaggttcctttgagtatgaacagcgacttttttggtaacacatgtccacctccgccaacttttgaagaagccatatccgttccagcttctcccattgtctctccgatgggatctcctaatatcatggcctcttatgaccctgatttattatctattcaacaattgaacttatctagaactacgtctgttagtgggccatccggatacagcgatgatgccggtgtgccaaatgttaatagaaacagtatttctaatgccaatgccatgaacggcagtatttctaattccgcatttgtttctggcaatagtggccaaggtgttgctagagcaagagcaacgtctgtgaatgacaggagcagattcaataatctcgataaattattgagcactccatctcccgtcaatagatctcacaattcttctccaacaaatggcttatctcaagcaaatggtactgtgaggattccaaacgctaccactgaaaactctaaggacaaacagaacgaatttttcaaaaagggttacactttagcgaatgtaaaagatgatgaagaacaagaaggaatagtaagtagtagctccgcagattctttactctctcatggtaacgagcctccgcgttatgacgaaatagtgcctttgatgagtgatgaagaatga

SEQ ID NO: 207 - DNA, 120 bp, Saccharomyces cerevisiae
atgagtcgttctattttttttttctcgtccctttttttgtcccctcttaacaaaattagaaatataggcgggaaagtggagaacccttggaagagtcagatcagagattggaaaaattaa

SEQ ID NO: 208 - DNA, 120 bp, Artificial Sequence
  Description of Artificial Sequence: Synthetic polynucleotide
atgagtcgttctattttttttttctcttccctttttttgtcccctcttaacaaaattagaaatataggcgggaaagtggagaacccttggaagagtcagatcagagattggaaaaattga

SEQ ID NO: 209 - DNA, 1638 bp, Saccharomyces cerevisiae
atgttggctcgtactgctgctattcgttctctatcgagaactctaattaactctaccaaggccgcaagacctgccgctgctgctttggcttccaccagaagattggcttccaccaaggcacaacccacagaagtttcctccatcttagaggaaagaattaagggtgtgtccgacgaggccaatttgaacgaaactggtagagttcttgcagtcggtgatggtattgctcgtgtttttggtttgaacaacattcaggctgaagaattggtcgagttctcctctggtgttaaaggtatggctttgaacttggagcctggtcaagtcggtatcgttcttttcggttccgatagactggttaaagaaggtgaattggtcaagagaaccggtaatattgttgatgtcccagtcggtccaggccttttgggtagagttgtcgacgctttaggtaaccctattgatggtaaaggtcctattgacgctgccggtcgttcaagagctcaagtcaaagcaccaggtattttgccaagaagatctgtccatgaaccagttcaaaccggtttgaaagccgttgacgccttggtccctatcggtagaggtcaaagagagttgattattggtgatcgtcaaacaggtaagactgctgtcgccttagacaccatcttgaatcaaaagagatggaataacggtagtgacgaatccaagaaactttactgtgtttacgttgccgttggacaaaaaagatctaccgttgctcaattggtccaaactttggaacaacatgacgccatgaagtactctattattgttgcagctactgcatctgaagccgctcctctacaatacttggctccatttactgccgcatccattggtgaatggttcagagataatggaaagcacgctttgatcgtctatgacgatttgtccaagcaagccgtggcataccgtcaattatctttgttgttgagacgtcctcctggtcgtgaagcctaccctggtgatgtcttttacttgcattcaagattgctagaaagagccgctaagctttctgaaaaggaaggttctggttctttaactgctttgcctgttattgaaacccaaggtggtgatgtctccgcttatattccaaccaatgttatttccattaccgatggtcaaattttcttggaagctgaattattctacaagggtatcagacctgccattaacgttggtttgtccgtttctcgtgtcggttccgctgctcaagttaaggctttgaagcaagtcgctggttccttgaaattgtttttggctcaatacagagaagtcgctgcttttgctcaattcggttccgatttagatgcctccaccaagcaaactttggttagaggtgaaagattgactcaattgttgaagcaaaaccaatattctcctttggctacagaagaacaggttccattgatttatgccggtgttaatggtcatttggatggtattgaactatcaagaattggtgaatttgagtcctcctttttgtcctatctaaaatccaatcacaatgagcttttgaccgaaattagagaaaagggtgaattgtctaaagaattgttggcatctctaaagagtgctactgaatcatttgttgccactttttaa

SEQ ID NO: 210 - DNA, 1638 bp, Artificial Sequence
  Description of Artificial Sequence: Synthetic polynucleotide
atgttggctcgtactgctgctattcgttctttatctagaactttgattaactctaccaaggccgcaagacctgccgctgctgctttggcttccaccagaagattggcttccaccaaggcacaacccacagaagtttcctccatcttagaggaaagaattaagggtgtgtccgacgaggccaatttgaacgaaactggtagagttcttgcagtcggtgatggtattgctcgtgtttttggtttgaacaacattcaggctgaagaattggtcgagttctcctctggtgttaaaggtatggctttgaacttggagcctggtcaagtcggtatcgttcttttcggttccgatagattggttaaagaaggtgaattggtcaagagaaccggtaatattgttgatgtcccagtcggtccaggccttttgggtagagttgtcgacgctttaggtaaccctattgatggtaaaggtcctattgacgctgccggtcgttccagagctcaagtcaaagcaccaggtattttgccaagaagatctgtccatgaaccagttcaaaccggtttgaaagccgttgacgccttggtccctatcggtagaggtcaaagagagttgattattggtgatcgtcaaacaggtaagactgctgtcgccttagacaccatcttgaatcaaaagagatggaataacggtagtgacgaatccaagaaactttactgtgtttacgttgccgttggacaaaaaagatctaccgttgctcaattggtccaaactttggaacaacatgacgccatgaagtactctattattgttgcagctactgcatctgaagccgctcctttacaatacttggctccatttactgccgcatccattggtgaatggttcagagataatggaaagcacgctttgatcgtctatgacgatttgtccaagcaagccgtggcataccgtcaattatctttgttgttgagacgtcctcctggtcgtgaagcctaccctggtgatgtcttttacttgcattccagattgttggaaagagccgctaagctttctgaaaaggaaggttctggttctttaactgctttgcctgttattgaaacccaaggtggtgatgtctccgcttatattccaaccaatgttatttccattaccgatggtcaaattttcttggaagctgaattattctacaagggtatcagacctgccattaacgttggtttgtccgtttctcgtgtcggttccgctgctcaagttaaggctttgaagcaagtcgctggttccttgaaattgtttttggctcaatacagagaagtcgctgcttttgctcaattcggttccgatttagatgcctccaccaagcaaactttggttagaggtgaaagattgactcaattgttgaagcaaaaccaatattctcctttggctacagaagaacaggttccattgatttatgccggtgttaatggtcatttggatggtattgaattatctagaattggtgaatttgagtcctcctttttgtcctatttgaaatccaatcacaatgagcttttgaccgaaattagagaaaagggtgaattgtctaaagaattgttggcatctttgaagagtgctactgaaagttttgttgccactttttga

SEQ ID NO: 211 - DNA, 1383 bp, Saccharomyces cerevisiae
atgtctgaatcagtggccattataggtgcaggattagtaggctgccttgcagctttggcattctccaaagaaggctacaatgtcacactatatgattttagacaagatcctcgattggacaccaccaaaaataaaaatttgaaatccattaatttggctatttctgctcgtggcattgatgctctgaaatcaatagatccggatgcttgtgaacatattctgcaagatatgattcccatgaaaggcaggatgattcatgacttgaaaggcagacaggaatcacaattgtatggcttgcatggagaagctattaattctatcaatagatctgtattaaataatagccttttggacgaattagaaaaatctacaacagaactgaagttcggtcacaaattagtcaaaatcgaatggacagatgataaacaaatctgtcattttgccattggggaagatttgaaaaccccacatactgaaaagtatgattttgtcataggttgtgacggagcatactctgcgacgagatcgcaaatgcaacgtaaagttgagatggatttttcacaagaatatatgaatttacgttacattgaactttacatcccgcctactgaggaattcaagccaaactatggcggaaattttgcaatagctcctgaccatttgcacatttggcctcgtcataaattcatgttaattgcgctcgccaacagtgacggctcgttcacttcaacctttttcggttctaaagatcaaatatcagatctgataacttccaagtcacgtgtgagggaattcttaatcgagaactttcccgatattattaatattatggatttggacgatgctgtcaaaaggtttatcacttatccaaaggaaagtcttgtctgtgtaaactgtaagccatacgatgtaccaggcggaaaggccatcctactcggcgacgctgcccatgcaatggttccattttacggccaaggtatgaattgcggatttgaagatgtgagaattcttatggcgctattgaaaaagcattcaggagatcgttcaagagcctttactgagtacactcaaacaagacataaggacctagtttctattactgagctggcaaaaaggaactataaagaaatgtcacatgacgttacatccaagcggtttttattaaggaaaaagctagatgctctctttagtattataatgaaggataagtggatacctttgtatacaatgatatctttcagatccgatatctcgtattctagagctttagaaagggctggaaagcaaacacgtatcttgaaattcttagaatctctgacactcggtatgttatctattggcggttacaagcttttcaaatttttgacaagagaacgttcctga

SEQ ID NO: 212 - DNA, 1383 bp, Artificial Sequence
  Description of Artificial Sequence: Synthetic polynucleotide
atgtctgaatctgtggccattataggtgcaggattagtaggctgccttgcagctttggcattctccaaagaaggctacaatgtcacattatatgattttagacaagatcctagattggacaccaccaaaaataaaaatttgaaatccattaatttggctatttctgctcgtggcattgatgctttgaaatctatagatccggatgcttgtgaacatattttacaagatatgattcccatgaaaggcaggatgattcatgacttgaaaggcagacaggaatctcaattgtatggcttgcatggagaagctattaattctatcaatagatctgtattaaataatagccttttggacgaattagaaaaatctacaacagaattgaagttcggtcacaaattagtcaaaatcgaatggacagatgataaacaaatctgtcattttgccattggggaagatttgaaaaccccacatactgaaaagtatgattttgtcataggttgtgacggagcatactctgcgacgagatctcaaatgcaacgtaaagttgagatggatttttctcaagaatatatgaatttacgttacattgaactttacatcccgcctactgaggaattcaagccaaactatggcggaaattttgcaatagctcctgaccatttgcacatttggcctcgtcataaattcatgttaattgcgctcgccaacagtgacggcagtttcacttctacctttttcggttctaaagatcaaatatctgatttgataacttccaagtctcgtgtgagggaattcttaatcgagaactttcccgatattattaatattatggatttggacgatgctgtcaaaaggtttatcacttatccaaaggaaagtcttgtctgtgtaaactgtaagccatacgatgtaccaggcggaaaggccatcttactcggcgacgctgcccatgcaatggttccattttacggccaaggtatgaattgcggatttgaagatgtgagaattcttatggcgttattgaaaaagcattctggagatcgttccagagcctttactgagtacactcaaacaagacataaggacttggtttctattactgagttggcaaaaaggaactataaagaaatgtcccatgacgttacatccaagagatttttattaaggaaaaagttggatgctctctttagtattataatgaaggataagtggatacctttgtatacaatgatatctttcagatccgatatcagttattctagagctttagaaagggctggaaagcaaacacgtatcttgaaattcttagaatctttaacactcggtatgttatctattggcggttacaagcttttcaaatttttgacaagagaacgttcctga

SEQ ID NO: 213 - DNA, 2265 bp, Saccharomyces cerevisiae
atgactacacaactaaggtatgaaaataacgatgacgatgaaagagtagaatataatctctttaccaatagatccaccatgatggcaaattttgaagaatggatcaaaatggctacagataataaaatcaattcccgaaatagttggaatttcgcattgatcgactatttttatgacttggacgttttgaaagatggcgagaataacatcaattttcagaaagcatctgcaaccttggatgggtgtattaagatttactcttcgagagttgattcagtgacaacggaaacaggtaagttattgagcgggttggcacaaagaaagacgaatggggcatctaacggagatgacagtaacgggggaaatggtgaagggcttggaggtgacagtgacgaagcaaatatagagattgatcccttaactggtatgcctatatctaatgatcctgatgtgaataacactaggcggagagtgtacaacagagttttagaaacaacattggtggagttcgaaacgatcaagatgaaagagctagaccaggaattaataattgatccattattcaaaaaggccttggttgatttcgatgaaggtggcgccaagagtttattgttgaacacattaaacatagacaacactgcaagagtcattttcgatgcatcaattaaggatacacaaaacgtagggcaaggtaaacttcaaaggaaagaagaagaattaattgaaagagatagtttagtagatgacgaaaatgaacctagccagtcattgataagtactcgtaatgactcaaccgtaaatgattccgttattagtgcaccttccatggaagatgagattttatctcttggtatggattttataaaatttgatcaaattgcggtgtgtgaaatttcaggatcgattgagcaactaaggaacgttgtcgaagatattaatcaagcgaaagactttatcgaaaatgttaacaacagatttgataacttcttaactgaagaagaattgcaagcagctgtcccagataatgcagaagatgatagcgatggctttgatatgggcatgcaacaggagctgtgctatccagatgaaaatcatgacaatacatcacatgatgaacaagatgatgataatgtcaacagtaccacaggaagtatattcgaaaaagatttgatggcatactttgacgaaaatctaaatagaaactggagagggagagaacattggaaagtacgaaattttaagaaagcaaacttagtgaataaagaatccgacctgttggaagaaacgcgaactactataggagatactactgacaaaaacacaacggacgacaaatcgatggatacgaagaagaagcataaacaaaaaaaggttctggaaattgatttcttcaaaacggatgatagttttgaagacaaagtctttgcctcaaaaggaaggacaaagattgacatgccgattaagaacagaaagaacgacacacattatttactgccggatgacttccatttttccactgatagaataacaagattgttcattaaaccggggcagaaaatgagtctgttcagtcataggaagcataccagaggcgacgttagttcggggctttttgaaaaaagcacagtttctgccaaccattcaaataacgacattcctactattgcagatgagcacttttgggcggataattacgaaaggaaagaacaagaggaaaaagaaaaggagcagtctaaagaggttggtgatgtggtgggtggagcgctcgataatccgtttgaagatgacatggacggtgttgacttcaaccaagctttcgaaggaacagatgataacgaggaggccagtgtgaaacttgatttacaggatgacgaagatcataagttccccattcgagaaaataaagttacttattcaagagtttcgaaaaaagttgacgtaagaagattaaagaaaaacgtatggagatcgatcaacaatttgatacaagaacatgacagtaggaaaaatagagaacaaagctctaatgacagtgaaacccacacagaagatgaatcaacaaaggagctcaagttttctgatatcattcagggtataagtaaaatgtattcggatgatacactaaaggacatttcaacaagcttttgttttatatgccttctacacttagccaatgagcatgggttgcagataactcataccgaaaactataatgacttgatagtgaattatgaggatctagcgacaacacaggcagcgtcatag

SEQ ID NO: 214 - DNA, 2265 bp, Artificial Sequence
  Description of Artificial Sequence: Synthetic polynucleotide
atgactacacaattaaggtatgaaaataacgatgacgatgaaagagtagaatataatctctttaccaatagatccaccatgatggcaaattttgaagaatggatcaaaatggctacagataataaaatcaattccagaaatagttggaatttcgcattgatcgactatttttatgacttggacgttttgaaagatggcgagaataacatcaattttcagaaagcatctgcaaccttggatgggtgtattaagatttactcttctagagttgattctgtgacaacggaaacaggtaagttattgagcgggttggcacaaagaaagacgaatggggcatctaacggagatgacagtaacgggggaaatggtgaagggcttggaggtgacagtgacgaagcaaatatagagattgatcccttaactggtatgcctatatctaatgatcctgatgtgaataacactaggagaagagtgtacaacagagttttagaaacaacattggtggagttcgaaacgatcaagatgaaagagttggaccaggaattaataattgatccattattcaaaaaggccttggttgatttcgatgaaggtggcgccaagagtttattgttgaacacattaaacatagacaacactgcaagagtcattttcgatgcatctattaaggatacacaaaacgtagggcaaggtaaacttcaaaggaaagaagaagaattaattgaaagagatagtttagtagatgacgaaaatgaacctagccagtctttgataagtactcgtaatgactctaccgtaaatgattccgttattagtgcaccttccatggaagatgagattttatctcttggtatggattttataaaatttgatcaaattgcggtgtgtgaaatttctggatctattgagcaattaaggaacgttgtcgaagatattaatcaagcgaaagactttatcgaaaatgttaacaacagatttgataacttcttaactgaagaagaattgcaagcagctgtcccagataatgcagaagatgatagcgatggctttgatatgggcatgcaacaggagctctgctatccagatgaaaatcatgacaatacatctcatgatgaacaagatgatgataatgtcaacagtaccacaggaagtatattcgaaaaagatttgatggcatactttgacgaaaatttgaatagaaactggagagggagagaacattggaaagtaagaaattttaagaaagcaaacttagtgaataaagaatccgacttgttggaagaaacgagaactactataggagatactactgacaaaaacacaacggacgacaaatctatggatacgaagaagaagcataaacaaaaaaaggttttggaaattgatttcttcaaaacggatgatagttttgaagacaaagtctttgcctccaaaggaaggacaaagattgacatgccgattaagaacagaaagaacgacacacattatttattaccggatgacttccatttttccactgatagaataacaagattgttcattaaaccggggcagaaaatgagtttattcagtcataggaagcataccagaggcgacgttagttccgggctttttgaaaaaagcacagtttctgccaaccattctaataacgacattcctactattgcagatgagcacttttgggcggataattacgaaaggaaagaacaagaggaaaaagaaaaggagcagtctaaagaggttggtgatgtggtgggtggagcgctcgataatccgtttgaagatgacatggacggtgttgacttcaaccaagctttcgaaggaacagatgataacgaggaggccagtgtgaaacttgatttacaggatgacgaagatcataagttccccattagagaaaataaagttacttattctagagtttccaaaaaagttgacgtaagaagattaaagaaaaacgtatggagatctatcaacaatttgatacaagaacatgacagtaggaaaaatagagaacaaagctctaatgacagtgaaacccacacagaagatgaatctacaaaggagctcaagttttctgatatcattcagggtataagtaaaatgtattctgatgatacattgaaggacatttctacaagcttttgttttatatgccttttacacttagccaatgagcatgggttgcagataactcataccgaaaactataatgacttgatagtgaattatgaggatttggcgacaacacaggcagcgtcttga

SEQ ID NO: 215 - DNA, 813 bp, Saccharomyces cerevisiae
atgtccagaactattccatttctatttaaattagtcaacagggcagtaattttgcctacggcaggttttacattaggagttggtgcgtttgtaaaggcgtggcccgatgatgccggtgttctatcattgaatgatccgcaaacgccagcggagttgattagtgcgaccaagagccgccaacctatggagctgcagagggttgacatcctcgctcaaatcgagaaaagcgaggtttacaacaagttggcccaggatgagaagatgcaccatgtcttattcagtgagaaaataccaagcgggcatagggaatatcatgtaggacaaggcctcttgttcggcaaggggaagcttgaaattgatcctttggtgttccatgatgtgaatcacggtgaattaaccgtgatttatcacttaggtgctgagttagggaatcgagacggtaacgtccataagggcttgttgtcattgttgctggatgaagcattgtgctattgtggcttccctttgttgcctagtaaaagaggtgtaactgcaaggctgtcgctagagttttttgaggacattcctgtagatactacgattatactaaaagcaaacgtcaaagagattaaaggcagaaagtgtatcattgagggacacttggaacagtttccgttggaagtttcttctcgaaatggaactagaagttggaacttaccacatatttggggtttcaaccataagcaggagatggcaaaaaaatttgccaaggccaattgtattctcgttgagcctacttggttcaaatattttaaatggcttgatatgttttga

SEQ ID NO: 216 - DNA, 813 bp, Artificial Sequence
  Description of Artificial Sequence: Synthetic polynucleotide
atgtccagaactattccatttttgtttaaattagtcaacagggcagtaattttgcctacggcaggttttacattaggagttggtgcgtttgtaaaggcgtggcccgatgatgccggtgttttatctttgaatgatccgcaaacgccagcggagttgattagtgcgaccaagagccgccaacctatggagttacagagggttgacatcctcgctcaaatcgagaaaagcgaggtttacaacaagttggcccaggatgagaagatgcaccatgtcttattcagtgagaaaataccaagcgggcatagggaatatcatgtaggacaaggcctcttgttcggcaaggggaagcttgaaattgatcctttggtgttccatgatgtgaatcacggtgaattaaccgtgatttatcacttaggtgctgagttagggaatagagacggtaacgtccataagggcttgttgtctttgttgttggatgaagcattgtgctattgtggcttccctttgttgcctagtaaaagaggtgtaactgcaaggctttctttggagttttttgaggacattcctgtagatactacgattatattgaaagcaaacgtcaaagagattaaaggcagaaagtgtatcattgagggacacttggaacagtttccgttggaagtttcttctagaaatggaactagaagttggaacttaccacatatttggggtttcaaccataagcaggagatggcaaaaaaatttgccaaggccaattgtattctcgttgagcctacttggttcaaatattttaaatggcttgatatgttttga

SEQ ID NO: 217 - DNA, 663 bp, Saccharomyces cerevisiae
atggcttctagagtggacgaaactacagtcccctcatactactattacgtggatccggaaactacatatacgtaccaacaaccaaatcctctacaggacttgatatcggtgtatggcttggatgacatctccaggcaagtggcaagaacaaatttggacggcactaaagccgtgaagctaagaaaatcttacaagaaccagatagcagatctttcaggtaaattctccaccataccgaccagagaaaatggtaaaggtggtcaaatagcacatattcttttccaaaataacccagacatgatgatacaaccacctcagcagggtcaaaacatgtcagagcaacaatggcgcgaacagctgcgcaatagagacatagcattgtttcagcctccaaatttcgattgggacctttgctcttcggtactatcgcagtttgaaaggtcatatccaagcgagttcgcaaaccagaaccaagggggagcccaagcgccgtttgatatagacgacttggcgtttgatctagacggtacaggaaaaagccaatccggctcaaattcaggtaacaatagtaagaaaaggaagaacaaatctagtggaagttcgatggctacaccaacacatagtgacagtcatgaggatatgaaaagaaggaggctggagtag

SEQ ID NO: 218 - DNA, 663 bp, Artificial Sequence
  Description of Artificial Sequence: Synthetic polynucleotide
atggcttctagagtggacgaaactacagtcccctcttactactattacgtggatccggaaactacatatacgtaccaacaaccaaatcctttgcaggacttgatatctgtgtatggcttggatgacatctccaggcaagtggcaagaacaaatttggacggcactaaagccgtgaagttgagaaaatcttacaagaaccagatagcagatctttctggtaaattctccaccataccgaccagagaaaatggtaaaggtggtcaaatagcacatattcttttccaaaataacccagacatgatgatacaaccacctcagcagggtcaaaacatgtctgagcaacaatggcgcgaacagttgcgcaatagagacatagcattgtttcagcctccaaatttcgattgggacctttgctcttctgtattatctcagtttgaaaggagttatccaagcgagttcgcaaaccagaaccaagggggagcccaagcgccgtttgatatagacgacttggcgtttgatttggacggtacaggaaaaagccaatccggcagtaattctggtaacaatagtaagaaaaggaagaacaaatctagtggaagttctatggctacaccaacacatagtgacagtcatgaggatatgaaaagaaggaggttagagtga

SEQ ID NO: 219 - DNA, 393 bp, Saccharomyces cerevisiae
atggcctccttacctcacccaaagattgtcaagaagcacaccaagaagttcaagcgtcatcactctgaccgttaccacagagttgctgaaaactggagaaagcaaaagggtattgactctgttgttagaagaagattcagaggtaacatctctcaaccaaagatcggttacggttctaacaagaagaccaagtttttgtcaccatctggtcacaagactttcttagtcgctaacgttaaggatttggaaaccttgaccatgcacaccaagacttacgccgctgaaattgctcacaacatctccgctaagaacagagttgtcattttggctagagctaaggctttgggtatcaaggtcaccaacccaaagggtcgtttggctttggaagcttaa

SEQ ID NO: 220 - DNA, 393 bp, Artificial Sequence
  Description of Artificial Sequence: Synthetic polynucleotide
atggcctccttacctcacccaaagattgtcaagaagcacaccaagaagttcaagcgtcatcactctgaccgttaccacagagttgctgaaaactggagaaagcaaaagggtattgactctgttgttagaagaagattcagaggtaacatctctcaaccaaagatcggttacggttctaacaagaagaccaagtttttgtctccatctggtcacaagactttcttagtcgctaacgttaaggatttggaaaccttgaccatgcacaccaagacttacgccgctgaaattgctcacaacatctccgctaagaacagagttgtcattttggctagagctaaggctttgggtatcaaggtcaccaacccaaagggtcgtttggctttggaagcttga

SEQ ID NO: 221 - DNA, 528 bp, Saccharomyces cerevisiae
atgagaatagtgccagaaaagctggtgttcaaggctccccttaataaacaatcaacagagtatataaagctcgagaacgatggtgaaaagagagttatatttaaagtgaggactagtgctcccacaaagtattgtgtgaggcccaatgtggccatcataggtgctcatgaaagtgtaaatgtccaaattgttttccttggattacccaagtcaaccgctgacgatgaaatggaccaaaaacgagacaaattcttgatcgttacacttcctatcccggcagcttaccaaaacgtggaggatggcgagctgttgtccgattggcctaatctggaagagcagtacaaagatgacatagtcttcaagaagatcaaaatatttcactccgtgttaccgaaaagaaaaccgtctggaaaccacgatgcagaatcagcaagagcgccatcagcaggtaacgggcaaagtctgagttccagagcattgcttatcatcaccgttatcgcattgctcgtcggctggatatactactga

SEQ ID NO: 222 - DNA, 528 bp, Artificial Sequence
  Description of Artificial Sequence: Synthetic polynucleotide
atgagaatagtgccagaaaagttagtgttcaaggctccccttaataaacaaagtacagagtatataaagctcgagaacgatggtgaaaagagagttatatttaaagtgaggactagtgctcccacaaagtattgtgtgaggcccaatgtggccatcataggtgctcatgaaagtgtaaatgtccaaattgttttccttggattacccaagtctaccgctgacgatgaaatggaccaaaaaagagacaaattcttgatcgttacacttcctatcccggcagcttaccaaaacgtggaggatggcgagttattgtccgattggcctaatttggaagagcagtacaaagatgacatagtcttcaagaagatcaaaatatttcactccgtgttaccgaaaagaaaaccgtctggaaaccacgatgcagaaagtgcaagagcgccatctgcaggtaacgggcaaagtttaagttccagagcattgcttatcatcaccgttatcgcattgctcgtcggctggatatactactga

SEQ ID NO: 223 - DNA, 1266 bp, Saccharomyces cerevisiae
atgacagacgctgaaatagaaaattcccctgcttctgatttaaaagaattgaatttggagaatgaaggcgttgaacagcaagaccaggcaaaagctgacgagtcagacccagtagaaagcaaaaagaagaagaacaagaaaaagaagaagaagaaaagcaatgtgaagaagattgaattactgtttccagatggaaagtacccagaaggtgcgtggatggactatcatcaagatttcaatctgcaaagaaccacggatgaagaatcacgttatttgaaaagggatctggaaagggccgaacattggaatgatgtcagaaagggtgctgagatacatcgtcgtgtgagaagggccatcaaggacagaatcgttcctgggatgaagttaatggatatcgctgacatgatcgaaaatactacaagaaagtatacaggtgccgaaaatttattagcgatggaggatcccaaatctcaaggtattgggtttccaacgggtctctctctcaaccattgtgctgcacatttcacacccaatgcaggcgacaaaaccgttctgaaatacgaagacgtgatgaaggtagattatggtgtgcaggtaaacggtaacatcattgattctgcctttactgtttcctttgatccacaatacgataacctgctagccgctgtaaaggacgctacttacacgggtattaaagaagcgggtatcgatgtgagattaaccgacatcggtgaagccatccaagaagttatggaatcctacgaagtggaaatcaatggtgagacttaccaggttaaaccttgtcgtaatctatgtggccacagtatcgcaccatatcgtatccacggcggtaaatccgttcccatcgtcaaaaatggggacactacaaaaatggaggaaggtgagcactttgccattgaaacttttggttctactggtagaggttatgttactgccggtggggaagtttctcattatgccagatctgctgaagaccatcaggtaatgcccacgttagacagcgccaagaacttgttaaaaacgatagaccgcaactttgggactttaccgttctgtcgccgatacctagacagacttggccaagagaaatacttatttgcgttgaataacttggttagacacggtttagtacaggattatccaccattgaacgatatccccggatcctacactgcacaattcgaacacaccatcttgttgcatgctcacaaaaaggaagtcgtttcgaaaggtgatgactactga

SEQ ID NO: 224 - DNA, 1266 bp, Artificial Sequence
  Description of Artificial Sequence: Synthetic polynucleotide
atgacagacgctgaaatagaaaattcccctgcttctgatttaaaagaattgaatttggagaatgaaggcgttgaacagcaagaccaggcaaaagctgacgagagtgacccagtagaaagcaaaaagaagaagaacaagaaaaagaagaagaagaaaagcaatgtgaagaagattgaattactttttccagatggaaagtacccagaaggtgcgtggatggactatcatcaagatttcaatttacaaagaaccacggatgaagaatcccgttatttgaaaagggatttggaaagggccgaacattggaatgatgtcagaaagggtgctgagatacatcgtcgtgtgagaagggccatcaaggacagaatcgttcctgggatgaagttaatggatatcgctgacatgatcgaaaatactacaagaaagtatacaggtgccgaaaatttattagcgatggaggatcccaaatctcaaggtattgggtttccaacgggtctctctctcaaccattgtgctgcacatttcacacccaatgcaggcgacaaaaccgttttgaaatacgaagacgtgatgaaggtagattatggtgtgcaggtaaacggtaacatcattgattctgcctttactgtttcctttgatccacaatacgataacttattagccgctgtaaaggacgctacttacacgggtattaaagaagcgggtatcgatgtgagattaaccgacatcggtgaagccatccaagaagttatggaatcctacgaagtggaaatcaatggtgagacttaccaggttaaaccttgtcgtaatttatgtggccacagtatcgcaccatatcgtatccacggcggtaaatccgttcccatcgtcaaaaatggggacactacaaaaatggaggaaggtgagcactttgccattgaaacttttggttctactggtagaggttatgttactgccggtggggaagtttctcattatgccagatctgctgaagaccatcaggtaatgcccacgttagacagcgccaagaacttgttaaaaacgatagaccgcaactttgggactttaccgttctgtcgccgctacttggacagacttggccaagagaaatacttatttgcgttgaataacttggttagacacggtttagtacaggattatccaccattgaacgatatccccggatcctacactgcacaattcgaacacaccatcttgttgcatgctcacaaaaaggaagtcgtttccaaaggtgatgactactga

SEQ ID NO: 225 - DNA, 534 bp, Saccharomyces cerevisiae
atgttgaagagcacgctgaggctttcaagaatctctctcagaagaggtttcacaacgatcgactgtttacgccaacaaaattcggatatcgataaaatcatactaaatccaatcaaattagctcagggaagcaacagcgatcgtggccaaacctctaaaagcaaaactgataatgcagatattttatcaatggaaattccagtagatatgatgcaatctgctgggagaataaacaagagggagcttctatccgaggcggaaattgctagaagtagcgtggagaatgcacaaatgagattcaattctggaaaatctataatcgtgaataagaacaaccctgcagaatcatttaagagattaaacaggatcatgtttgagaacaatattcccggagataaaagaagtcaacggttttacatgaagccggggaaagtggctgaattgaagagatctcaaaggcataggaaggaattcatgatgggcttcaagaggttgattgaaattgttaaagatgccaagaggaaaggatactaa

SEQ ID NO: 226 - DNA, 534 bp, Artificial Sequence
  Description of Artificial Sequence: Synthetic polynucleotide
atgttgaagagcacgttgaggctttctagaatctctctcagaagaggtttcacaacgatcgactgtttacgccaacaaaattctgatatcgataaaatcatattgaatccaatcaaattagctcagggaagcaacagcgatcgtggccaaacctctaaaagcaaaactgataatgcagatattttatctatggaaattccagtagatatgatgcaatctgctgggagaataaacaagagggagcttctttccgaggcggaaattgctagaagtagcgtggagaatgcacaaatgagattcaattctggaaaatctataatcgtgaataagaacaaccctgcagaaagttttaagagattaaacaggatcatgtttgagaacaatattcccggagataaaagaagtcaaagattttacatgaagccggggaaagtggctgaattgaagagatctcaaaggcataggaaggaattcatgatgggcttcaagaggttgattgaaattgttaaagatgccaagaggaaaggatactga

SEQ ID NO: 227 - DNA, 1380 bp, Saccharomyces cerevisiae
atgccgtcaaacgtacgttcgggagtcttaactttgctccatacagcatgtggagcaggcgtacttgcaatgccgtttgcattcaagccatttgggttaatgcctggtctgataacgctaacattttgcggaatatgttccttatgtgggctgctattacagactcgaatagcgaagtacgtacctaaatctgagaacgcctcgtttgctaaactcacccaactaatcaatccgtcaataagtgtagtgttcgattttgccattgctgttaaatgttttggcgttggtgtatcttacttaattattgttggtgacttagtgccacagatagtgcagtcaattttttatcgtaacgatgataacatgagtggttcgcaagagcatcacatgttcttagacaggcgtttgtatataactctgatcatagtgtttgttatctcccctttatgctttaaaagaagtttgaattctctacgatatgcttctatgattgccattgttagtgtcgcatatttatctggtttgattatttaccattttgtaaatcggcatcagctagagagagggcaagtatattttatggtacctcacggagattctcagtctcattctcccctgactacattgccaatttttgtgtttgcttacacttgtcaccacaatatgttcagtgtaattaatgagcaagtggataagagcttcaaggtaatcaggaggattccgatttttgccatcgtgttggcctattttttatacatcataattggtggtacaggttatatgacatttggtgagaatattgtaggaaatatcctcactttatacccgaattccatctccaccaccatcgggaggttagcaatgctgctattagttatgttagcatttccattgcaatgccatccttgcagatcatcggtaaaaaacataattatattcattgaaaatttcagaaaaggtaagttatacgataacagagctagctttattccattagacaactttaatagtgaagatccgcaggaggcgccaacccaacaaaacaacgaagagccaaatctgcgtagtgagtctttacggcatatcaatattatcaccctttgtatcttactgttctcatatctactggctatttcaattacgtctctagcaaaagtcctagcaatagttggtgccacgggatctacgtcgatttctttcattttgccaggcctttttggttataaattaattggctcagaatttacgggcacgaatgaaagagtaccgacaagcataaaaatattcaaatacttaagtttatctctattcatctgggggatagcagtaatggtagcttcactatcagcgattgtatttttgggcacatcatcacattga

SEQ ID NO: 228 - DNA, 1380 bp, Artificial Sequence
  Description of Artificial Sequence: Synthetic polynucleotide
atgccgtctaacgtacgttctggagtcttaactttgctccatacagcatgtggagcaggcgtacttgcaatgccgtttgcattcaagccatttgggttaatgcctggtttgataacgttgacattttgcggaatatgttccttatgtgggttgttattacagactagaatagcgaagtacgtacctaaatctgagaacgcctcttttgctaaactcacccaattgatcaatccgagcataagtgtagtgttcgattttgccattgctgttaaatgttttggcgttggtgtatcttacttaattattgttggtgacttagtgccacagatagtgcagagtattttttatcgtaacgatgataacatgagtggttctcaagagcatcacatgttcttagacaggcgtttgtatataactttgatcatagtgtttgttatctcccctttatgctttaaaagaagtttgaattctttaagatatgcttctatgattgccattgttagtgtcgcatatttatctggtttgattatttaccattttgtaaatagacatcagttggagagagggcaagtatattttatggtacctcacggagattctcagtctcattctcccttaactacattgccaatttttgtgtttgcttacacttgtcaccacaatatgttcagtgtaattaatgagcaagtggataagagcttcaaggtaatcaggaggattccgatttttgccatcgtgttggcctattttttatacatcataattggtggtacaggttatatgacatttggtgagaatattgtaggaaatatcctcactttatacccgaattccatctccaccaccatcgggaggttagcaatgttattattagttatgttagcatttccattgcaatgccatccttgcagatcttctgtaaaaaacataattatattcattgaaaatttcagaaaaggtaagttatacgataacagagctagctttattccattagacaactttaatagtgaagatccgcaggaggcgccaacccaacaaaacaacgaagagccaaatttacgtagtgagtctttaagacatatcaatattatcaccctttgtatcttattattctcttatttattagctatttccattacgtctttggcaaaagtcttggcaatagttggtgccacgggatctacgtccatttctttcattttgccaggcctttttggttataaattaattggctctgaatttacgggcacgaatgaaagagtaccgacaagcataaaaatattcaaatacttaagtttatctttattcatctgggggatagcagtaatggtagcttctttatctgcgattgtatttttgggcacatcttctcattga

SEQ ID NO: 229 - DNA, 8364 bp, Saccharomyces cerevisiae
atggaggatcatgggattgtagaaactttaaactttctatcatcaacaaaaatcaaagagagaaacaatgctttagatgagctaacaacaattttaaaagaagatccggaaaggataccaaccaaggccctatctacaacggcagaagctttggtagagttacttgcatctgaacacacaaaatactgtgaccttcttcgaaacttgacagtgtcaaccacaaacaagctatcacttagtgagaacagactctccacgatatcgtacgttttaagattatttgtagaaaaatcatgtgagagatttaaagtgaaaacgttgaagttacttttagcagtagtacctgaattaatggtcaaagatggttccaaaagtttattggatgccgtttcagtacatttatcgtttgctttggatgccctaattaaaagtgaccctttcaaactgaaattcatgatacaccaatggatatccttagtcgataaaatttgcgagtactttcaaagccaaatgaaattatctatggtagacaaaacattgaccaatttcatatcgatcctcctgaatttattggcgttagacacagttggtatatttcaagtgacaaggacaattacttggaccgtaatagattttttgaggctcagcaaaaaagaaaatggaaatacgagattaataatgtcattaataaatcaattaattttgaagtgccattgttttagtgttattgatacgctaatgcttataaaagaagcatggagttacaacctgacaattggctgtacttccaatgagctagtacaagaccaattatcactgtttgatgttatgtcaagtgaactaatgaaccataaacttccttatatgattggtcaagagaattatgttgaagagcttcggtccgaatctcttgtatctctataccgtgagtacattctactgcgcttaagtaattataagcctcaattatttaccgtaaaccatgtggaattctcatatattcgaggttcaagggataaaaattcatggtttgcattacctgattttagacttagagataggggaggcagatcggtgtggttaaaaatactcggaattaccaaatcattgttaacatattttgcattgaacagaaaaaatgaaaattactcattattatttaaaagaagaaaatgtgattcggatataccttctatcctacggatttctgacgatatggacacatttcttattcatcttttagaggagaacagctcacatgagtttgaagtgctaggattacaattgtgctcattttatggaactttacaagacttcactaaaagttttgcagaacagctgaaagaacttctgttttcaaaattcgaaaaaatccaatgctttaattgggtttgtttttcttttattcctttattatcccaaaaagaatgcgaattaagcaatggcgacatggcacgcctatttaaagtttgcttaccattagtaaaatcaaatgaatcttgccagttaagttgtcttttattagccaactccataaagttttcaaagcagcttttatccgatgagaaaactatcaatcagatatatgatctttacgaattatccgatattttgggtcccatattagttactaatgaatcgttcatgctatggggataccttcagtacgttggtaaagacttccaatctatgaacggtatatcgtccgctgatagaatttttgagtggctaaaatcaaagtggaaccagttgcgcggaactgatgctaaacaggatcagttctgcaattttatatcctggttaggtaacaaatatgacccagagaaccctttcaacgataaaaaaggcgaaggagctaatcctgtctcactatgttgggatgaaagccacaagatttggcaacattttcaagagcagagggaatttcttttaggcgtaaaaccagaagaaaagtcagaatgttttaacactcccttttttaatttaccaaaagtttccttagacctcacacgttataatgaaattctttacagattactggaaaatattgaaagtgatgcattttcatctccactacaaaaatttacttgggtagcaaaattaatacaaatagttgataatctttgtggagattccactttttctgagtttattgcagcatataagagaacaaccttaataactattccacaacttagttttgatagccaaaactcctaccaatcattttttgaggaggttttatcgatacggaccataaatgtagaccatttagtgcttgacaaaattaatatgaaggaaatcgttaatgattttatcaggatgcaaaaaaacaaatctcaaacaggaacttctgccatcaattacttcgaagcctcttcagaagacactacccagaataatagtccgtacacaattggaggtagatttcagaagcctctgcactccactatagataaagcagtgcgagcttacctatggtcttcaagaaataaatccatttcagagcgtttggtagccatattggaattttctgattgcgttagcacagatgtatttatatcttatcttggcactgtttgccagtggttaaaacaagcaatcggggagaaatcttcttacaacaaaatcctggaagaattcactgaagtcttgggtgaaaaattgctttgcaaccactatagttcttccaatcaagctatgcttttacttacatcttatatcgaagcaataagacctcaatggttatcttaccccgagcagcctttgaattcggactgcaatgatatcctggactggatcatatctagatttgaggacaattctttcactggtgtggcccctacggtcaacctttctatgctgctgcttagcctacttcaaaatcatgatctttcccacggatcaatcagaggtgggaagcagagagtctttgcaacttttattaaatgcctgcaaaagctagactcctccaatattattaacataatgaacagtatttcgagttatatggcccaagtgagctataagaatcaaagtatcatattttatgagattaagagcttatttggtccgcctcagcaaagtattgaaaagtccgctttctactctcttgcaatgtccatgttgtctttggtgtcttacccaagcttagttttttctttggaggatatgatgacatactctggcttcaatcatactcgtgcgtttatccaacaagctctgaacaaaattacggtcgcttttcgctaccaaaaccttacagagctcttcgaatattgtaagtttgatttgattatgtactggtttaacagaacaaaagtccctacttctaaattggagaaagaatgggatatatctctttttggatttgccgatattcatgaatttttaggaagatactttgtagaaatttctgcaatctacttttctcaaggtttcaaccaaaaatggatcttagacatgttacacgcgattactggaaacggtgatgcttatctggtggataacagctattacttgtgtattccacttgcctttatcagtggcggtgtgaatgaactaatatttgatatattgccccaaatatcaggtaaaacaacagtaaaataccataaaaaataccgtctactgatgttaaagtggatcataagatttactgatttgggctcacttactgaacttagatctactgttgaaaaattattcccaacttcatacctttcgccatatttatttgaaaattccagtgtttcaatgaggtatcaatacccacttcatatacccttggcattaggagcaaccttagttcagacgcagtttgctcatgaaaagaacaacacacacgaattcaagcttttgtttttatcggttattacagaccttgaaaagacatcgacttacataggaaaactgcgatgtgcaagggagttaaaatatctttttgtgttgtatgagaatgtacttgtaaaatcatcaactttaaacttcatcataattcggctttcaaaattcttaatagatacacaaattcacgatgaagtaataacaattttcagctcattgttaaatctggctgacaaaaatacgtttgaaatagagccatctctgcccaatttattttgcaaaatattcatttatttgagggaaaacaaacagctcagtccatccttccagcaggctataaagcttttagagcatcgggatctcatcaaaataaaaacttggaaatactgccttgatgcaatattcggaaatatagtccaagatgatatttatgaaaatacggaacttttggatgctagtgattgtggcgtagacgatgttgtattggtttctttactcttttcttatgccaggagaccggtagcttcaaaaatcggttgttcgctttctaaagctgctgcaattaacattttgaaacaccatgttccaaaggaatatttgagtaaaaacttcaaactatggttcgctgctctttcaagaagaattttacagcaagaagttcaaagagagagatctacaaactttaataatgaagttcatttgaaaaactttgaaatggtatttcgccatcccgaacaaccacatatgatataccaacgtatttcgaccttcaataaagaagctgagttatatgattctactgaagtgttttttatttctgagtgcattctaacgtacctagtgggctactcaataggaaatagcgaaagtgaattttgttttagggataacataatgaacgagaacaaagataaagttgctccattggacaaggatgtactgaatgctatatacccgttggcaaacaattttgggatggaatcattcatatgcgatacttatttgtcagtgaacgaaccctacaactgctggctaagcaaattcgcccgtagtttgattcaccaaatatcatttaatatacctcctattgtttgcttgtatcctttatgcaaaggatcaacagctttttgtgaattagtacttactgacctcttttttctttcaacgacttacgatccgaaaagctgtttgaattggagcaatcgaatattcactcaaatagcaatgttgctgcatgttaaagattctgagataaagctaaagatgcttttcaatgtaattaaaatgattaggatgggttctagatgcaaggaacgaaactgtctgcgcatatattctagcttagatttacaagaaatatgtcaaatttctcttaaaataaaagagttcaagtttggctatttgttatttgaggaaatgaacatgccaaacataagagaaatgaatataaatacacttcagaagatttacgaatgcataaatgacggcgattttctagcaggcttacctgttccacactcaatagagggtgttttgaactctatcaatagaattgactcagatacgtggaaacgttttcttttcaacaacgccgattttgatgccaattacactacttcactagaagaggaaaaggaatcattaatcaaggccacagaagatagcggtttctacgggttgacaagcttattggaaagtagactttctggatccagtgatgtctacaaatggaatttagaattgggagactggaagctattgactccaaaagttgttgattccaaagccaaaggtttatactatgccataaaaaatttaccacaggacgttggttttgctgaaaaaagtttagaaaaatccttattaactatttttgattctcgacaacattttattagccaaactgaatggatggatactctgaacgcgattattgaatttataaaaatagcagcaatccctcaggacgttacttccttcccccaaacattgatgtctattatgaaggccgataaggagagacttaatacaatagacttctatgatcacaaaacaacgttaaagagtagacatactttaatgaatgtgctctcgaggaattcattagatgaaaacgtaaaatgctcgaaatatttacgccttggatccattattcagcttgctaattacgttcagctggcaattgccaatggtgcgcctcaagatgcgttacgaaatgccactctaatgagcaaaacagtgaagaatattgcaaaattatacgatgatccctctgtagtatctcaaattgagaaattggcaagtttcacatctgctaatgccctctgggagtctcgagagtacaaggcacctgtaatgataatgagagatcttttagctcaaaatgagaagaatattagcgaaagtatcctttatgacgattttaagctactcattaatgtgcctatggaccaaattaaagctcgactagttaaatggagctcagaatcaaggcttgaaccagctgctgcaatatatgaaaaaatcattgtcaattgggatataaatgtcgaagatcatgaatcatgttctgatgttttctacacactcggaagttttctggatgaacaggcacaaaagttacgatcaaatggagaaatcgaagatagagaacataggtcatatactggaaaatctaccttgaaagctttggagctgatatataaaaacacaaaattaccagaaaatgaaagaaaagatgcgaaaaggcattataatcgtgtcttgctacaatataatagagattctgaagtactaaaggcactgcttcttcaaaaagaaaaatttttatggcatgcactccatttctatctcaataccttagttttcagcaacagatatgataatgacattattgataagttttgtggtttatggttcgagaatgatgacaatagcaagatcaatcaattactatataaagaaattggaacaataccgagctggaagtttttgccctgggtcaatcagattgcgtcaaaaatatctatggaggagaatgaatttcaaaagccattgcaactaaccatgaaacgacttctttacaaactaccgtatgactccctttattcagtgatgagcatactactatatgaaaagcaatccaataaggacaccaacatatcccaaaaaattcaagctgtcaaaaagattcttttagaattgcaaggatatgacaggggtgcctttgcgaaaaagtatttacttcctgtgcaagagttttgcgagatgtctgtagagttagctaatcttaagtttgtgcaaaatacgaagacgttacgcttagctaatttgaagattggccaatattggctgaaacagctaaacatggagaagcttcccctaccgaccagtaattttacagtcaaaagttctgctgatggaagaaaagcccgcccttatattgtatccgtcaatgaaacagtaggcattactaccacaggattgtccctgccgaaaatagtcaccttcaacatctcagatggtacaacgcagaaagctttgatgaaaggaagtaatgacgatttgagacaagatgcaattatggaacaagtgtttcaacaagttaataaagttctacaaaatgataaagtattaagaaatctagatctgggtattagaacatacaaagtggttccattaggaccaaaggcaggaatcattgaatttgtcgcaaattctacatcattacatcaaattttgagtaagctacataccaacgataagataaccttcgatcaggcaagaaaaggcatgaaagcagttcaaacaaaatcaaatgaagagaggctgaaagcttatttaaaaatcactaatgaaataaaaccgcagttaagaaactttttttttgattcctttcccgatccgttggattggtttgaagctaagaaaacgtacacaaaaggtgtcgcagctagctctatcgttggatacatattaggcctcggtgataggcacttaaacaatatcctgcttgactgctcaacaggggagcctattcatatagacctgggaattgcgtttgatcagggaaaattactccccattccagagttggtccctttcagattaactagagatatcgttgatggatttggagtcacaggcgtggatggcctattcaggcggagttgtgaaagagtttacgcagtattaagaaaagattatgtcaaggtgatgtgtgttttgaatatcttaaaatgggatcccctttattcctgggtaatgtcaccagttaaaaaatacgaacacttatttgaagaagaacatgaaattacaaatttcgataacgtcagcaagttcataagtaacaacgacaggaacgaaaaccaagagtcttatagggcccttaaaggtgtagaagagaagcttatgggtaatggactaagtgtagagtctagcgtacaagatttgattcagcaagccacggatccatcaaatttgagtgttatatatatgggatggtcacctttttattaa

SEQ ID NO: 230 - DNA, 8364 bp, Artificial Sequence
  Description of Artificial Sequence: Synthetic polynucleotide
atggaggatcatgggattgtagaaactttaaactttttatcttctacaaaaatcaaagagagaaacaatgctttagatgagttgacaacaattttaaaagaagatccggaaaggataccaaccaaggccttatctacaacggcagaagctttggtagagttacttgcatctgaacacacaaaatactgtgaccttcttagaaacttgacagtgtctaccacaaacaagttatctcttagtgagaacagactctccacgatatcttacgttttaagattatttgtagaaaaaagttgtgagagatttaaagtgaaaacgttgaagttacttttagcagtagtacctgaattaatggtcaaagatggttccaaaagtttattggatgccgtttctgtacatttatcttttgctttggatgccttaattaaaagtgaccctttcaaattgaaattcatgatacaccaatggatatccttagtcgataaaatttgcgagtactttcaaagccaaatgaaattatctatggtagacaaaacattgaccaatttcatatccatcctcttgaatttattggcgttagacacagttggtatatttcaagtgacaaggacaattacttggaccgtaatagattttttgaggctcagcaaaaaagaaaatggaaatacgagattaataatgtctttaataaatcaattaattttgaagtgccattgttttagtgttattgatacgttgatgcttataaaagaagcatggagttacaacttaacaattggctgtacttccaatgagttggtacaagaccaattatctttatttgatgttatgagcagtgaattgatgaaccataaacttccttatatgattggtcaagagaattatgttgaagagcttcgttccgaatctcttgtatctttgtaccgtgagtacattttacttcgcttaagtaattataagcctcaattatttaccgtaaaccatgtggaattctcttatattagaggttctagggataaaaattcttggtttgcattacctgattttagacttagagataggggaggcagatctgtgtggttaaaaatactcggaattaccaaatctttgttaacatattttgcattgaacagaaaaaatgaaaattactctttattatttaaaagaagaaaatgtgattctgatataccttctatcttaagaatttctgacgatatggacacatttcttattcatcttttagaggagaacagctctcatgagtttgaagtgttgggattacaattgtgctctttttatggaactttacaagacttcactaaaagttttgcagaacagttgaaagaacttttattttccaaattcgaaaaaatccaatgctttaattgggtttgtttttcttttattcctttattatcccaaaaagaatgcgaattaagcaatggcgacatggcacgcttatttaaagtttgcttaccattagtaaaatctaatgaatcttgccagttaagttgtcttttattagccaactccataaagttttccaagcagcttttatccgatgagaaaactatcaatcagatatatgatctttacgaattatccgatattttgggtcccatattagttactaatgaatctttcatgttatggggataccttcagtacgttggtaaagacttccaatctatgaacggtatatcttccgctgatagaatttttgagtggttgaaatccaagtggaaccagttgcgcggaactgatgctaaacaggatcagttctgcaattttatatcctggttaggtaacaaatatgacccagagaaccctttcaacgataaaaaaggcgaaggagctaatcctgtctctttatgttgggatgaaagccacaagatttggcaacattttcaagagcagagggaatttcttttaggcgtaaaaccagaagaaaagtctgaatgttttaacactcccttttttaatttaccaaaagtttccttagacctcacacgttataatgaaattctttacagattattggaaaatattgaaagtgatgcattttcttctccattgcaaaaatttacttgggtagcaaaattaatacaaatagttgataatctttgtggagattccactttttctgagtttattgcagcatataagagaacaaccttaataactattccacaacttagttttgatagccaaaactcctaccaaagtttttttgaggaggttttatctataagaaccataaatgtagaccatttagtgcttgacaaaattaatatgaaggaaatcgttaatgattttatcaggatgcaaaaaaacaaatctcaaacaggaacttctgccatcaattacttcgaagcctcttctgaagacactacccagaataatagtccgtacacaattggaggtagatttcagaagcctttacactccactatagataaagcagtgagagcttacttatggtcttctagaaataaatccatttctgagcgtttggtagccatattggaattttctgattgcgttagcacagatgtatttatatcttatcttggcactgtttgccagtggttaaaacaagcaatcggggagaaatcttcttacaacaaaatcttggaagaattcactgaagtcttgggtgaaaaattgctttgcaaccactatagttcttccaatcaagctatgcttttacttacatcttatatcgaagcaataagacctcaatggttatcttaccccgagcagcctttgaatagtgactgcaatgatatcttggactggatcatatctagatttgaggacaattctttcactggtgtggcccctacggtcaacctttctatgttattacttagcttgcttcaaaatcatgatctttcccacggatctatcagaggtgggaagcagagagtctttgcaacttttattaaatgcttacaaaagttggactcctccaatattattaacataatgaacagtatttccagttatatggcccaagtgagctataagaatcaaagtatcatattttatgagattaagagcttatttggtccgcctcagcaaagtattgaaaagtccgctttctactctcttgcaatgtccatgttgtctttggtgtcttacccaagcttagttttttctttggaggatatgatgacatactctggcttcaatcatactcgtgcgtttatccaacaagctttgaacaaaattacggtcgcttttcgctaccaaaaccttacagagctcttcgaatattgtaagtttgatttgattatgtactggtttaacagaacaaaagtccctacttctaaattggagaaagaatgggatatatctctttttggatttgccgatattcatgaatttttaggaagatactttgtagaaatttctgcaatctacttttctcaaggtttcaaccaaaaatggatcttagacatgttacacgcgattactggaaacggtgatgcttatttggtggataacagctattacttgtgtattccacttgcctttatcagtggcggtgtgaatgaattgatatttgatatattgccccaaatatctggtaaaacaacagtaaaataccataaaaaataccgtttattgatgttaaagtggatcataagatttactgatttgggctctcttactgaacttagatctactgttgaaaaattattcccaacttcttacctttctccatatttatttgaaaattccagtgtttctatgaggtatcaatacccacttcatatacccttggcattaggagcaaccttagttcagacgcagtttgctcatgaaaagaacaacacacacgaattcaagcttttgtttttaagtgttattacagaccttgaaaagacatctacttacataggaaaacttcgctgtgcaagggagttaaaatatctttttgtgttgtatgagaatgtacttgtaaaatcttctactttaaacttcatcataattagactttctaaattcttaatagatacacaaattcacgatgaagtaataacaattttcagctctttgttaaatttggctgacaaaaatacgtttgaaatagagccatctttacccaatttattttgcaaaatattcatttatttgagggaaaacaaacagctcagtccatccttccagcaggctataaagcttttagagcatagagatctcatcaaaataaaaacttggaaatactgccttgatgcaatattcggaaatatagtccaagatgatatttatgaaaatacggaacttttggatgctagtgattgtggcgtagacgatgttgtattggtttctttactcttttcttatgccaggagaccggtagcttccaaaatcggttgttctctttctaaagctgctgcaattaacattttgaaacaccatgttccaaaggaatatttgagtaaaaacttcaaattatggttcgctgctctttctagaagaattttacagcaagaagttcaaagagagagatctacaaactttaataatgaagttcatttgaaaaactttgaaatggtatttcgccatcccgaacaaccacatatgatataccaacgtatttctaccttcaataaagaagctgagttatatgattctactgaagtgttttttatttctgagtgcattttaacgtacttggtgggctactctataggaaatagcgaaagtgaattttgttttagggataacataatgaacgagaacaaagataaagttgctccattggacaaggatgtattgaatgctatatacccgttggcaaacaattttgggatggaatctttcatatgcgatacttatttgtctgtgaacgaaccctacaactgctggttaagcaaattcgcccgtagtttgattcaccaaatatcctttaatatacctcctattgtttgcttgtatcctttatgcaaaggaagtacagctttttgtgaattagtacttactgacctcttttttctttctacgacttacgatccgaaaagctgtttgaattggagcaatagaatattcactcaaatagcaatgttgttgcatgttaaagattctgagataaagttgaagatgcttttcaatgtaattaaaatgattaggatgggttctagatgcaaggaaagaaactgtttacgcatatattctagcttagatttacaagaaatatgtcaaatttctcttaaaataaaagagttcaagtttggctatttgttatttgaggaaatgaacatgccaaacataagagaaatgaatataaatacacttcagaagatttacgaatgcataaatgacggcgattttttggcaggcttacctgttccacactccatagagggtgttttgaactctatcaatagaattgacagtgatacgtggaaacgttttcttttcaacaacgccgattttgatgccaattacactacttctttggaagaggaaaaggaatctttaatcaaggccacagaagatagcggtttctacgggttgacaagcttattggaaagtagactttctggatccagtgatgtctacaaatggaatttagaattgggagactggaagttgttgactccaaaagttgttgattccaaagccaaaggtttatactatgccataaaaaatttaccacaggacgttggttttgctgaaaaaagtttagaaaaatccttattaactatttttgattctagacaacattttattagccaaactgaatggatggatactttgaacgcgattattgaatttataaaaatagcagcaatccctcaggacgttacttccttcccccaaacattgatgtctattatgaaggccgataaggagagacttaatacaatagacttctatgatcacaaaacaacgttaaagagtagacatactttaatgaatgtgctctccaggaattctttagatgaaaacgtaaaatgctccaaatatttacgccttggatccattattcagcttgctaattacgttcagttagcaattgccaatggtgcgcctcaagatgcgttaagaaatgccactttaatgagcaaaacagtgaagaatattgcaaaattatacgatgatccctctgtagtatctcaaattgagaaattggcaagtttcacatctgctaatgccctctgggagtctagagagtacaaggcacctgtaatgataatgagagatcttttagctcaaaatgagaagaatattagcgaaagtatcctttatgacgattttaagttactcattaatgtgcctatggaccaaattaaagctaggttggttaaatggagctctgaaagtaggcttgaaccagctgctgcaatatatgaaaaaatcattgtcaattgggatataaatgtcgaagatcatgaaagttgttctgatgttttctacacactcggaagttttttggatgaacaggcacaaaagttaagatctaatggagaaatcgaagatagagaacataggagttatactggaaaatctaccttgaaagctttggagttgatatataaaaacacaaaattaccagaaaatgaaagaaaagatgcgaaaaggcattataatcgtgtcttgttgcaatataatagagattctgaagtattgaaggcattacttcttcaaaaagaaaaatttttatggcatgcactccatttctatctcaataccttagttttcagcaacagatatgataatgacattattgataagttttgtggtttatggttcgagaatgatgacaatagcaagatcaatcaattattatataaagaaattggaacaataccgagctggaagtttttgccctgggtcaatcagattgcgtccaaaatatctatggaggagaatgaatttcaaaagccattgcaattgaccatgaaaagacttctttacaaattaccgtatgactccctttattctgtgatgagcatattattatatgaaaagcaatccaataaggacaccaacatatcccaaaaaattcaagctgtcaaaaagattcttttagaattgcaaggatatgacaggggtgcctttgcgaaaaagtatttacttcctgtgcaagagttttgcgagatgtctgtagagttagctaatcttaagtttgtgcaaaatacgaagacgttacgcttagctaatttgaagattggccaatattggttgaaacagttgaacatggagaagcttcccttgccgaccagtaattttacagtcaaaagttctgctgatggaagaaaagcccgcccttatattgtatccgtcaatgaaacagtaggcattactaccacaggattgtccttaccgaaaatagtcaccttcaacatcagtgatggtacaacgcagaaagctttgatgaaaggaagtaatgacgatttgagacaagatgcaattatggaacaagtgtttcaacaagttaataaagttttgcaaaatgataaagtattaagaaatttggatttaggtattagaacatacaaagtggttccattaggaccaaaggcaggaatcattgaatttgtcgcaaattctacaagtttacatcaaattttgagtaagttgcataccaacgataagataaccttcgatcaggcaagaaaaggcatgaaagcagttcaaacaaaatctaatgaagagaggttgaaagcttatttaaaaatcactaatgaaataaaaccgcagttaagaaactttttttttgattcctttcccgatccgttggattggtttgaagctaagaaaacgtacacaaaaggtgtcgcagctagctctatcgttggatacatattaggcctcggtgataggcacttaaacaatatcttacttgactgctccacaggggagcctattcatatagacttgggaattgcgtttgatcagggaaaattactccccattccagagttggtccctttcagattaactagagatatcgttgatggatttggagtcacaggcgtggatggccttttcaggagaagttgtgaaagagtttacgcagtattaagaaaagattatgtcaaggtgatgtgtgttttgaatatcttaaaatgggatcccctttattcctgggtaatgtctccagttaaaaaatacgaacacttatttgaagaagaacatgaaattacaaatttcgataacgtcagcaagttcataagtaacaacgacaggaacgaaaaccaagagtcttatagggcccttaaaggtgtagaagagaagcttatgggtaatggattgagtgtagagtctagcgtacaagatttgattcagcaagccacggatccatccaatttgagtgttatatatatgggatggtctcctttttattga

SEQ ID NO: 231 - DNA, 414 bp, Saccharomyces cerevisiae
atgtccggtaacggtgctcaaggtactaagtttagaatctcattaggtctaccagtcggtgccatcatgaactgtgctgacaacagtggtgccagaaacttgtacattatcgccgtcaaaggctctggttccagattgaacagattgccagccgcctctctaggtgatatggttatggccaccgttaagaagggtaagccagaattgagaaagaaggttatgccagctattgttgtccgtcaagctaagtcttggagaagaagagacggtgtctttttgtacttcgaagacaatgctggtgtcatcgctaatcctaagggtgaaatgaagggttccgccatcactggtccagtcggtaaggaatgtgccgatttatggccaagagttgcatctaactccggtgttgttgtgtaa

SEQ ID NO: 232 - DNA, 414 bp, Artificial Sequence
  Description of Artificial Sequence: Synthetic polynucleotide
atgtccggtaacggtgctcaaggtactaagtttagaatctctttaggtttgccagtcggtgccatcatgaactgtgctgacaacagtggtgccagaaacttgtacattatcgccgtcaaaggctctggttccagattgaacagattgccagccgcctctttgggtgatatggttatggccaccgttaagaagggtaagccagaattgagaaagaaggttatgccagctattgttgtccgtcaagctaagtcttggagaagaagagacggtgtctttttgtacttcgaagacaatgctggtgtcatcgctaatcctaagggtgaaatgaagggttccgccatcactggtccagtcggtaaggaatgtgccgatttatggccaagagttgcatctaactccggtgttgttgtgtga

SEQ ID NO: 233 - DNA, 1401 bp, Saccharomyces cerevisiae
atgccatttaatcataatagcaaggcaaaaagaccaaagtttctactggacctgcaaatcaaagaattggtaaatattcctcaatcttctggctattgctacacgaaatggcgtttgaaggatggaacaggtacgtcgggacacaaagtggctctggacggtgagcatcaaaccacttcgacccagagtagaggtacaacaaaacacgtgcatgtgcaacatcatagagcacaatggaattattcattagacaaaccaatcctggtgaagctccacttggataaaaacggcagattcttgaagaaaattttggtgttggatgttttttttgagtttgctgatgcgaattcctcgttgacttctagttctagtcccaatggcaaagtgaagaaaacgacctatgctaacgccactgcactaacggccacaggaaacaattcatattctcaaaagataacgggtaaacttctattgggaacagtagacatagatataacagaatacgtcaaagaagacgaaactcccacaacaaacagatttctcctaaagcactcaaaggtcaattctataatcaacgtctcattgcagttgaagctagttagaggctcttacgaagatttcaacatttccaaatcgtttactaatggccagctcgctaattacaggccaggaataaatactatactggataacacgtctgaactatctagccccacatcaacaacaaaccagatgtcacccaagaatacattctccaattttaacggtattggaacaactgtagcgaaacccggtacaaatgcgacaggaaacagcacaagtattaaatcaccgacttctaccaaccacaagagtagcgaaatgacaacaaagccagggctgtcaacaacaatatcttcctctatgagcccactgattgagagcttgtaccagaaaacgtttaaattaccgtgggatcctcgaccaggtgaatttacgccaagagaatgcgtggaagatattttacaaggcggaaacggttgggctaagaacgagaagggcataaatttaatcgatttacaggcattgagattgaacgaaatggaagaagagtactacaatccaaattatggcaataaccttgggaacaaggcaagtagttggcctccaaatccaagcgatgacggctacagcacaatgggcaaaagagagtatttggagaaaaagcagaattggagtcatatgtcacgagcacaacgtgcaaaactgaggactcataatgacgaggataacgaaaatacggctaatgataaagggagcgacaaggataataactctgtcgaagacaataaccccacggactttttaacagatagaataagagaaaacaaaaactggtctataataaccccatcgggctag

SEQ ID NO: 234 - DNA, 1401 bp, Artificial Sequence
  Description of Artificial Sequence: Synthetic polynucleotide
atgccatttaatcataatagcaaggcaaaaagaccaaagtttttattagacttgcaaatcaaagaattggtaaatattcctcaatcttctggctattgctacacgaaatggcgtttgaaggatggaacaggtacgtctggacacaaagtggctttggacggtgagcatcaaaccacttctacccagagtagaggtacaacaaaacacgtgcatgtgcaacatcatagagcacaatggaattattctttagacaaaccaatcttagtgaagctccacttggataaaaacggcagattcttgaagaaaattttggtgttggatgttttttttgagtttgctgatgcgaattcctctttgacttctagttctagtcccaatggcaaagtgaagaaaacgacctatgctaacgccactgcattgacggccacaggaaacaattcttattctcaaaagataacgggtaaacttttattgggaacagtagacatagatataacagaatacgtcaaagaagacgaaactcccacaacaaacagatttctcttgaagcactccaaggtcaattctataatcaacgtctctttgcagttgaagttggttagaggctcttacgaagatttcaacatttccaaaagttttactaatggccagctcgctaattacaggccaggaataaatactatattggataacacgtctgaattatctagccccacatctacaacaaaccagatgtctcccaagaatacattctccaattttaacggtattggaacaactgtagcgaaacccggtacaaatgcgacaggaaacagcacaagtattaaatctccgacttctaccaaccacaagagtagcgaaatgacaacaaagccagggctttctacaacaatatcttcctctatgagcccattgattgagagcttgtaccagaaaacgtttaaattaccgtgggatcctaggccaggtgaatttacgccaagagaatgcgtggaagatattttacaaggcggaaacggttgggctaagaacgagaagggcataaatttaatcgatttacaggcattgagattgaacgaaatggaagaagagtactacaatccaaattatggcaataaccttgggaacaaggcaagtagttggcctccaaatccaagcgatgacggctacagcacaatgggcaaaagagagtatttggagaaaaagcagaattggagtcatatgtctagagcacaacgtgcaaaattgaggactcataatgacgaggataacgaaaatacggctaatgataaagggagcgacaaggataataactctgtcgaagacaataaccccacggactttttaacagatagaataagagaaaacaaaaactggtctataataaccccaagtggctga

SEQ ID NO: 235 - DNA, 2943 bp, Saccharomyces cerevisiae
atgagtctcgaaggaaataccctaggcaaaggggccaaatcttttcctctgtatattgcggtaaatcagtactctaaacgaatggaggacgagctcaatatgaaaccaggtgataaaattaaagtcattactgatgatggggagtacaatgacggctggtattatgggcgcaatttgagaaccaaagaggaaggtttatacccagcggtatttaccaaaagaatagcaatagaaaaaccagagaacctgcacaaatcaccaacccaagagagtggaaattctggtgttaaatatggaaatttaaatgattctgcgagtaacataggtaaagtctcctcgcatcaacaggagaacagatatacatcattgaaaagtacaatgagcgatatagacaaagccttggaagagctaagaagtggttcagttgaacaagaggtatcaaaatcgcccacacgcgtgcccgaagttagcactccacagttgcaagatgaacagactttgattcaagaaaaaaccagaaatgaggaaaacacgacacatgactcgttattttctagcacagcggatttaaacttaagttctgaatctttgaagaatataagtaagtcaaatatatcaacaaaatccctagaaccgagttcggaatcagttcgtcaattagatttgaaaatggctaaaagttggagcccagaagaggttactgattactttagcttggttggatttgatcaatccacttgcaataaattcaaagagcatcaagtctccggaaaaatactactggaattagaactggaacacctaaaagaattggaaataaattcttttggtataagatttcagatattcaaagaaataaggaacatcaagtctgcaattgattcgtcgtcaaataaactggacgccgactactctacctttgcttttgaaaaccaagctgcccaactaatgcctgcagccactgtaaatagagacgaaatccaacaacaaatttcctccaagtgtaacaagttgtcaagtgaaagctctgatagaaaatcatcttcggtcaccacagaattgcaaagaccaagctcggttgttgttaatcccaattttaaacttcacgacccagctgagcagatcctagatatgacagaagttcctaatttgtttgctgataaagatattttcgaatcaccgggaagggctccaaaaccaccatcatatccaagtccagttcaacctccacaatcgccctcttttaataacaggtacacaaataataacgcaaggtttcctcctcaaacaacatatccacctaaaaacaagaacccaaccgtttattcaaatgggctaattccaaattcttcgacatcttccgataattcaacgggcaagttcaaattccctgccatgaatggtcatgactcgaactctaggaaaacaacactgacatctgctactataccttctattaacacggttaacacagatgaatctctacccgcaatttcaaatatatcttcaaatgctacatctcatcatccgaacagaaattccgttgtttacaataaccataagaggacggaatccggaagctcatttgttgatttgttcaacaggatttcaatgctatcgccagtcaagtcaagtttcgacgaagaagaaacgaaacaaccttcaaaagctagcagagcagtttttgactcagcacgcagaaagtcgtcttacggacattcaagagatgcctcactttctgaaatgaaaaagcataggagaaactcttctatattatcttttttttcttcaaaaagtcagtctaatccaacgtcaccaaccaaacaaactttcactatcgatcccgcaaagatgacttcccattctcgttctcagtcgaattcctattcgcatgcaagatcacaatcttactcccatagtagaaaacactcgttagttaccagccccttgaaaacttctttaagccctataaattccaaatccaatattgctttagcgcatagcgaaactcctactagtagtaataataaggaggcagtatcacaaccaagtgaagggaagcacaagcacaagcacaagcacaagagcaagcacaaacacaagaacagtagctccaaagatggctcttccgaagaaaaaagcaaaaagaaattatttagtagcaccaaagaatcatttgtaggaagcaaggaattcaaaagatctcccagtgaacttacccaaaaatctaccaaatcgatacttcccaggtcgaatgctaaaaagcaacaaacatctgcttttaccgaaggtatacgctctatcacagcaaaggaatctatgcaaactgcggactgttcaggctggatgagcaaaaaaggtaccggtgctatggggacttggaaacaacggtttttcacacttcatggaacaaggctttcttattttacgaataccaatgatgagaaggagcgtggcctgatagatataacggcacatagggtcttacctgccagtgatgatgataggctcatttccttatacgctgcgagcttaggaaaaggaaaatactgtttcaaattggtccctccgcaaccggggtccaaaaaggggctaacctttacagaacctcgcgttcactattttgcagttgagaataaatctgaaatgaaggcatggctgtcagccataataaaggccactattgatattgatacaagcgtccctgtcattagttcatatgccacaccaacgatacctctaagcaaggcacagacgctattggaagaagctaggttacaaacccagttaagagatgctgaagaggaagagggaagagatcaatttggatgggatgacacccaaaataaaagaaattctaattatccaatcgaacaagatcaatttgagaccagcgattacctggaaagttcagcatttgaataccctggtggcagactttga

SEQ ID NO: 236 - DNA, 2943 bp, Artificial Sequence
  Description of Artificial Sequence: Synthetic polynucleotide
atgagtctcgaaggaaataccttaggcaaaggggccaaatcttttcctttatatattgcggtaaatcagtactctaaaagaatggaggacgagctcaatatgaaaccaggtgataaaattaaagtcattactgatgatggggagtacaatgacggctggtattatgggcgcaatttgagaaccaaagaggaaggtttatacccagcggtatttaccaaaagaatagcaatagaaaaaccagagaacttgcacaaatctccaacccaagagagtggaaattctggtgttaaatatggaaatttaaatgattctgcgagtaacataggtaaagtctcctctcatcaacaggagaacagatatacatctttgaaaagtacaatgagcgatatagacaaagccttggaagagttaagaagtggttctgttgaacaagaggtatccaaaagtcccacacgcgtgcccgaagttagcactccacagttgcaagatgaacagactttgattcaagaaaaaaccagaaatgaggaaaacacgacacatgactctttattttctagcacagcggatttaaacttaagttctgaatctttgaagaatataagtaagagcaatatatctacaaaatccttagaaccgagttctgaatctgttcgtcaattagatttgaaaatggctaaaagttggagcccagaagaggttactgattactttagcttggttggatttgatcaatccacttgcaataaattcaaagagcatcaagtctccggaaaaatattattggaattagaattggaacacttgaaagaattggaaataaattcttttggtataagatttcagatattcaaagaaataaggaacatcaagtctgcaattgattcttcttccaataaattagacgccgactactctacctttgcttttgaaaaccaagctgcccaattgatgcctgcagccactgtaaatagagacgaaatccaacaacaaatttcctccaagtgtaacaagttgagcagtgaaagctctgatagaaaatcttcttctgtcaccacagaattgcaaagaccaagctctgttgttgttaatcccaattttaaacttcacgacccagctgagcagatcttagatatgacagaagttcctaatttgtttgctgataaagatattttcgaatctccgggaagggctccaaaaccaccatcttatccaagtccagttcaacctccacaatctccctcttttaataacaggtacacaaataataacgcaaggtttcctcctcaaacaacatatccacctaaaaacaagaacccaaccgtttattctaatgggttgattccaaattcttctacatcttccgataattctacgggcaagttcaaattccctgccatgaatggtcatgactccaactctaggaaaacaacattaacatctgctactataccttctattaacacggttaacacagatgaatctttacccgcaatttctaatatatcttccaatgctacatctcatcatccgaacagaaattccgttgtttacaataaccataagaggacggaatccggaagctcctttgttgatttgttcaacaggatttccatgctttctccagtcaagagtagtttcgacgaagaagaaacgaaacaaccttccaaagctagcagagcagtttttgactctgcacgcagaaagtcttcttacggacattccagagatgcctctctttctgaaatgaaaaagcataggagaaactcttctatattatcttttttttcttctaaaagtcagtctaatccaacgtctccaaccaaacaaactttcactatcgatcccgcaaagatgacttcccattctcgttctcagtctaattcctattctcatgcaagatctcaatcttactcccatagtagaaaacactctttagttaccagccccttgaaaacttctttaagccctataaattccaaatccaatattgctttagcgcatagcgaaactcctactagtagtaataataaggaggcagtatctcaaccaagtgaagggaagcacaagcacaagcacaagcacaagagcaagcacaaacacaagaacagtagctccaaagatggctcttccgaagaaaaaagcaaaaagaaattatttagtagcaccaaagaaagttttgtaggaagcaaggaattcaaaagatctcccagtgaacttacccaaaaatctaccaaatctatacttcccaggtctaatgctaaaaagcaacaaacatctgcttttaccgaaggtatacgctctatcacagcaaaggaatctatgcaaactgcggactgttctggctggatgagcaaaaaaggtaccggtgctatggggacttggaaacaaagatttttcacacttcatggaacaaggctttcttattttacgaataccaatgatgagaaggagcgtggcttgatagatataacggcacatagggtcttacctgccagtgatgatgataggctcatttccttatacgctgcgagcttaggaaaaggaaaatactgtttcaaattggtccctccgcaaccggggtccaaaaaggggttaacctttacagaacctcgcgttcactattttgcagttgagaataaatctgaaatgaaggcatggttatctgccataataaaggccactattgatattgatacaagcgtccctgtcattagttcttatgccacaccaacgatacctttaagcaaggcacagacgttattggaagaagctaggttacaaacccagttaagagatgctgaagaggaagagggaagagatcaatttggatgggatgacacccaaaataaaagaaattctaattatccaatcgaacaagatcaatttgagaccagcgattacttggaaagttctgcatttgaataccctggtggcagactttga

SEQ ID NO: 237 - DNA, 2277 bp, Saccharomyces cerevisiae
atggcggtaaatcctgagttagcaccgttcaccctctcgagaggaatccccagctttgatgatcaagctttgagcaccatcatacagcttcaggactgcattcagcaggctattcagcagttgaactacagtaccgcagagtttttggccgaactgctctatgctgaatgctccattctcgataaatcaagtgtttactggtccgatgcggtatatttatatgcactttcgctgtttctgaataaaagctaccacactgcgttccagatatccaaagaattcaaggagtatcatcttggtatcgcttacatattcgggcgttgtgctttacagctttcgcagggagttaacgaagctatcctcactcttctctcaataataaatgtattttcttcgaacagcagtaatacgcgcataaatatggtgttgaattctaatctcgtccatattcccgatttggccactttgaattgcctgttaggcaatctttatatgaaactggaccattctaaggagggagcattttatcattctgaagcattagccattaatccttacctttgggaatcttacgaagcgatttgtaaaatgagagctaccgtggatctcaagagggtttttttcgacattgcagggaaaaaaagtaatagtcataataataatgcagcttcatcgtttccgtctacatcactatcgcatttcgaacctcgttcacaacctagcttatattcaaaaacaaacaaaaacggcaataataatatcaataataatgttaatacactgtttcagtcgtctaattctcccccttctacatcggcatcttctttttcttccattcagcatttctcaaggtcacagcagcaacaagcgaacacatcaataaggacctgccagaacaaaaatactcaaactcctaaaaaccctgcaatcaacagtaagacgtcttctgcgctaccaaataacatttccatgaacttagtgtctccatcctccaaacagcctacaataagctcgttggccaaagtttataacagaaacaaacttttaacgactcctccatcgaaactgttaaataacgataggaaccaccaaaataacaataataataataataataataataataataataataataataataataataataataataataacattataaataaaacaactttcaaaactccaagaaacctatattcctcaacaggaaggttaacaacttccaagaaaaatccaaggtctttaataatcagtaactcaatactaacgagtgattattcaattacgctgcctgaaatcatgtataatttcgctttaatattaaggtcgtcatcacaatacaattcgttcaaggcaataagactgttcgagtctcaaatcccatctcatattaaagacacaatgccatggtgtctagtgcaattaggaaaacttcattttgagatcattaattatgatatgtccttaaagtatttcaatagattgaaagacctacaaccggcaagggtaaaagatatggaaattttttctactttgctgtggcatttgcatgacaaggttaaatcttcaaatttggcaaatgggctaatggatacaatgcctaataagcccgaaacatggtgttgtataggtaatttgctatcattgcaaaaggatcatgatgccgcaataaaagccttcgaaaaagctactcagttagacccaaattttgcatacgcgtatactttgcaaggtcatgaacattcttccaacgattcttcggattctgccaagacatgctatagaaaggcgctagcttgtgatcctcagcattacaatgcatattacggattgggtacgagcgctatgaaattaggtcaatatgaagaagcgttgttatattttgaaaaggcaaggtcaattaatcccgtcaatgttgtgttaatctgttgttgcggtggttctttagaaaagctgggctataaggaaaaggctctacaatattatgaactagcatgtcatttgcaaccgacttcctcgctatccaaatataagatgggccagttgctctattccatgacaagatataatgttgctttgcaaacttttgaagaattggtgaaactcgttcctgatgatgccacagcccattatttgctgggtcaaacatatagaatagttgggaggaaaaaagatgcaatcaaggagctaactgttgctatgaatttggatccaaagggtaaccaagttatcatcgatgaattacaaaaatgtcatatgcaagaataa

SEQ ID NO: 238 - DNA, 2277 bp, Artificial Sequence
  Description of Artificial Sequence: Synthetic polynucleotide
atggcggtaaatcctgagttagcaccgttcaccctcagcagaggaatccccagctttgatgatcaagctttgagcaccatcatacagcttcaggactgcattcagcaggctattcagcagttgaactacagtaccgcagagtttttggccgaattactctatgctgaatgctccattctcgataaatctagtgtttactggtccgatgcggtatatttatatgcactttctttatttttgaataaaagctaccacactgcgttccagatatccaaagaattcaaggagtatcatcttggtatcgcttacatattcgggcgttgtgctttacagctttctcagggagttaacgaagctatcctcactcttctctccataataaatgtattttcttccaacagcagtaatacgcgcataaatatggtgttgaattctaatctcgtccatattcccgatttggccactttgaattgccttttaggcaatctttatatgaaattagaccattctaaggagggagcattttatcattctgaagcattagccattaatccttacctttgggaatcttacgaagcgatttgtaaaatgagagctaccgtggatctcaagagggtttttttcgacattgcagggaaaaaaagtaatagtcataataataatgcagcttcttcttttccgtctacatctttatctcatttcgaacctcgttctcaacctagcttatattctaaaacaaacaaaaacggcaataataatatcaataataatgttaatacattatttcagtcttctaattctcccccttctacaagtgcatcttctttttcttccattcagcatttctctaggagccagcagcaacaagcgaacacatctataaggacctgccagaacaaaaatactcaaactcctaaaaaccctgcaatcaacagtaagacgtcttctgcgttaccaaataacatttccatgaacttagtgtctccatcctccaaacagcctacaataagctctttggccaaagtttataacagaaacaaacttttaacgactcctccatctaaattattaaataacgataggaaccaccaaaataacaataataataataataataataataataataataataataataataataataataataataataacattataaataaaacaactttcaaaactccaagaaacttatattcctctacaggaaggttaacaacttccaagaaaaatccaaggtctttaataatcagtaacagcatattaacgagtgattattctattacgttacctgaaatcatgtataatttcgctttaatattaaggagttcttctcaatacaattctttcaaggcaataagattattcgagtctcaaatcccatctcatattaaagacacaatgccatggtgtttggtgcaattaggaaaacttcattttgagatcattaattatgatatgtccttaaagtatttcaatagattgaaagacttgcaaccggcaagggtaaaagatatggaaattttttctactttgttatggcatttgcatgacaaggttaaatcttccaatttggcaaatgggttgatggatacaatgcctaataagcccgaaacatggtgttgtataggtaatttgttatctttgcaaaaggatcatgatgccgcaataaaagccttcgaaaaagctactcagttagacccaaattttgcatacgcgtatactttgcaaggtcatgaacattcttccaacgattcttctgattctgccaagacatgctatagaaaggcgttagcttgtgatcctcagcattacaatgcatattacggattgggtacgagcgctatgaaattaggtcaatatgaagaagcgttgttatattttgaaaaggcaaggtctattaatcccgtcaatgttgtgttaatctgttgttgcggtggttctttagaaaagttgggctataaggaaaaggctttacaatattatgaattggcatgtcatttgcaaccgacttcctctttatccaaatataagatgggccagttgctctattccatgacaagatataatgttgctttgcaaacttttgaagaattggtgaaactcgttcctgatgatgccacagcccattatttgttgggtcaaacatatagaatagttgggaggaaaaaagatgcaatcaaggagttaactgttgctatgaatttggatccaaagggtaaccaagttatcatcgatgaattacaaaaatgtcatatgcaagaatga

SEQ ID NO: 239 - DNA, 1377 bp, Saccharomyces cerevisiae
atggaaggtgaacagtctccgcaaggtgaaaagtctctgcaaaggaagcaatttgtcagacctccgctggatctgtggcaggatctcaaggacggtgtgcgctacgtgatcttcgattgtagggccaatcttatcgttatgccccttttgattttgttcgaaagcatgctgtgcaagattatcattaagaaggtagcttacacagagatcgattacaaggcgtacatggagcagatcgagatgattcagctcgatggcatgctggactactctcaggtgagtggtggaacgggcccgctggtgtatccagcaggccacgtcttgatctacaagatgatgtactggctaacagagggaatggaccacgttgagcgcgggcaagtgtttttcagatacttgtatctccttacactggcgttacaaatggcgtgttactaccttttacatctaccaccgtggtgtgtggtcttggcgtgcctctctaaaagattgcactctatttacgtgctacggttattcaatgattgcttcactactttgtttatggtcgtcacggttttgggggctatcgtggccagcaggtgccatcagcgccccaaattaaagaagtcccttgcgctggtgatctccgcaacatacagtatggctgtgagcattaagatgaatgcgctgttgtatttccctgcaatgatgatttctctattcatccttaatgacgcgaacgtaatccttactttgttggatctcgttgcgatgattgcatggcaagtcgcagttgcagtgcccttcctgcgcagctttccgcaacagtacctgcattgcgcttttaatttcggcaggaagtttatgtaccaatggagtatcaattggcaaatgatggatgaagaggctttcaatgataagaggttccacttggcccttttaatcagccacctgatagcgctcaccacactgttcgtcacaagataccctcgcatcctgcccgatttatggtcttccctgtgccatccgctgaggaaaaatgcagtgctcaatgccaatcccgccaagactattccattcgttctaatcgcatccaacttcatcggcgtcctattttcaaggtccctccactaccagtttctatcctggtatcactggactttgcctatactgatcttttggtcgggaatgcccttcttcgttggtcccatttggtacgtcttgcacgagtggtgctggaattcctatccaccaaactcacaagcaagcacgctattgttggcattgaatactgttctgttgcttctattggccttgacgcagctatctggttcggtcgccctcgccaaaagccatcttcgtaccaccagctctatggaaaaaaagctcaactga

SEQ ID NO: 240 - DNA, 1377 bp, Artificial Sequence
  Description of Artificial Sequence: Synthetic polynucleotide
atggaaggtgaacagtctccgcaaggtgaaaagtctttacaaaggaagcaatttgtcagacctccgttagatttatggcaggatctcaaggacggtgtgcgctacgtgatcttcgattgtagggccaatcttatcgttatgccccttttgattttgttcgaaagcatgttgtgcaagattatcattaagaaggtagcttacacagagatcgattacaaggcgtacatggagcagatcgagatgattcagctcgatggcatgttggactactctcaggtgagtggtggaacgggcccgttggtgtatccagcaggccacgtcttgatctacaagatgatgtactggttgacagagggaatggaccacgttgagcgcgggcaagtgtttttcagatacttgtatctccttacattagcgttacaaatggcgtgttactaccttttacatttaccaccgtggtgtgtggtcttggcgtgcctctctaaaagattgcactctatttacgtgttaagattattcaatgattgcttcactactttgtttatggtcgtcacggttttgggggctatcgtggccagcaggtgccatcagcgccccaaattaaagaagtcccttgcgttagtgatctccgcaacatacagtatggctgtgagcattaagatgaatgcgttattgtatttccctgcaatgatgatttctttattcatccttaatgacgcgaacgtaatccttactttgttggatctcgttgcgatgattgcatggcaagtcgcagttgcagtgcccttcttgcgcagctttccgcaacagtacttgcattgcgcttttaatttcggcaggaagtttatgtaccaatggagtatcaattggcaaatgatggatgaagaggctttcaatgataagaggttccacttggcccttttaatcagccacttgatagcgctcaccacattgttcgtcacaagataccctcgcatcttgcccgatttatggtcttccttatgccatccgttaaggaaaaatgcagtgctcaatgccaatcccgccaagactattccattcgttttgatcgcatccaacttcatcggcgtcttgtttagcaggtccctccactaccagtttctttcctggtatcactggactttgcctatattgatcttttggtctggaatgcccttcttcgttggtcccatttggtacgtcttgcacgagtggtgctggaattcctatccaccaaactctcaagcaagcacgttattgttggcattgaatactgttttattgcttttattggccttgacgcagctttctggttctgtcgccctcgccaaaagccatcttcgtaccaccagctctatggaaaaaaagctcaactga

SEQ ID NO: 241 - DNA, 1107 bp, Saccharomyces cerevisiae
atgccaggccagataatcagcattccgtttttgtcgcagaacgaggacatggataaatacttgttggagtaccgcagtttgaagctccttcatcagtccagtaattccttccagtctcacaatgcgccctcccaccagtcgaactaccacccccattacaatcacatgaaatacaacaacactggtagctattactattacaacaacaacaataacagcagtgtaaacccacataaccaagctggtctacaatccattaacagatctattccatcggccccgtacggggcttacaaccagaacagagctaatgacgtaccatatatgaatacccaaaagaaacaccacagatttagcgctaacaataatttgaaccagcaaaaatacaagcaatatccccagtatacgtccaatccaatggttactgcacatctgaagcaaacgtaccctcaactgtactacaatagcaacgtcaatgctcacaacaacaacaacaacagcaacaacaacaacaacaacaacaacaacagcaacaacaacaacaatctttacaaccagacgcagttctccacgaggtacttcaactcgaactcctctccctcgttgacttcttccacttctaactcatcctctccatacaaccaaagcaccttcgaatacattttgccgtcaacttcggcagcttccacaaatttatcgtcgtcatcatcaaacaactctatgcacaccaacccaaccactgcaacatcgacatccgccgatttaatcaatgatttacccgtgggccccacgtccagttcgcttatctcggatctacattctccaccaactgtatctttcctaccagcaagccaaaccctgctcatgtcctccaccacatctagctctattggcaccaacataaacccaccgcaacattcaccatccccatcgcaaagggaggatttttcgacggcaccagtgaacatgtcttcgtccgcatcactcttgatgaatgattcttctttaggatgggggtctaaccacatgaacgtatcttcatcctctcaaccagcatcatcaagaccctttggcatttggaatactgacatgagcgtttggagttga

SEQ ID NO: 242 - DNA, 1107 bp, Artificial Sequence
  Description of Artificial Sequence: Synthetic polynucleotide
atgccaggccagataatcagcattccgtttttgtctcagaacgaggacatggataaatacttgttggagtaccgcagtttgaagctccttcatcagtccagtaattccttccagtctcacaatgcgccctcccaccagtccaactaccacccccattacaatcacatgaaatacaacaacactggtagctattactattacaacaacaacaataacagcagtgtaaacccacataaccaagctggtttacaatccattaacagatctattccatctgccccgtacggggcttacaaccagaacagagctaatgacgtaccatatatgaatacccaaaagaaacaccacagatttagcgctaacaataatttgaaccagcaaaaatacaagcaatatccccagtatacgtccaatccaatggttactgcacatttgaagcaaacgtaccctcaattgtactacaatagcaacgtcaatgctcacaacaacaacaacaacagcaacaacaacaacaacaacaacaacaacagcaacaacaacaacaatctttacaaccagacgcagttctccacgaggtacttcaactccaactcctctccctctttgacttcttccacttctaactcttcctctccatacaaccaaagcaccttcgaatacattttgccgtctacttctgcagcttccacaaatttatcttcttcttcttccaacaactctatgcacaccaacccaaccactgcaacatctacatccgccgatttaatcaatgatttacccgtgggccccacgtccagttctcttatcagtgatttgcattctccaccaactgtatctttcttaccagcaagccaaacccttctcatgtcctccaccacatctagctctattggcaccaacataaacccaccgcaacattctccatccccatctcaaagggaggatttttctacggcaccagtgaacatgtcttcttccgcaagtctcttgatgaatgattcttctttaggatgggggtctaaccacatgaacgtatcttcttcctctcaaccagcatcttctagaccctttggcatttggaatactgacatgagcgtttggagttga

SEQ ID NO: 243 - DNA, 1626 bp, Saccharomyces cerevisiae
atgttgcggcttgcacgtttttattctttggccagaaccaaagccatacatagtcacggtgcacccttcaggccggaatatgcattgaagtgtggattggagattcatacgcaattgaacaccaaaaacaagcttttttcacaatcaacgaatagcgccacatctctagtggatgcaccaaaccatcatactagttattatgacatagctctaccgggaacgcagccggttttgaatctggaagcaatcttgtttgccatgaaactatccttggcactgggttctcaagtgaatagcatatctcagtttgataggaagcattatttttatggagatcaacctcaaggctatcaactgacgcagcactacaggccgtttgctcggggtgggaagatcaatctgtcgaaggaattggatgatatcgatgaatcagccaaggaaatcggtatcttacagttgcagatagagcaggacacggggaagtcacactatacagagacagataaagacgttattactttggttgatttaaataggtcgaacgtcccgcttatcgaattggtaactaaaccagatttcagtgatattaaacaggttagagcgtttattaaaaaatatcagaatttggtacgtcatttgcacatttcctctggggacctggaaacgggcgccatgcgagtggacgttaacctctcaattaatgaatatgcacgcgttgagttgaagaatttacccaatactagttccatcatcaatgcaatcaagtacgaatatcagcggcaagttgagttgatttctgtgggtgacactagctcactgatggagccagaaacaaggggctggacaggctcatcaacggtgaagttgagaagcaaagaaaccacgatcgattacaggtacatgcctgatccagaattgccgtatatcaacctcgcaccagacgttatcagtggtgtgagagggttgatgccccaattaccggacgatataatgagaattcttatgaagaaaccctatcaattatcattgaaggacgccaagattctgacttataatagtaaccaaaacgatatgtacaatcatgaggcgttgagatcgtactacttagacaccttccgtgaattttccaagcttgctggtgaacgtagtaacgcgaaattacctacgaattggataatccatgaattcttgggagatttgaacaagctacaaattccattggccaaagcaaaagaaattttgcctcctccggttttcgcccagtttttgaagttattgcatgaagaggttatatccgcaactagtggtaaaatgttactgtttcacatattggaaaatttcgagcagagtaactgccaagatttgtctattccagatttttcaaaactaatcgagaaatttgaattgcatgcgattaatcaggtcgaccctcaagaattgatggatctctgtaatgatgtcattgcacagcacacagatgacacttttatacggaacctggttactggtaaaaagaagtcctctttaaaattcctaattggacaaggaatgagacgaagccagggacgtataaaggcaaacgaattcgagaaaaaattcaaagagatcttaaatattcaatggtaa

SEQ ID NO: 244 - DNA, 1626 bp, Artificial Sequence
  Description of Artificial Sequence: Synthetic polynucleotide
atgttgagacttgcacgtttttattctttggccagaaccaaagccatacatagtcacggtgcacccttcaggccggaatatgcattgaagtgtggattggagattcatacgcaattgaacaccaaaaacaagcttttttctcaatctacgaatagcgccacatctttggtggatgcaccaaaccatcatactagttattatgacatagctttaccgggaacgcagccggttttgaatttggaagcaatcttgtttgccatgaaactttccttggcattgggttctcaagtgaatagcatatctcagtttgataggaagcattatttttatggagatcaacctcaaggctatcaattaacgcagcactacaggccgtttgctagaggtgggaagatcaatttatccaaggaattggatgatatcgatgaaagtgccaaggaaatcggtatcttacagttgcagatagagcaggacacggggaagtctcactatacagagacagataaagacgttattactttggttgatttaaataggtctaacgtcccgcttatcgaattggtaactaaaccagatttcagtgatattaaacaggttagagcgtttattaaaaaatatcagaatttggtacgtcatttgcacatttcctctggggacttggaaacgggcgccatgagagtggacgttaacctctccattaatgaatatgcacgcgttgagttgaagaatttacccaatactagttccatcatcaatgcaatcaagtacgaatatcagagacaagttgagttgatttctgtgggtgacactagcagtttaatggagccagaaacaaggggctggacaggctcttctacggtgaagttgagaagcaaagaaaccacgatcgattacaggtacatgcctgatccagaattgccgtatatcaacctcgcaccagacgttatcagtggtgtgagagggttgatgccccaattaccggacgatataatgagaattcttatgaagaaaccctatcaattatctttgaaggacgccaagattttgacttataatagtaaccaaaacgatatgtacaatcatgaggcgttgagatcttactacttagacaccttccgtgaattttccaagcttgctggtgaacgtagtaacgcgaaattacctacgaattggataatccatgaattcttgggagatttgaacaagttacaaattccattggccaaagcaaaagaaattttgcctcctccggttttcgcccagtttttgaagttattgcatgaagaggttatatccgcaactagtggtaaaatgttactttttcacatattggaaaatttcgagcagagtaactgccaagatttgtctattccagatttttccaaattaatcgagaaatttgaattgcatgcgattaatcaggtcgaccctcaagaattgatggatctctgtaatgatgtcattgcacagcacacagatgacacttttataagaaacttggttactggtaaaaagaagtcctctttaaaattcttgattggacaaggaatgagaagaagccagggacgtataaaggcaaacgaattcgagaaaaaattcaaagagatcttaaatattcaatggtga

SEQ ID NO: 245 - DNA, 4509 bp, Saccharomyces cerevisiae
atgtttcaaagttttttccacaacaatgggcccgctgctgccggtgaaacgttttcagatagcagatcgtaccctttaacgaatcatcaagaagtacccaggaatggactgaatgagttggcctcatctgcaaccaaggcgcaacaacaacctacacacatattaaactcatatccaattaccgggtccaacccactcatgagggcaagcgcaatgggggcgacctctggcagcatcaatcctaatatgtccaacatgaatgagcacattcgtgtttccgggatggggacttctaagcccctggacttagcgggaaagtacattgaccatctacaacataaagatagtaacactcccgtactcgacgaacgatcttattataacagcggggtagattataacttcagcagagaaaaaaacggcttaggagcgtttactccatttgaaaagcaagatgtgttcaacattccggacgagattttgcatgaattttccacttcacagacaaaaactgatatgggtattttcccggagttaaatcgatgttggataactattgataataaactgatactctggaatattaacaatgacaatgagtatcaggtggtagatgatatgaagcataccattcaaaaagtcgccttggtaagacctaagccaaacacctttgtgcctgccgtgaagcatctacttttgataagcacgacaatggagcttttcatgtttgctatttccttagacaaagccaccaacgaactcagtgtattcaatacacatctatcagtccctgtacaaggcattgatgtaatagacattgtgtctcatgaaagatcgggtagaattttcttcgcaggccaagccagtggcctgaatatctgggagttgcactactcaggttccgatgactggttcaatagtaaatgtagtaaggtctgtctgacaaagtctgccctattaagtcttctacctactaacatgttatcgcagattccaggtgttgattttattcaggctttgttcgaagataattctaacggtaatggcggattttctcaagagaccatcacgcaactaactattgaccaacaaagaggaatcatctattcattatcctccaaatccaccattagagcatacgtaataacagaaaaatcactggaaggacccatgtcaattgagcctgcctacatcagtaggatcataggtaccacgacggcaagggcagcaccgattttgggccccaaatacctaaaaattgtcaagataagctctgttgcaccagaagaaaacaacaatttgtttttagttgctttaacagtaggtggtgtgcgtttgtactttaatggttccatgggcagatttaacatcgaagctttgaggttagaatcgatcaagttcccccctagttctgtaactcctgaagtcatccaacaagaattactacatcaacaacaggaacaggcgaagagaagctttcctttcttttcaaatctaatgtcttccgaaccagtcctcttaaaattccaaaagaaatcatctgtattactagagactacaaaagcaagtacaattatttccccaggcatatttttttccgctgtgatcaagtcatctcagcaaactcatcaacaagaaaaaaaagagaactcatctgttactggaacgaccgctaccgcagggtctaaaactgtcaaacaacagccagttactttacaacataagcttttcgttagtgttccagattatggtatcttgaaaacacacggtaagtacgttgaaaatgccacgtttttggaaactgcgggcccagttcaacaaattattcccttatcggggttgtttaatgcaacgacaaagccacaaggatttgctaacgaatttgcgacacagtacacatcagaaactttaagggtagcagttttgacgagcacttctatcgaaatttataaatatcgtactcctgatgaaatttttgaggatctaatcgataatccgctgccattcgtcttaaattatggtgccgcggaagcttgttccactgcattgtttgttacttgcaaatcaaataaatctgaaaaattaagatctaatgccctgacttttttaactatgggtattcctggcgttgttgacatcaaacctgtctacaaccgttattctgtatctacagtatcctctttattgtcaaagcccactttatcaaccgcaacaactaatctccaacaatcaataactggctttagtaaaccctcccctgcaaacaaggaagattttgacttagatgacgtaatattatcccccagattttacggtattgcattattgattaccagactacttcgagatatttgggggagacatgtcttcatgacttttacagataatagggtgacatcccatgctttcatttcttcttctgatccaatcactccatctattaataacctaaaaagtgatgaaatttcacaaaataggaacataatatcaaaggtttctatttccaaggattgtatcgagtactatctatcttcaattaacattttaaatgaatttttcatcacttatggtgattcaatttcccaaatatcagctccctacgtattagcgaacaattctaacggcagggttattgataaaacagaagaagttgcaaaccaagcggaaagtatagcgattaatgcgatgatcaaaatggtacagtccataaaggaaggtctatcattcttgaacgttttatacgaggaaagcgaagtcgaaggattcgacaaccaataccttggtttcaaggatataatcagttttgtaagcttggacgtccaaaaagatttagtcaaactagattttaaagatttatttgctccaaatgacaaaacaaaatcattaattagagaaattttattatccatcatcaataggaatatcaccaaaggtgcgtcgatagagtataccgcaacagctttacaagaacgctgtggatcattctgctctgcaagtgatatattaggatttagagccattgaacatcttagaagggctaaagaaattggcttgcgtaactatgattctctaaactatcacctgaaaaatgctactgctttacttgaacaaattgtggatgatctttctatcgagaaattgaaagaagctgtatcaatgatgctgagtgtaaattattacccaaaatctattgaattcttattgaatattgccaactctatggacaaaggcaaactagcttgtcaatatgtggcaaatggatttttagaaaatgatgataggaaacaatattacgacaaacgtatcttagtttatgacctagtttttgatactttaataaaagtagacgaacttgccgaaaaaaaacagtcatcaaaaactcaaaaccaaatttcgatatcgaatgacgatgaagtgaaactgagacaaaaaagttatgaagccgccctaaaatataacgatagattattccactatcatatgtatgattggcttgtgtctcagaacagagaggaaaaactattagatattgaaactccattcatactcccttatttaatggaaaaggcaggtagttcattgaagatatctaatatactctgggtctattattcaagaagatctaaatttttcgaatctgctgaaattctttaccgtttagctacatcgaattttgacatcacattgtttgaaagaattgagtttctttcacgcgccaatggtttttgcaacagtgtgtcaccattaagccagaaacaaagaattgtacaattagctagtaggatccaagatgcatgtgaagttgctggtattcaaggtgatatattgtcgctcgtgtatacagacgcaagaatagattcagccattaaagatgagctgatcaaaactctagatggtaaaatattgagcacaagtgagctgtttaatgattttgctgtacccttaagttaccatgaaattgccctattcattttcaagatagcagattttagggaccatgaagtaattatggccaagtgggatgagctattccaatctttgaggatggaatttaataataccggaaagaaagaagattcaatgaacttcatcaacttactgtctaatgtactgattaaaattggtaaaaatgttcaggattctgaattcattttccccattttcgaactctttcccattgtctgtaattttttctacgaaacactacctaaggaacatattgtatcagggtcgatagtttctatattcataacagcgggtgtttctttcaacaaaatgtactatattttaaaagaactaatcgagacatcagattccgataattccgtatttaataaagaaatgacctggttaattcacgaatggtacaaatcggacaggaaatttagggacattatttcctacaacgatatcattcacttgaaggaatacaaaattgataatgatccaattgaaaagtacgttaagaacagcggcaataatttggggatttgtttctacaaagaataa

SEQ ID NO: 246 - DNA, 4509 bp, Artificial Sequence
  Description of Artificial Sequence: Synthetic polynucleotide
atgtttcaaagttttttccacaacaatgggcccgctgctgccggtgaaacgttttctgatagcagatcttaccctttaacgaatcatcaagaagtacccaggaatggattgaatgagttggcctcttctgcaaccaaggcgcaacaacaacctacacacatattaaacagttatccaattaccgggtccaacccactcatgagggcaagcgcaatgggggcgacctctggcagcatcaatcctaatatgtccaacatgaatgagcacattcgtgtttccgggatggggacttctaagcccttagacttagcgggaaagtacattgaccatttacaacataaagatagtaacactcccgtactcgacgaaagatcttattataacagcggggtagattataacttcagcagagaaaaaaacggcttaggagcgtttactccatttgaaaagcaagatgtgttcaacattccggacgagattttgcatgaattttccacttctcagacaaaaactgatatgggtattttcccggagttaaatagatgttggataactattgataataaattgatactctggaatattaacaatgacaatgagtatcaggtggtagatgatatgaagcataccattcaaaaagtcgccttggtaagacctaagccaaacacctttgtgcctgccgtgaagcatttgcttttgataagcacgacaatggagcttttcatgtttgctatttccttagacaaagccaccaacgaactcagtgtattcaatacacatttaagtgtccctgtacaaggcattgatgtaatagacattgtgtctcatgaaagatctggtagaattttcttcgcaggccaagccagtggcttgaatatctgggagttgcactactctggttccgatgactggttcaatagtaaatgtagtaaggtctgtttaacaaagtctgccttattaagtcttttacctactaacatgttatctcagattccaggtgttgattttattcaggctttgttcgaagataattctaacggtaatggcggattttctcaagagaccatcacgcaattgactattgaccaacaaagaggaatcatctattctttatcctccaaatccaccattagagcatacgtaataacagaaaaatctttggaaggacccatgtctattgagcctgcctacatcagtaggatcataggtaccacgacggcaagggcagcaccgattttgggccccaaatacttgaaaattgtcaagataagctctgttgcaccagaagaaaacaacaatttgtttttagttgctttaacagtaggtggtgtgcgtttgtactttaatggttccatgggcagatttaacatcgaagctttgaggttagaaagtatcaagttcccccctagttctgtaactcctgaagtcatccaacaagaattattacatcaacaacaggaacaggcgaagagaagctttcctttcttttctaatttaatgtcttccgaaccagtcctcttaaaattccaaaagaaatcttctgtattattggagactacaaaagcaagtacaattatttccccaggcatatttttttccgctgtgatcaagtcttctcagcaaactcatcaacaagaaaaaaaagagaactcttctgttactggaacgaccgctaccgcagggtctaaaactgtcaaacaacagccagttactttacaacataagcttttcgttagtgttccagattatggtatcttgaaaacacacggtaagtacgttgaaaatgccacgtttttggaaactgcgggcccagttcaacaaattattcccttaagtgggttgtttaatgcaacgacaaagccacaaggatttgctaacgaatttgcgacacagtacacaagtgaaactttaagggtagcagttttgacgagcacttctatcgaaatttataaatatcgtactcctgatgaaatttttgaggatttgatcgataatccgttaccattcgtcttaaattatggtgccgcggaagcttgttccactgcattgtttgttacttgcaaatctaataaatctgaaaaattaagatctaatgccttaacttttttaactatgggtattcctggcgttgttgacatcaaacctgtctacaaccgttattctgtatctacagtatcctctttattgtccaagcccactttatctaccgcaacaactaatctccaacaaagtataactggctttagtaaaccctcccctgcaaacaaggaagattttgacttagatgacgtaatattatcccccagattttacggtattgcattattgattaccagattacttagagatatttgggggagacatgtcttcatgacttttacagataatagggtgacatcccatgctttcatttcttcttctgatccaatcactccatctattaataacttgaaaagtgatgaaatttctcaaaataggaacataatatccaaggtttctatttccaaggattgtatcgagtactatttatcttccattaacattttaaatgaatttttcatcacttatggtgattctatttcccaaatatctgctccctacgtattagcgaacaattctaacggcagggttattgataaaacagaagaagttgcaaaccaagcggaaagtatagcgattaatgcgatgatcaaaatggtacagtccataaaggaaggtttatctttcttgaacgttttatacgaggaaagcgaagtcgaaggattcgacaaccaataccttggtttcaaggatataatcagttttgtaagcttggacgtccaaaaagatttagtcaaattggattttaaagatttatttgctccaaatgacaaaacaaaatctttaattagagaaattttattatccatcatcaataggaatatcaccaaaggtgcgtctatagagtataccgcaacagctttacaagaacgctgtggaagtttctgctctgcaagtgatatattaggatttagagccattgaacatcttagaagggctaaagaaattggcttgcgtaactatgattctttgaactatcacttgaaaaatgctactgctttacttgaacaaattgtggatgatctttctatcgagaaattgaaagaagctgtatctatgatgttaagtgtaaattattacccaaaatctattgaattcttattgaatattgccaactctatggacaaaggcaaattggcttgtcaatatgtggcaaatggatttttagaaaatgatgataggaaacaatattacgacaaacgtatcttagtttatgacttggtttttgatactttaataaaagtagacgaacttgccgaaaaaaaacagtcttctaaaactcaaaaccaaatttctatatccaatgacgatgaagtgaaattgagacaaaaaagttatgaagccgccttgaaatataacgatagattattccactatcatatgtatgattggcttgtgtctcagaacagagaggaaaaattattagatattgaaactccattcatactcccttatttaatggaaaaggcaggtagttctttgaagatatctaatatactctgggtctattattctagaagatctaaatttttcgaatctgctgaaattctttaccgtttagctacaagtaattttgacatcacattgtttgaaagaattgagtttctttcccgcgccaatggtttttgcaacagtgtgtctccattaagccagaaacaaagaattgtacaattagctagtaggatccaagatgcatgtgaagttgctggtattcaaggtgatatattgtctctcgtgtatacagacgcaagaatagattctgccattaaagatgagttgatcaaaactttagatggtaaaatattgagcacaagtgagttatttaatgattttgctgtacccttaagttaccatgaaattgcccttttcattttcaagatagcagattttagggaccatgaagtaattatggccaagtgggatgagcttttccaatctttgaggatggaatttaataataccggaaagaaagaagattctatgaacttcatcaacttattatctaatgtacttattaaaattggtaaaaatgttcaggattctgaattcattttccccattttcgaactctttcccattgtctgtaattttttctacgaaacattgcctaaggaacatattgtaagtgggtccatagtttctatattcataacagcgggtgtttctttcaacaaaatgtactatattttaaaagaattgatcgagacatctgattccgataattccgtatttaataaagaaatgacctggttaattcacgaatggtacaaaagtgacaggaaatttagggacattatttcctacaacgatatcattcacttgaaggaatacaaaattgataatgatccaattgaaaagtacgttaagaacagcggcaataatttggggatttgtttctacaaagaatga

SEQ ID NO: 247 - DNA, 354 bp, Saccharomyces cerevisiae
atgaagtctacatttaagtctgaatatccatttgaaaaaaggaaggcggagtcggagaggattgctgacaggttcaagaataggatacctgtgatttgcgaaaaagctgaaaagtcagatattccagagattgataagcgtaaatatctagttcctgctgaccttaccgtagggcaatttgtttatgttataagaaagagaattatgctaccccctgagaaggccatcttcatttttgtcaatgatactttgccacctactgcggcgttgatgtctgccatatatcaagaacacaaggataaggacgggtttttgtatgtcacttactcaggagaaaatacatttggcaggtag

SEQ ID NO: 248 - DNA, 354 bp, Artificial Sequence
  Description of Artificial Sequence: Synthetic polynucleotide
atgaagtctacatttaagtctgaatatccatttgaaaaaaggaaggcggagagtgagaggattgctgacaggttcaagaataggatacctgtgatttgcgaaaaagctgaaaagagtgatattccagagattgataagcgtaaatatttggttcctgctgaccttaccgtagggcaatttgtttatgttataagaaagagaattatgttgccccctgagaaggccatcttcatttttgtcaatgatactttgccacctactgcggcgttgatgtctgccatatatcaagaacacaaggataaggacgggtttttgtatgtcacttactccggagaaaatacatttggcaggtga

SEQ ID NO: 249 - DNA, 3219 bp, Saccharomyces cerevisiae
atgtccgagagtaacgcacacttctcatttccaaaggaggaagaaaaagttctatctctttgggatgaaatagatgcctttcatacttcattagaattaacaaaagacaaaccggagttttccttcttcgatgggcctccatttgccaccggtactcctcattacggtcatattcttgcttccactattaaggatattgttccaagatacgctaccatgacaggccaccacgtggaaagaagattcggttgggatacacacggtgttccaattgaacatatcattgacaagaaattaggtatcacgggtaaagatgacgtcttcaagtatggtcttgaaaactacaacaatgagtgtagatccattgttatgacttatgccagtgattggagaaaaactattggtcgtttgggtcgttggattgatttcgacaacgattacaagactatgtatccatcctttatggagtccacatggtgggctttcaagcaacttcatgaaaaaggtcaagtttaccgtggattcaaagttatgccttattctactggcctaaccactcccttgagtaactttgaagctcagcaaaactataaagatgttaacgacccagctgtgaccattggtttcaatgttattggccaggaaaaaactcaattggtcgcatggactacgactccatggactttaccttccaatttgtcgttatgtgttaacgctgatttcgaatatgtaaagatttacgacgaaaccagagatcgttatttcatcttattagaatctttgattaaaaccttgtataagaagcctaagaatgaaaaatataagattgtggaaaaaattaaaggttctgatttggttggtttgaagtatgaaccattgttcccatatttcgctgaacagttccatgaaacagcttttagagttatttcagatgattatgttactagtgattccggtactggtattgttcataacgctcccgctttcggtgaagaggataatgctgcttgtttgaagaacggcgtcatatccgaagattcagtgttacctaacgccattgatgaccttggtagattcacgaaagacgttcctgattttgagggtgtttatgtcaaggacgctgataagttgattattaagtacttaactaatactggaaatttgttattggcatcccaaattcgccattcctatccattctgttggagatccgataccccattgttataccgttctgttccagcttggttcgttcgtgttaaaaacattgtccctcaaatgttggattctgtgatgaaatctcactgggttcctaacaccatcaaggaaaagaggttcgccaactggatcgccaatgcccgtgactggaacgtttccagaaatagatattggggtactccaattcctttatgggtttcagacgattttgaggaggtcgtctgtgttggttctatcaaagaattggaagaattgaccggtgtgcgtaacatcactgacttgcatcgtgatgtcattgacaaattgacaattccatccaagcaaggtaagggtgacttaaagagaattgaagaagtttttgattgttggtttgaatctggttctatgccttatgcttctcaacattatccatttgaaaacacagaaaaatttgacgaaagagttccagctaatttcatctctgaaggtttggatcaaacaagaggttggttctacacgttagctgtcttaggtacccatctatttggctctgttccatacaagaacgtcatcgtctctggtattgtcttagctgccgatggtagaaagatgtctaaatccttgaaaaattaccctgatccatccattgttctgaacaaatatggtgcggatgcattaagattgtacttgataaactcacctgttttaaaagctgaaagtttgaaattcaaagaagagggtgttaaggaggttgtttcaaaggtcttactaccatggtggaactcctttaaatttttggacggtcaaattgccttgttgaaaaagatgtctaacatcgacttccaatatgatgattctgtgaaaagtgataatgtcatggacagatggattttagcttctatgcaatctctagtacaattcattcacgaagaaatgggtcagtacaaattatacactgtcgttccaaaacttttgaatttcattgatgaattgacaaactggtatattagatttaatcgtcgtcgtttgaagggtgaaaacggtgttgaggactgtttgaaagcattaaattctttattcgatgccttattcacatttgtccgtgccatggctccattcaccccatttttgtcagaaagcatttatttgagactgaaggaatacatcccagaagctgtcttagcaaaatacggtaaggacggaagatcagtccatttcttatcttacccagtggtcaagaaagaatactttgacgaggccatcgaaactgcagtttctagaatgcaatccgttatcgatttgggtagaaacattcgtgaaaagaaaactatttccttaaaaactccattgaagactttggtcatccttcacagtgatgaatcatacttgaaggatgtagaagccttgaaaaactacattatcgaggaattaaatgttcgtgatgttgttatcacctccgatgaggcaaaatatggtgttgagtataaagcagttgctgattggcctgtattgggtaagaagttgaaaaaagacgcaaagaaggttaaagatgccctaccatcagtcacttctgagcaagtacgggaatatttggaaagcggaaagttggaggttgccggtattgaactggttaaaggagatttgaatgctattagaggcttgccagaatctgctgtccaagctggacaagaaaccagaaccgaccaagacgtgttaatcatcatggatacaaatatttactctgaactaaagagtgaaggtctcgcaagagagctggtcaacagaatccaaaaattgagaaagaagtgtggtttggaagccaccgacgatgttttagtggagtacgaattagttaaagatactatcgactttgaagccattgtcaaagaacattttgatatgttaagcaagacctgtagatccgacattgccaaatatgacggctcaaagacagacccaattggtgatgaagaacaatctattaatgacaccattttcaaattaaaagtgttcaaattatga

SEQ ID NO: 250 - DNA, 3219 bp, Artificial Sequence
  Description of Artificial Sequence: Synthetic polynucleotide
atgtccgagagtaacgcacacttctcctttccaaaggaggaagaaaaagttttatctctttgggatgaaatagatgcctttcatacttctttagaattaacaaaagacaaaccggagttttccttcttcgatgggcctccatttgccaccggtactcctcattacggtcatattcttgcttccactattaaggatattgttccaagatacgctaccatgacaggccaccacgtggaaagaagattcggttgggatacacacggtgttccaattgaacatatcattgacaagaaattaggtatcacgggtaaagatgacgtcttcaagtatggtcttgaaaactacaacaatgagtgtagatccattgttatgacttatgccagtgattggagaaaaactattggtcgtttgggtcgttggattgatttcgacaacgattacaagactatgtatccatcctttatggagtccacatggtgggctttcaagcaacttcatgaaaaaggtcaagtttaccgtggattcaaagttatgccttattctactggcttaaccactcccttgagtaactttgaagctcagcaaaactataaagatgttaacgacccagctgtgaccattggtttcaatgttattggccaggaaaaaactcaattggtcgcatggactacgactccatggactttaccttccaatttgtctttatgtgttaacgctgatttcgaatatgtaaagatttacgacgaaaccagagatcgttatttcatcttattagaatctttgattaaaaccttgtataagaagcctaagaatgaaaaatataagattgtggaaaaaattaaaggttctgatttggttggtttgaagtatgaaccattgttcccatatttcgctgaacagttccatgaaacagcttttagagttatttctgatgattatgttactagtgattccggtactggtattgttcataacgctcccgctttcggtgaagaggataatgctgcttgtttgaagaacggcgtcatatccgaagattctgtgttacctaacgccattgatgaccttggtagattcacgaaagacgttcctgattttgagggtgtttatgtcaaggacgctgataagttgattattaagtacttaactaatactggaaatttgttattggcatcccaaattcgccattcctatccattctgttggagatccgataccccattgttataccgttctgttccagcttggttcgttcgtgttaaaaacattgtccctcaaatgttggattctgtgatgaaatctcactgggttcctaacaccatcaaggaaaagaggttcgccaactggatcgccaatgcccgtgactggaacgtttccagaaatagatattggggtactccaattcctttatgggtttctgacgattttgaggaggtcgtctgtgttggttctatcaaagaattggaagaattgaccggtgtgcgtaacatcactgacttgcatcgtgatgtcattgacaaattgacaattccatccaagcaaggtaagggtgacttaaagagaattgaagaagtttttgattgttggtttgaatctggttctatgccttatgcttctcaacattatccatttgaaaacacagaaaaatttgacgaaagagttccagctaatttcatctctgaaggtttggatcaaacaagaggttggttctacacgttagctgtcttaggtacccatttatttggctctgttccatacaagaacgtcatcgtctctggtattgtcttagctgccgatggtagaaagatgtctaaatccttgaaaaattaccctgatccatccattgttttgaacaaatatggtgcggatgcattaagattgtacttgataaactctcctgttttaaaagctgaaagtttgaaattcaaagaagagggtgttaaggaggttgtttccaaggtcttattaccatggtggaactcctttaaatttttggacggtcaaattgccttgttgaaaaagatgtctaacatcgacttccaatatgatgattctgtgaaaagtgataatgtcatggacagatggattttagcttctatgcaatctttagtacaattcattcacgaagaaatgggtcagtacaaattatacactgtcgttccaaaacttttgaatttcattgatgaattgacaaactggtatattagatttaatcgtcgtcgtttgaagggtgaaaacggtgttgaggactgtttgaaagcattaaattctttattcgatgccttattcacatttgtccgtgccatggctccattcaccccatttttgagtgaaagcatttatttgagattaaaggaatacatcccagaagctgtcttagcaaaatacggtaaggacggaagatctgtccatttcttatcttacccagtggtcaagaaagaatactttgacgaggccatcgaaactgcagtttctagaatgcaatccgttatcgatttgggtagaaacattcgtgaaaagaaaactatttccttaaaaactccattgaagactttggtcatccttcacagtgatgaatcttacttgaaggatgtagaagccttgaaaaactacattatcgaggaattaaatgttcgtgatgttgttatcacctccgatgaggcaaaatatggtgttgagtataaagcagttgctgattggcctgtattgggtaagaagttgaaaaaagacgcaaagaaggttaaagatgccttaccaagtgtcacttctgagcaagtaagagaatatttggaaagcggaaagttggaggttgccggtattgaattggttaaaggagatttgaatgctattagaggcttgccagaatctgctgtccaagctggacaagaaaccagaaccgaccaagacgtgttaatcatcatggatacaaatatttactctgaattgaagagtgaaggtctcgcaagagagttggtcaacagaatccaaaaattgagaaagaagtgtggtttggaagccaccgacgatgttttagtggagtacgaattagttaaagatactatcgactttgaagccattgtcaaagaacattttgatatgttaagcaagacctgtagatccgacattgccaaatatgacggctccaagacagacccaattggtgatgaagaacaatctattaatgacaccattttcaaattaaaagtgttcaaattatga

SEQ ID NO: 251 - DNA, 1950 bp, Saccharomyces cerevisiae
atgtctagagcagttggtattgatttgggaacaacttactcgtgtgttgctcatttttccaatgatagggtagagataattgcaaatgatcaaggtaataggaccactccatcgtatgtggctttcacagacaccgaaagattaattggtgacgccgccaaaaatcaagctgcaatcaatcctcataatacagtttttgatgcaaagcggttaattggtcgtaaatttgatgatcctgaagtgacgacagatgccaagcacttccctttcaaagttatatccagagatggtaaacctgtagtgcaagtagaatataagggtgaaacgaaaacatttacgcctgaggaaatttcttccatggttttaagcaaaatgaaggaaactgctgagaactatttgggaactacggtcaatgatgctgttgtaactgttcctgcatatttcaatgattctcaaagacaagccactaaggatgcaggaactattgcagggatgaacgttttacgtattatcaatgaacccactgcagcagcaattgcttatggcttggataagaaaggcagggctgagcacaatgtcctgatttttgatttgggtggtggtacttttgacgtctctttactttcaattgatgagggtgtttttgaggttaaggctaccgcaggagacactcatttaggtggtgaagattttgataataggttggtgaaccatttagccactgaattcaaaaggaaaacgaaaaaggacatctctaataatcaaagatcgttaagaagattgagaactgcggcagaaagagctaagagagcgctttcttcctcatctcaaacctcgatcgagatcgattctttatttgaaggtatggatttctacacttcgttaacaagggcaaggtttgaagagctatgtgctgatttattcagatccacattggaaccagtagaaaaggttcttaaagattcgaagctggacaagtcccaaattgatgagattgtgttagtcggtggatctaccagaatcccaaagattcagaaattagtttctgacttcttcaatggcaaagagcctaatcgttctatcaacccggatgaggctgttgcttatggtgcagccgttcaagctgccattttaaccggcgatcaatcaacaaagacacaagatttactattattggatgttgcgccattgtccctaggaattgaaactgcaggcggcataatgactaagctaattcctagaaactcaacgattccaacaaagaaatcggaaaccttctctacctatgcagataatcaacctggtgttttaattcaagtctttgaaggtgaaagaacaagaacaaaggataataacttacttggtaaattcgaattaagtggcattccgcctgctcccagaggtgtgcctcaaattgatgttacctttgatatcgacgctaatggtattcttaatgtgtctgctttggaaaagggtactggtaagagtaacaaaatcacgatcactaacgataaaggtaggctctcgaaggatgatattgataggatggtttctgaagctgaaaaatatagggctgacgatgaaagggaggcagaacgagttcaggctaagaatcagcttgaatcgtatgcatttactttgaagaataccataaacgaagcaagtttcaaagagaaagtaggtgaagatgatgcaaagagattagaaacagcgtctcaggaaaccattgactggttagatgcatcgcaggcagcctctacggacgaatataaggatagacaaaaggagttggaaggcattgccaatccaataatgacgaaattttacggtgctggtgccggcgcaggtcctggagcgggggaatccggtggattccccggatccatgcccaactcgggtgctacgggaggtggagaagatacaggtccaacagtggaagaggttgattga

SEQ ID NO: 252 - DNA, 1950 bp, Artificial Sequence
  Description of Artificial Sequence: Synthetic polynucleotide
atgtctagagcagttggtattgatttgggaacaacttactcttgtgttgctcatttttccaatgatagggtagagataattgcaaatgatcaaggtaataggaccactccatcttatgtggctttcacagacaccgaaagattaattggtgacgccgccaaaaatcaagctgcaatcaatcctcataatacagtttttgatgcaaagagattaattggtcgtaaatttgatgatcctgaagtgacgacagatgccaagcacttccctttcaaagttatatccagagatggtaaacctgtagtgcaagtagaatataagggtgaaacgaaaacatttacgcctgaggaaatttcttccatggttttaagcaaaatgaaggaaactgctgagaactatttgggaactacggtcaatgatgctgttgtaactgttcctgcatatttcaatgattctcaaagacaagccactaaggatgcaggaactattgcagggatgaacgttttacgtattatcaatgaacccactgcagcagcaattgcttatggcttggataagaaaggcagggctgagcacaatgtcttgatttttgatttgggtggtggtacttttgacgtctctttactttctattgatgagggtgtttttgaggttaaggctaccgcaggagacactcatttaggtggtgaagattttgataataggttggtgaaccatttagccactgaattcaaaaggaaaacgaaaaaggacatctctaataatcaaagatctttaagaagattgagaactgcggcagaaagagctaagagagcgctttcttcctcttctcaaacctctatcgagatcgattctttatttgaaggtatggatttctacacttctttaacaagggcaaggtttgaagagctctgtgctgatttattcagatccacattggaaccagtagaaaaggttcttaaagattctaagttggacaagtcccaaattgatgagattgtgttagtcggtggatctaccagaatcccaaagattcagaaattagtttctgacttcttcaatggcaaagagcctaatcgttctatcaacccggatgaggctgttgcttatggtgcagccgttcaagctgccattttaaccggcgatcaaagtacaaagacacaagatttattattattggatgttgcgccattgtccttgggaattgaaactgcaggcggcataatgactaagttgattcctagaaactccacgattccaacaaagaaaagtgaaaccttctctacctatgcagataatcaacctggtgttttaattcaagtctttgaaggtgaaagaacaagaacaaaggataataacttacttggtaaattcgaattaagtggcattccgcctgctcccagaggtgtgcctcaaattgatgttacctttgatatcgacgctaatggtattcttaatgtgtctgctttggaaaagggtactggtaagagtaacaaaatcacgatcactaacgataaaggtaggctctctaaggatgatattgataggatggtttctgaagctgaaaaatatagggctgacgatgaaagggaggcagaaagagttcaggctaagaatcagcttgaaagttatgcatttactttgaagaataccataaacgaagcaagtttcaaagagaaagtaggtgaagatgatgcaaagagattagaaacagcgtctcaggaaaccattgactggttagatgcatcccaggcagcctctacggacgaatataaggatagacaaaaggagttggaaggcattgccaatccaataatgacgaaattttacggtgctggtgccggcgcaggtcctggagcgggggaatccggtggattccccggatccatgcccaacagtggtgctacgggaggtggagaagatacaggtccaacagtggaagaggttgattga

SEQ ID NO: 253 - DNA, 1068 bp, Saccharomyces cerevisiae
atgaatactgtaccatttacatctgctccgattgaggtaactatagggatcgatcagtattcctttaatgtcaaggagaatcagccatttcacggaatcaaggacatccccattggacacgttcatgtcattcattttcagcatgcagataattccagcatgaggtatggctactggtttgactgtagaatgggaaacttttacattcagtatgatcctaaagatggcctttacaaaatgatggaagaaagggatggcgcaaaattcgagaatattgttcacaacttcaaggaacggcagatgatggtttcttatccgaaaattgacgaagatgatacctggtacaatcttaccgagtttgtgcagatggataaaatccgaaagatagtaaggaaagatgaaaaccagttctcttacgtagattcttcgatgaccacagttcaagaaaatgagctgctaaaatccagcttgcaaaaagcaggttctaaaatggaagccaagaatgaagatgatcctgcacattctttaaactatacagtaataaacttcaaatctagagaagccataaggcctggccatgaaatggaggattttttagacaagtcttactacttgaacactgtaatgctacaaggaatttttaaaaattcaagtaattattttggggagttgcagtttgcgttcttaaatgccatgttttttggtaactacgggtcgagtttgcaatggcatgctatgatcgaactgatatgttcaagcgctacggtgcctaaacatatgctcgataaattagacgaaatcttatattatcagataaagacattgcctgaacaatactcagacatcttgttgaatgaacgagtttggaatatttgtctgtattcgtcatttcaaaaaaactccctacacaacacagaaaagataatggaaaacaaatatccagaattgcttggtaaagacaatgaagacgacgctcttatttacggtatcagtgatgaagaaagggatgacgaggatgatgagcacaaccctaccattgttggcggtctctattaccaaaggccataa

SEQ ID NO: 254 - DNA, 1068 bp, Artificial Sequence
  Description of Artificial Sequence: Synthetic polynucleotide
atgaatactgtaccatttacatctgctccgattgaggtaactatagggatcgatcagtattcctttaatgtcaaggagaatcagccatttcacggaatcaaggacatccccattggacacgttcatgtcattcattttcagcatgcagataattccagcatgaggtatggctactggtttgactgtagaatgggaaacttttacattcagtatgatcctaaagatggcctttacaaaatgatggaagaaagggatggcgcaaaattcgagaatattgttcacaacttcaaggaaagacagatgatggtttcttatccgaaaattgacgaagatgatacctggtacaatcttaccgagtttgtgcagatggataaaatcagaaagatagtaaggaaagatgaaaaccagttctcttacgtagattcttctatgaccacagttcaagaaaatgagttattgaaatccagcttgcaaaaagcaggttctaaaatggaagccaagaatgaagatgatcctgcacattctttaaactatacagtaataaacttcaaatctagagaagccataaggcctggccatgaaatggaggattttttagacaagtcttactacttgaacactgtaatgttacaaggaatttttaaaaatagtagtaattattttggggagttgcagtttgcgttcttaaatgccatgttttttggtaactacgggagtagtttgcaatggcatgctatgatcgaattgatatgtagcagcgctacggtgcctaaacatatgctcgataaattagacgaaatcttatattatcagataaagacattgcctgaacaatacagtgacatcttgttgaatgaaagagtttggaatatttgtttgtattcttcttttcaaaaaaactccttgcacaacacagaaaagataatggaaaacaaatatccagaattgcttggtaaagacaatgaagacgacgctcttatttacggtatcagtgatgaagaaagggatgacgaggatgatgagcacaaccctaccattgttggcggtctctattaccaaaggccatga

SEQ ID NO: 255 - DNA, 603 bp, Saccharomyces cerevisiae
atgggtatttctcgtgattctcgtcacaaaagatccgctaccggtgccaagcgtgctcaattcagaaagaagagaaagttcgaattaggccgtcaaccagccaacaccaagatcggtgctaagagaattcactctgttagaactagaggtggtaacaagaaatacagagctctaagaattgaaaccggtaacttttcttgggcttctgaaggtatctccaagaagaccagaattgctggtgttgtttaccatccatccaacaatgaattggttagaactaacactttgaccaaggctgccattgtccaaattgatgctactccattcagacaatggttcgaagctcactacggtcaaaccttgggtaagaagaagaacgtcaaggaagaagaaactgttgccaagagcaagaacgctgaaagaaagtgggctgctagagctgcttctgccaagatcgaatcttccgttgaatctcaattcagcgccggtagattatacgcttgtatctcttccagaccaggtcaatccggtagatgtgatggttacatcttggaaggtgaagaattagctttctacctaagaagattgactgctaagaaatag

SEQ ID NO: 256 - DNA, 603 bp, Artificial Sequence
  Description of Artificial Sequence: Synthetic polynucleotide
atgggtatttctcgtgattctcgtcacaaaagatccgctaccggtgccaagcgtgctcaattcagaaagaagagaaagttcgaattaggccgtcaaccagccaacaccaagatcggtgctaagagaattcactctgttagaactagaggtggtaacaagaaatacagagctttgagaattgaaaccggtaacttttcttgggcttctgaaggtatctccaagaagaccagaattgctggtgttgtttaccatccatccaacaatgaattggttagaactaacactttgaccaaggctgccattgtccaaattgatgctactccattcagacaatggttcgaagctcactacggtcaaaccttgggtaagaagaagaacgtcaaggaagaagaaactgttgccaagagcaagaacgctgaaagaaagtgggctgctagagctgcttctgccaagatcgaatcttccgttgaatctcaattcagcgccggtagattatacgcttgtatctcttccagaccaggtcaatccggtagatgtgatggttacatcttggaaggtgaagaattagctttctacttgagaagattgactgctaagaaatga

SEQ ID NO: 257 - DNA, 99 bp, Saccharomyces cerevisiae
atggaactgtttcatatacgttatttacaggcctatcttaaagttataggaaattacacttgccatttgctttttggtactcacaagaagacgttataa

SEQ ID NO: 258 - DNA, 99 bp, Artificial Sequence
  Description of Artificial Sequence: Synthetic oligonucleotide
atggaattatttcatatacgttatttacaggcctatcttaaagttataggaaattacacttgccatttgctttttggtactcacaagaagacgttatga

SEQ ID NO: 259 - DNA, 249 bp, Saccharomyces cerevisiae
atgtcaacatatgacgaaatcgaaatcgaagatatgacgtttgagcctgaaaatcaaatgttcacctatccttgtccctgtggagataggtttcaaatatatctggatgacatgtttgagggcgaaaaagttgctgtttgtcccagctgctcactgatgatcgatgtagttttcgataaagaagacttggctgagtactacgaagaggcaggcatccacccccctgagcctattgccgctgctgcctaa

SEQ ID NO: 260 - DNA, 249 bp, Artificial Sequence
  Description of Artificial Sequence: Synthetic polynucleotide
atgtctacatatgacgaaatcgaaatcgaagatatgacgtttgagcctgaaaatcaaatgttcacctatccttgtccctgtggagataggtttcaaatatatttggatgacatgtttgagggcgaaaaagttgctgtttgtcccagctgctctttgatgatcgatgtagttttcgataaagaagacttggctgagtactacgaagaggcaggcatccacccccctgagcctattgccgctgctgcctga

SEQ ID NO: 261 - DNA, 309 bp, Saccharomyces cerevisiae
atgatattattgaaatctgagcatggaggaaaaagaaaagagatgcgacaagatgatttaatgggtccaaatcattttagcctacgtatcatgtataaaataatcatatacacctacccagtatccttatatgcagtaaaagagctcaacctgagcaaaacgttttccatcagtgcacttggaattttgaatagtaattccaaccggagtccagcgaagaagcaaaccttcttttctgcttgcgttgctaagtcatatagctctttctttatttctatttgtattctcgatctagcctctcatctttag

SEQ ID NO: 262 - DNA, 309 bp, Artificial Sequence
  Description of Artificial Sequence: Synthetic polynucleotide
atgatattattgaaatctgagcatggaggaaaaagaaaagagatgagacaagatgatttaatgggtccaaatcattttagccttcgtatcatgtataaaataatcatatacacctacccagtatccttatatgcagtaaaagagctcaacttgagcaaaacgttttccatcagtgcacttggaattttgaatagtaattccaacagaagtccagcgaagaagcaaaccttcttttctgcttgcgttgctaagagttatagctctttctttatttctatttgtattctcgatttggcctctcatctttga

SEQ ID NO: 263 - DNA, 1290 bp, Saccharomyces cerevisiae
atggctaaagatattttgaagaaccaggaccctaaattgcaagcgatgatcgttgaacactcggcgcctgctcccaaagagatacctatggacgctcctgttttgaaaagagtcgctagacctttaagacatgtaaagttcattccaattaaatcgctgatattccatactaaaacagggcccatggatttttcttatgaaaagaagatcaagacgcctattcctaagaacaaaattgtagttcgagtaagtaatgtgggtttgaaccctgtagatatgaaaatcaggaacggctacacatcgtcgatttacggtgagatcggcttggggagagagtacagtggtgttatcactgaggtaggcgagaacctaaactacgcctggcacgtgggtgatgaagtatacggtatatactaccaccctcatttggccgtgggatgtttgcaaagttcaatcttagtagatccaaaggtggacccaatccttttgagaccagaatcggttagcgccgaagaagctgcaggctccttattctgcctggccaccggctataatattctgaataaattatccaagaacaagtatttgaagcaagattcaaacgttttgattaatggtggaacttcgtcagtggggatgtttgtcatacaattattgaagcgtcattacaagttacagaaaaaactagtgattgtaacgtctgcaaatgggccccaagttttacaggagaaatttcctgatctggctgatgaaatgattttcatcgattacttaacgtgtaggggtaaatctagtaaaccactaagaaaaatgctcgaagaaaagaaaatttctcagtatgatccggtcgaggataaggaaactatacttaactataatgaggggaagttcgatgttgtactcgattttgtcggtggttacgatattttgagtcattctagttcattgattcacggcggtggtgcgtacgtaaccactgtaggtgattacgttgccaattataaagaagacattttcgattcatgggataacccaagtgccaatgcaagaaaaatgttcgggtctattatctggtcatataactacacacattactattttgatccgaatgcaaagacggcttccgccaataatgattggattgagcaatgtggcgactttttgaagaacggtactgtaaaatgtgtcgtcgacaaagtttatgactggaaagaccataaagaagcattttcttatatggccactcaacgtgcccaaggaaagttaatcatgaacgtcgaaaaattctag

SEQ ID NO: 264 - DNA, 1290 bp, Artificial Sequence
  Description of Artificial Sequence: Synthetic polynucleotide
atggctaaagatattttgaagaaccaggaccctaaattgcaagcgatgatcgttgaacactctgcgcctgctcccaaagagatacctatggacgctcctgttttgaaaagagtcgctagacctttaagacatgtaaagttcattccaattaaatctttgatattccatactaaaacagggcccatggatttttcttatgaaaagaagatcaagacgcctattcctaagaacaaaattgtagttagagtaagtaatgtgggtttgaaccctgtagatatgaaaatcaggaacggctacacatcttccatttacggtgagatcggcttggggagagagtacagtggtgttatcactgaggtaggcgagaacttgaactacgcctggcacgtgggtgatgaagtatacggtatatactaccaccctcatttggccgtgggatgtttgcaaagttctatcttagtagatccaaaggtggacccaatccttttgagaccagaatctgttagcgccgaagaagctgcaggctccttattctgcttagccaccggctataatattttgaataaattatccaagaacaagtatttgaagcaagattccaacgttttgattaatggtggaacttcttctgtggggatgtttgtcatacaattattgaagcgtcattacaagttacagaaaaaattagtgattgtaacgtctgcaaatgggccccaagttttacaggagaaatttcctgatttggctgatgaaatgattttcatcgattacttaacgtgtaggggtaaatctagtaaaccattgagaaaaatgctcgaagaaaagaaaatttctcagtatgatccggtcgaggataaggaaactatacttaactataatgaggggaagttcgatgttgtactcgattttgtcggtggttacgatattttgagtcattctagttctttgattcacggcggtggtgcgtacgtaaccactgtaggtgattacgttgccaattataaagaagacattttcgattcttgggataacccaagtgccaatgcaagaaaaatgttcgggtctattatctggagttataactacacacattactattttgatccgaatgcaaagacggcttccgccaataatgattggattgagcaatgtggcgactttttgaagaacggtactgtaaaatgtgtcgtcgacaaagtttatgactggaaagaccataaagaagcattttcttatatggccactcaacgtgcccaaggaaagttaatcatgaacgtcgaaaaattctga

SEQ ID NO: 265 - DNA, 981 bp, Saccharomyces cerevisiae
atgaattcagagtctcgagaagatatggctataaatagtatcaaattgctagcgggaaactcccatcctgatttggctgaacaaatatcgaaaaagttaggtattccactttccaaagttggtgtgtaccagtattctaataaagaaacctctgtcaccataggtgagagccttcgcgacgaagatgtgtatattatccaaactggaataggtgaacaagaaattaatgatttcttgatggaattattaattttaattcatgcttgcaaaattgcatctgcaagaaagatcactactgtaatacccaattttccatatgcaagacaagacaagaaagataaatcccgggcgcccattaccgcaaagttggttgccaatttattgcaaactgctggtgctgatcatgtcatcacaatggatctccatgcctcccaaattcaagggtttttccatatcccggttgacaacctatatgcagaaccaagtgttttaaattatattagaacgaaaacagatttcgacaatgctattttggtgtcgcctgatgcaggtggtgctaagagagtagctgctttggctgacaagttagatttaaattttgctttgattcacaaagagaggcaaaaagctaacgaggtttcaaaaatggtgcttgttggtgatgttaccaataaatcatgtttattagttgatgatatggcggatacttgtggtacgttggtaaaagcttgtgatacgttgatggagcatggtgccaaagaagttatagctattgttacacacggtattttctccggttcagcaagagaaaagctaagaaatagtagattgtctagaattgtttgcacaaataccgttccggtagatttggatttacctattgctgaccagatcgatattagtcccacgttcgctgaagctataagaagactacacaatggtgaatccgtgtcatatttgttcacccatgctccagtatag

SEQ ID NO: 266 - DNA, 981 bp, Artificial Sequence
  Description of Artificial Sequence: Synthetic polynucleotide
atgaattctgagtctagagaagatatggctataaatagtatcaaattgttagcgggaaactcccatcctgatttggctgaacaaatatccaaaaagttaggtattccactttccaaagttggtgtgtaccagtattctaataaagaaacctctgtcaccataggtgagagccttcgcgacgaagatgtgtatattatccaaactggaataggtgaacaagaaattaatgatttcttgatggaattattaattttaattcatgcttgcaaaattgcatctgcaagaaagatcactactgtaatacccaattttccatatgcaagacaagacaagaaagataaatccagagcgcccattaccgcaaagttggttgccaatttattgcaaactgctggtgctgatcatgtcatcacaatggatctccatgcctcccaaattcaagggtttttccatatcccggttgacaacttatatgcagaaccaagtgttttaaattatattagaacgaaaacagatttcgacaatgctattttggtgtctcctgatgcaggtggtgctaagagagtagctgctttggctgacaagttagatttaaattttgctttgattcacaaagagaggcaaaaagctaacgaggtttccaaaatggtgcttgttggtgatgttaccaataaaagttgtttattagttgatgatatggcggatacttgtggtacgttggtaaaagcttgtgatacgttgatggagcatggtgccaaagaagttatagctattgttacacacggtattttctccggttctgcaagagaaaagttgagaaatagtagattgtctagaattgtttgcacaaataccgttccggtagatttggatttacctattgctgaccagatcgatattagtcccacgttcgctgaagctataagaagattgcacaatggtgaatccgtgtcttatttgttcacccatgctccagtatga

SEQ ID NO: 267 - DNA, 2244 bp, Saccharomyces cerevisiae
atgatcagaagatggctaactataagtaagtctgggaagaagaaaaaggctgttaatgataccattacagaagaagtagaaaaggttgactttaagcctgtaaaccacgatataaatgatgaactctgttatagcgaatcatccgataatccctctagctcattgtttgtctctaatttggataccaaggaaacttttttgaatgaagacaataatttgcagatttcttccggactagactattcttctgaaacgtgcaatcaaggcagtaattacagccaggatgggatattttatatttcaaacgcaaaggctataaacgcatacggaggcattatcacgcaagggcccgaggcacccatattagctatgaaggtgtccgactcaatgccctatggagacggctccaacaaagtttttggatacgaaaattttggcaatacatgttactgtaactcagttcttcaatgtctctataatctgtcctcattacgtgaaaatatattgcaatttccaaaaaaatcaagagaatctgatcaaccaagaaagaaagaaatgagaggtaagaaaccaagaatatttaccgaagcaagttttgagaaaagcattgctggtaccaatggacatttgcctaaccctaaacctcaatctgttgatgatggaaagcctacccctgtaaattctgtaaattcaaatacagctgggccttcagagaagaagagtaaattttttaaaagttttagcgcgaaacatgtacaagacaataataaaaaggaaggaagtcctgctatattaaccactggaaaaccctcttctcgtcctcaagacgcacctccattgatagtcgaaacacctaatgagcctggtgctccgagcagattgagtttcgagaacgtcacagatagacctccggatgttccgcgtaaaataattgttggcagagttctcaattatgaaaatccttcaagaggtagcagtaatagtaataacctggacttgaaaggagaaagtaatagcagcttatccactccacttgataaaaaagatactagaagatctagttcctcttctcaaatatccccagaacatagaaagaaatccgcacttattcgtgggccagtgctcaatattgaccatagcttaaacggctcagataaggctactttgtattccagtttgagagatatctttgaatgcataactgagaatacgtatttaactggtgttgtatcgcctagctcttttgttgatgttctcaaaagagaaaatgtattatttaatactactatgcatcaggatgctcacgaatttttcaatttcttattaaacgagttgagtgaatatatagaacgtgagaataaaaaaatagcagccagtgatatcaacagcgatagcgaaccgagtaagagtaaaaatttcatcagtgacttgtttcaaggcactttaacgaatcaaataaaatgtctgacgtgcgataacattacatctagggatgagccatttttggatttccccatagaagttcagggagatgaggaaacagatatacaggaaattttgaaaagttatcaccagcgagaaatgctaaatggctcaaacaagttttattgtgacgaatgttgcggtttacaggaggcagagagattagttggtttgaagcaattgcctgatactttaacattacacttgaaaagattcaagtattctgagaaacaaaactgtaatattaagctttttaataacattcactatcctctgacgctaaatgtttgctcttcaataaattctaaggtttgtcaaaagtatgaattggctgggattgtcgttcatatgggcggtgggccacaacacggccattatgtttccctatgtaaacatgaaaagtttggctggttgttatttgatgacgaaacggtagaggcagttaaagaggaaacagtgttagaattcacaggtgaatctccaaatatggcaacagcatatgttttgttttataaagcgatgtattcaaacgctgttgaaaagaatgatcgtgaaaatatggcaaaagaacaagatgataatatagacaatctaatcaagtacgatgattggctaagaacttgcaatagtggtcaaaagaaaaaggaagagctgcctatagcagacgatttggatactgctatagacgacagctttgtttctaacacacccataaagtcttctaaaaaaaagtcgagaatgtttagttttaggaaaagctga

SEQ ID NO: 268 - DNA, 2244 bp, Artificial Sequence
  Description of Artificial Sequence: Synthetic polynucleotide
atgatcagaagatggttgactataagtaagtctgggaagaagaaaaaggctgttaatgataccattacagaagaagtagaaaaggttgactttaagcctgtaaaccacgatataaatgatgaactctgttatagcgaatcttccgataatccctctagctctttgtttgtctctaatttggataccaaggaaacttttttgaatgaagacaataatttgcagatttcttccggattggactattcttctgaaacgtgcaatcaaggcagtaattacagccaggatgggatattttatatttccaacgcaaaggctataaacgcatacggaggcattatcacgcaagggcccgaggcacccatattagctatgaaggtgtccgactccatgccctatggagacggctccaacaaagtttttggatacgaaaattttggcaatacatgttactgtaactctgttcttcaatgtctctataatttatcctctttacgtgaaaatatattgcaatttccaaaaaaatctagagaatctgatcaaccaagaaagaaagaaatgagaggtaagaaaccaagaatatttaccgaagcaagttttgagaaaagcattgctggtaccaatggacatttgcctaaccctaaacctcaatctgttgatgatggaaagcctacccctgtaaattctgtaaatagtaatacagctgggccttctgagaagaagagtaaattttttaaaagttttagcgcgaaacatgtacaagacaataataaaaaggaaggaagtcctgctatattaaccactggaaaaccctcttctcgtcctcaagacgcacctccattgatagtcgaaacacctaatgagcctggtgctccgagcagattgagtttcgagaacgtcacagatagacctccggatgttccgcgtaaaataattgttggcagagttctcaattatgaaaatccttccagaggtagcagtaatagtaataacttggacttgaaaggagaaagtaatagcagcttatccactccacttgataaaaaagatactagaagatctagttcctcttctcaaatatccccagaacatagaaagaaatccgcacttattcgtgggccagtgctcaatattgaccatagcttaaacggcagtgataaggctactttgtattccagtttgagagatatctttgaatgcataactgagaatacgtatttaactggtgttgtatctcctagctcttttgttgatgttctcaaaagagaaaatgtattatttaatactactatgcatcaggatgctcacgaatttttcaatttcttattaaacgagttgagtgaatatatagaacgtgagaataaaaaaatagcagccagtgatatcaacagcgatagcgaaccgagtaagagtaaaaatttcatcagtgacttgtttcaaggcactttaacgaatcaaataaaatgtttgacgtgcgataacattacatctagggatgagccatttttggatttccccatagaagttcagggagatgaggaaacagatatacaggaaattttgaaaagttatcaccagagggaaatgttgaatggctctaacaagttttattgtgacgaatgttgcggtttacaggaggcagagagattagttggtttgaagcaattgcctgatactttaacattacacttgaaaagattcaagtattctgagaaacaaaactgtaatattaagctttttaataacattcactatcctttgacgttgaatgtttgctcttctataaattctaaggtttgtcaaaagtatgaattggctgggattgtcgttcatatgggcggtgggccacaacacggccattatgtttccttatgtaaacatgaaaagtttggctggttgttatttgatgacgaaacggtagaggcagttaaagaggaaacagtgttagaattcacaggtgaatctccaaatatggcaacagcatatgttttgttttataaagcgatgtattccaacgctgttgaaaagaatgatcgtgaaaatatggcaaaagaacaagatgataatatagacaatttgatcaagtacgatgattggttgagaacttgcaatagtggtcaaaagaaaaaggaagagcttcctatagcagacgatttggatactgctatagacgacagctttgtttctaacacacccataaagtcttctaaaaaaaagtctagaatgtttagttttaggaaaagctga

SEQ ID NO: 269 - DNA, 3447 bp, Saccharomyces cerevisiae
atggtgaaggataatcgagattctgaccaagaccaagattttagttctgctcacatgaaaagacaaccggagcagcaacagttgcaacagcaccagttcccaagtaagaaacaacgaatatctcaccatgatgacagtcatcaaatcaaccatagaccagttacctcatgtacacattgtagacagcacaaaatcaaatgcgatgctagtcaaaatttccctcatccttgctccagatgcgaaaaaattggtctccactgtgaaatcaatcctcaattcaggcctaagaagggctcacagttgcaactactgagacaagatgtggatgaaatcaaatctaaactcgatactcttctggccaatgacagcgttttcgttcatcttttacaacagattcccatgggcaatagccttttgaataagctcaatctgcatccaactccaactccgggtactattatccctaacccagattcttctccttcctcaggttctccaacttcttccgcggctcaacgagattctaaggtttcagttcaaacttatttgtccagggaaccccaactcttacaagcaaatcagggcagcaatacgaataaatttaaagcaaataatgaagcatcttctcacatgacgttgcgcgcatcttctttagcgcaagattcgaaaggcttggttgcaacagagccaaataagctgcccccgctgctaaatgactcagcattgcctaataattcaaaagaatctttacctcctgctttgcaaatggctttttataagaacaactctgcaggtaacactccgaacggccccttctctccaattcaaaaaacatattcccctcatactacgtcgaccaccgttacaacgacaacaaatcaaccaccatttgcagcaacaagccacgtagcaacaaataacaatgcagataggacgaagacgccggtagtagccaccaccacgactatgccattattgccttcgccgcatgcaaatgtagatgagtttgtactgggcgatattagtatttccattgaaaaagcgaatagattacaccatattttcgtgactaggtatctgccgtattttcctattatgtattccaataacgccaccgaattatactcccaatctcagttgcttttctggaccgtgatgttgacggcatgtctgtctgatcctgaaccgacgatgtattgcaagctaagctctttgatcaagcaacttgccatagagacctgctggataagaacacctagatccacacatatttcgcaagctttgttaatattgtgcatttggcctttgcctaaccaaaaagtcctagatgattgttcttaccgttttgtaggattagcaaagtcactgtcttatcaattaggtttgcacagaggtgaattcatttctgaattcacaagaactcaaacatcaatgccaaatgcagaaaagtggagaactaggacttggctgggaatattttttgccgaactttgttgggcgagtatccttggtttgccaccaacttcacagacagactatttattagaaaaagccttatcctgtggtgacgaagaatcagaagaagataacaatgacagtattgacaataacaacaatgataaaaggaacaagaaagacgagccgcacgttgaaagtaaatacaaactaccgggcagttttagaagattgctcagcctggcgaatttccaagcaaaattgtctcatatcattggttcttccacttccagtcctgatggtttattggaaccaaagtatcgtgctgagacactgtccatcttgggaaaagagttagatttattagcaaaaactttaaatttccagagtgacgatactgtcaacatttattttctttatgttaaattaactgtctgttgttttgcattcctacccgaaacacctcctaccgatcaaattccatatgtcacagaggcctatctaacagctactaaaattgtcactctattgaataatcttttagaaacacaccaattaattgaactgcctatttatattagacaagctgctacattttctgcactgattctctttaaattgcagttgactcctttacttcctgacaaatattttgattcagcaaggcaatccgtggtcactatccatagactttatagaaatcagttaactgcgtgggccactagtgttgagaatgatatttcgagaactgcaagtatgttagaaaaactgaacttcgtactgatcatgcatccagaagtttttgtggaagaagacggtattatttctaggatgagatcacatttaacagggtctctattctatgatttggtttggtgtgttcacgaggcgagaagaagggaaatggatcccgaatataacaagcaagccttagagaaagccgctaagaaaagaaaattttcctcaaatggtatctacaatggcacttcgtctacgggtggcataacggacagaaaactatatccattgccactatataaccatatctccagagatgactttgaaactgtaacaaaaacaacaccaagtggaaccactgttaccactttagttcctactaagaatgccttaaagcaggcagaaaagctagccaagacaaataacggagattctgacggttctataatggagattaacgggatacctctttccatgctcggggaaacaggcagcgtaaaatttcaaagtttattcgctaatacctcgaatagtaacgattataataataataggacgttattggatgcgtctaatgacatatcaattccctctaattcaatttatccagtggcttctgtccccgcttcgaataacaatccacaaagtactaaggtagactattatagtaacggacctagtgtaattcctgatctctccatgaaaagatcagtaagcactcccgttaatcattttcctgcgtccgttccagggttaaggaaccaccccgttggcaacttatctaataatgttacattgggaatagaccaccctattccaagggagcacagtaatttacaaaatgtcaccatgaattataataatcaattcagcaacgccaacgcgattggaagatcacaaagtagtatgtcccattcacgtacaccgattgcttcgaagtcaaataatatgacagatttgcattccgtcgtttccgaccccggctcctctaaaagcacggcatatccacctctgagcttgttttccaaaagtaatgatatcaatagcaacaaaacgaaccaacgattttctacgggcactaacactgtaacttcttctaacttccaaaccatcgataatgaaaacaacgtgaagactcctggaaacaaactaacggatttttttcagcaacaaagtgcaggctggattgaaggcaactccagtaatgatgacttttttggttggttcgatatgaacatggaacaaggtttttaa

SEQ ID NO: 270 - DNA, 3447 bp, Artificial Sequence
  Description of Artificial Sequence: Synthetic polynucleotide
atggtgaaggataatagagattctgaccaagaccaagattttagttctgctcacatgaaaagacaaccggagcagcaacagttgcaacagcaccagttcccaagtaagaaacaaagaatatctcaccatgatgacagtcatcaaatcaaccatagaccagttacctcttgtacacattgtagacagcacaaaatcaaatgcgatgctagtcaaaatttccctcatccttgctccagatgcgaaaaaattggtctccactgtgaaatcaatcctcaattcaggcctaagaagggctctcagttgcaattattaagacaagatgtggatgaaatcaaatctaaactcgatactcttttagccaatgacagcgttttcgttcatcttttacaacagattcccatgggcaatagccttttgaataagctcaatttacatccaactccaactccgggtactattatccctaacccagattcttctccttccagtggttctccaacttcttccgcggctcaaagagattctaaggtttctgttcaaacttatttgtccagggaaccccaactcttacaagcaaatcagggcagcaatacgaataaatttaaagcaaataatgaagcatcttctcacatgacgttgcgcgcatcttctttagcgcaagattctaaaggcttggttgcaacagagccaaataagttgcccccgttgttgaatgactctgcattgcctaataattctaaagaatctttacctcctgctttgcaaatggctttttataagaacaactctgcaggtaacactccgaacggccccttctctccaattcaaaaaacatattcccctcatactacgtccaccaccgttacaacgacaacaaatcaaccaccatttgcagcaacaagccacgtagcaacaaataacaatgcagataggacgaagacgccggtagtagccaccaccacgactatgccattattgccttctccgcatgcaaatgtagatgagtttgtattaggcgatattagtatttccattgaaaaagcgaatagattacaccatattttcgtgactaggtatttaccgtattttcctattatgtattccaataacgccaccgaattatactcccaatctcagttgcttttctggaccgtgatgttgacggcatgtttgtctgatcctgaaccgacgatgtattgcaagttgagctctttgatcaagcaacttgccatagagacctgctggataagaacacctagatccacacatatttctcaagctttgttaatattgtgcatttggcctttgcctaaccaaaaagtcttggatgattgttcttaccgttttgtaggattagcaaagtctttatcttatcaattaggtttgcacagaggtgaattcatttctgaattcacaagaactcaaacatctatgccaaatgcagaaaagtggagaactaggacttggttaggaatattttttgccgaactttgttgggcgagtatccttggtttgccaccaacttctcagacagactatttattagaaaaagccttatcctgtggtgacgaagaaagtgaagaagataacaatgacagtattgacaataacaacaatgataaaaggaacaagaaagacgagccgcacgttgaaagtaaatacaaattaccgggcagttttagaagattgctcagcttggcgaatttccaagcaaaattgtctcatatcattggttcttccacttccagtcctgatggtttattggaaccaaagtatcgtgctgagacattatccatcttgggaaaagagttagatttattagcaaaaactttaaatttccagagtgacgatactgtcaacatttattttctttatgttaaattaactgtctgttgttttgcattcttgcccgaaacacctcctaccgatcaaattccatatgtcacagaggcctatttgacagctactaaaattgtcactttattgaataatcttttagaaacacaccaattaattgaattacctatttatattagacaagctgctacattttctgcattgattctctttaaattgcagttgactcctttacttcctgacaaatattttgattctgcaaggcaatccgtggtcactatccatagactttatagaaatcagttaactgcgtgggccactagtgttgagaatgatatttctagaactgcaagtatgttagaaaaattgaacttcgtattgatcatgcatccagaagtttttgtggaagaagacggtattatttctaggatgagaagccatttaacagggtctttattctatgatttggtttggtgtgttcacgaggcgagaagaagggaaatggatcccgaatataacaagcaagccttagagaaagccgctaagaaaagaaaattttcctctaatggtatctacaatggcacttcttctacgggtggcataacggacagaaaactttatccattgccattgtataaccatatctccagagatgactttgaaactgtaacaaaaacaacaccaagtggaaccactgttaccactttagttcctactaagaatgccttaaagcaggcagaaaagttggccaagacaaataacggagattctgacggttctataatggagattaacgggatacctctttccatgctcggggaaacaggcagcgtaaaatttcaaagtttattcgctaatacctctaatagtaacgattataataataataggacgttattggatgcgtctaatgacatatctattccctctaattctatttatccagtggcttctgtccccgcttctaataacaatccacaaagtactaaggtagactattatagtaacggacctagtgtaattcctgatctctccatgaaaagatctgtaagcactcccgttaatcattttcctgcgtccgttccagggttaaggaaccaccccgttggcaacttatctaataatgttacattgggaatagaccaccctattccaagggagcacagtaatttacaaaatgtcaccatgaattataataatcaattcagcaacgccaacgcgattggaagatctcaaagtagtatgtcccattctcgtacaccgattgcttccaagagcaataatatgacagatttgcattccgtcgtttccgaccccggctcctctaaaagcacggcatatccacctttaagcttgttttccaaaagtaatgatatcaatagcaacaaaacgaaccaaagattttctacgggcactaacactgtaacttcttctaacttccaaaccatcgataatgaaaacaacgtgaagactcctggaaacaaattaacggatttttttcagcaacaaagtgcaggctggattgaaggcaactccagtaatgatgacttttttggttggttcgatatgaacatggaacaaggtttttga

SEQ ID NO: 271 - DNA, 786 bp, Saccharomyces cerevisiae
atgtttagtagaatttgtagcgctcaattaaagaggacggcatggacccttcctaagcaggctcacttgcaatcacagacgattaaaacatttgccacagcacctattctgtgcaaacaattcaaacaaagtgatcaaccaagactaagaataaactctgatgctcctaactttgatgctgacacaacggttggtaaaatcaatttttacgactacttgggcgactcttggggggtcttgttttctcacccagcagatttcacccctgtctgcaccaccgaagtcagcgcattcgccaaattgaagccggaattcgacaagagaaatgttaaattgatcgggctttcagtggaagatgttgagtcccacgaaaaatggattcaagacatcaaggaaatagcaaaggttaaaaatgttggtttcccaataattggtgacacttttagaaacgtggcattcctatatgatatggtagatgccgaaggattcaaaaatatcaatgatgggtcactgaagaccgtgaggtctgttttcgtcatcgatcccaagaagaagattagactgatttttacctacccttccaccgtcggaagaaacacttctgaagtgttaagggtaatcgacgccttgcaattgactgacaaggagggcgtagtaactccaattaattggcagccagctgacgatgtcattattcctccctctgtctccaatgatgaggcgaaggctaaatttggtcaatttaatgaaattaaaccctatttaagattcaccaagtcgaaataa

SEQ ID NO: 272 - DNA, 786 bp, Artificial Sequence
  Description of Artificial Sequence: Synthetic polynucleotide
atgtttagtagaatttgtagcgctcaattaaagaggacggcatggacccttcctaagcaggctcacttgcaatctcagacgattaaaacatttgccacagcacctattttgtgcaaacaattcaaacaaagtgatcaaccaagattgagaataaactctgatgctcctaactttgatgctgacacaacggttggtaaaatcaatttttacgactacttgggcgactcttggggggtcttgttttctcacccagcagatttcacccctgtctgcaccaccgaagtcagcgcattcgccaaattgaagccggaattcgacaagagaaatgttaaattgatcgggctttctgtggaagatgttgagtcccacgaaaaatggattcaagacatcaaggaaatagcaaaggttaaaaatgttggtttcccaataattggtgacacttttagaaacgtggcattcctctatgatatggtagatgccgaaggattcaaaaatatcaatgatgggtctttgaagaccgtgaggtctgttttcgtcatcgatcccaagaagaagattagattgatttttacctacccttccaccgtcggaagaaacacttctgaagtgttaagggtaatcgacgccttgcaattgactgacaaggagggcgtagtaactccaattaattggcagccagctgacgatgtcattattcctccctctgtctccaatgatgaggcgaaggctaaatttggtcaatttaatgaaattaaaccctatttaagattcaccaagagtaaatga

SEQ ID NO: 273 - DNA, 3336 bp, Saccharomyces cerevisiae
atggctcgttcttccttgcccaaccgccgcaccgcccagttcgaagcgaacaagaggaggaccattgcacatgctccatctccaagtctttcaaatgggatgcacactctaacgccgcccacctgtaacaatggtgctgccacttcagactccaatatacatgtatatgtaaggtgcagatcgcgtaataagcgagaaatagaggaaaaaagtagtgtagttatatctacactaggcccacaagggaaagaaatcattctgtccaacggttctcaccaatcgtattcgtcctcgaagaaaacttaccaatttgatcaggtgttcggcgcagaatctgaccaggaaacagtgtttaatgccactgcaaaaaactacattaaggaaatgttgcacgggtacaattgtacaatatttgcatacggtcaaacgggaacaggtaaaacctacactatgtctggcgatataaatattctcggtgatgtgcaatctaccgataatctattattaggagagcatgcaggtatcataccacgggttctggtcgatttgtttaaagaattgagctccttaaataaagagtactccgtaaaaatatcctttttagagttgtacaatgaaaatttgaaagatctgctctctgatagtgaggacgatgatcctgcagtcaacgatcccaagaggcagattcgtatttttgacaataacaacaataattcatccatcatggtcaaggggatgcaggaaatctttattaactctgcacacgaaggcttgaatttgctaatgcagggttcgttaaaaaggaaagtggccgctactaaatgcaacgatctttcatcaaggtctcacaccgtctttacaatcacaacaaacatagttgagcaagatagcaaagaccatggacaaaacaaaaattttgttaaaattggcaaattgaatttggtggatttggcaggcagtgaaaacatcaacagatcgggtgcggagaataaaagggctcaagaagctggcctaataaacaaatcgctgctaacactaggccgtgttatcaacgcactcgttgatcattctaaccatataccttacagagaatctaagctaacaagattgctacaagactctttaggtggtatgacgaaaacatgcattatcgcaactatatcacctgcgaaaatatccatggaagagactgcaagtacgctagaatatgcaacgagagccaaatcaattaagaatactccacaagtaaatcagtctttatcgaaggatacatgtctcaaagactacattcaagagattgaaaaattaagaaatgatttgaaaaattcaagaaacaaacaaggtatatttataactcaagatcagttggacctttacgagagcaattctatcttgattgatgagcaaaatctaaaaatacataacctgcgagaacaaattaaaaaattcaaagaaaactacctgaaccaattagatatcaataatcttttacagtctgaaaaggaaaaactaattgccataatacagaattttaatgtcgatttttctaacttttactcggaaatccaaaaaattcaccatactaatctcgaactaatgaatgaagtcatacaacagagagatttttcactagaaaattctcaaaaacagtataatacgaaccagaacatgcaattaaaaatctctcaacaagttttacagactttgaacactttacagggctctttaaataattataactctaaatgttccgaagttatcaaaggcgtcaccgaagaactaaccaggaacgtaaatacccataaggcgaaacacgattctactctcaaatcgttattaaacattactactaacttattgatgaatcagatgaacgaactggtgcgtagtatttcgacttcattggaaatatttcagagtgattctacttctcactatcgtaaagatttgaatgaaatctaccaatcacatcaacaatttctaaaaaatttacaaaacgatattaaaagctgtcttgattcgataggcagttcaattctaacttccataaacgaaatatcgcaaaattgcaccactaacttgaatagtatgaatgttttaatagaaaaccagcagtcaggatcatcgaaattaattaaagagcaagatttagaaataaaaaaactgaaaaacgatctgatcaatgagcgcaggatttctaaccaattcaaccaacagttggctgaaatgaagcgatattttcaggatcacgtttccaggacgcgtagtgaattccacgacgaacttaacaaatgtatcgataacctaaaagataaacaatctaagttggatcaagatatctggcagaagacggcctctattttcaacgaaacagatatcgtagttaataaaattcattccgactcaatagcatccctcgctcataatgctgaaaacactttgaaaacggtttctcagaacaatgaaagctttactaacgatttaatcagtctatcacgcggaatgaacatggacatatcctccaaactgagaagtttgcccatcaatgaatttttaaacaagatatcacaaaccatttgtgaaacctgtggcgatgataacacaatcgcatcaaatccagtattgacctctattaaaaaatttcaaaatataatttgttcagacattgccctaacaaatgagaagatcatgtcattaatagatgaaatacaatcacaaattgaaaccatatctaatgaaaacaatatcaatttgattgcaataaatgaaaattttaattctttgtgcaattttatattaactgattacgatgagaatattatgcaaatctcaaaaacacaagatgaggtgctttctgaacattgcgagaagctacaatcactgaaaatactgggtatggacattttcactgctcacagcatagaaaaaccccttcatgagcatacaagacctgaagcgtcagtaatcaaggctttacccttattggattatccaaaacaatttcagatttatagggatgctgaaaataagagcaaagacgacacatctaattctcgtacttgtataccaaacttgtcaactaatgaaaattttcctctttcacaattcagtccaaaaaccccagtgccagtgcctgatcaacctctaccaaaagttcttataccgaaaagcataaactcggccaagtccaatagatcaaagaccttaccaaatacagagggtactggacgagaatcgcagaacaatttgaagagaagatttaccaccgagccaatattgaagggagaagaaactgaaaataatgacatactgcaaaataaaaaacttcatcaataa

SEQ ID NO: 274 - DNA, 3336 bp, Artificial Sequence
  Description of Artificial Sequence: Synthetic polynucleotide
atggctcgttcttccttgcccaaccgccgcaccgcccagttcgaagcgaacaagaggaggaccattgcacatgctccatctccaagtctttctaatgggatgcacactttaacgccgcccacctgtaacaatggtgctgccacttctgactccaatatacatgtatatgtaaggtgcagatctcgtaataagagagaaatagaggaaaaaagtagtgtagttatatctacattaggcccacaagggaaagaaatcattttatccaacggttctcaccaaagttattcttcctccaagaaaacttaccaatttgatcaggtgttcggcgcagaatctgaccaggaaacagtgtttaatgccactgcaaaaaactacattaaggaaatgttgcacgggtacaattgtacaatatttgcatacggtcaaacgggaacaggtaaaacctacactatgtctggcgatataaatattctcggtgatgtgcaatctaccgataatttattattaggagagcatgcaggtatcataccaagagttttggtcgatttgtttaaagaattgagctccttaaataaagagtactccgtaaaaatatcctttttagagttgtacaatgaaaatttgaaagatttactctctgatagtgaggacgatgatcctgcagtcaacgatcccaagaggcagattcgtatttttgacaataacaacaataattcttccatcatggtcaaggggatgcaggaaatctttattaactctgcacacgaaggcttgaatttgttgatgcagggttctttaaaaaggaaagtggccgctactaaatgcaacgatctttcttccaggtctcacaccgtctttacaatcacaacaaacatagttgagcaagatagcaaagaccatggacaaaacaaaaattttgttaaaattggcaaattgaatttggtggatttggcaggcagtgaaaacatcaacagatctggtgcggagaataaaagggctcaagaagctggcttgataaacaaatctttattaacattaggccgtgttatcaacgcactcgttgatcattctaaccatataccttacagagaatctaagttaacaagattgttgcaagactctttaggtggtatgacgaaaacatgcattatcgcaactatatctcctgcgaaaatatccatggaagagactgcaagtacgttagaatatgcaacgagagccaaatccattaagaatactccacaagtaaatcagtctttatccaaggatacatgtctcaaagactacattcaagagattgaaaaattaagaaatgatttgaaaaattctagaaacaaacaaggtatatttataactcaagatcagttggacctttacgagagcaattctatcttgattgatgagcaaaatttgaaaatacataacttaagagaacaaattaaaaaattcaaagaaaactacttgaaccaattagatatcaataatcttttacagtctgaaaaggaaaaattgattgccataatacagaattttaatgtcgatttttctaacttttactctgaaatccaaaaaattcaccatactaatctcgaattgatgaatgaagtcatacaacagagagatttttctttggaaaattctcaaaaacagtataatacgaaccagaacatgcaattaaaaatctctcaacaagttttacagactttgaacactttacagggctctttaaataattataactctaaatgttccgaagttatcaaaggcgtcaccgaagaattgaccaggaacgtaaatacccataaggcgaaacacgattctactctcaaatctttattaaacattactactaacttattgatgaatcagatgaacgaattagtgcgtagtatttctacttctttggaaatatttcagagtgattctacttctcactatcgtaaagatttgaatgaaatctaccaatctcatcaacaatttttgaaaaatttacaaaacgatattaaaagctgtcttgattctataggcagttctattttgacttccataaacgaaatatctcaaaattgcaccactaacttgaatagtatgaatgttttaatagaaaaccagcagtccggatcttctaaattaattaaagagcaagatttagaaataaaaaaattgaaaaacgatttgatcaatgagcgcaggatttctaaccaattcaaccaacagttggctgaaatgaagagatattttcaggatcacgtttccaggacgcgtagtgaattccacgacgaacttaacaaatgtatcgataacttgaaagataaacaatctaagttggatcaagatatctggcagaagacggcctctattttcaacgaaacagatatcgtagttaataaaattcattccgacagtatagcatccctcgctcataatgctgaaaacactttgaaaacggtttctcagaacaatgaaagctttactaacgatttaatcagtttatctcgcggaatgaacatggacatatcctccaaattgagaagtttgcccatcaatgaatttttaaacaagatatctcaaaccatttgtgaaacctgtggcgatgataacacaatcgcatctaatccagtattgacctctattaaaaaatttcaaaatataatttgttctgacattgccttaacaaatgagaagatcatgtctttaatagatgaaatacaatctcaaattgaaaccatatctaatgaaaacaatatcaatttgattgcaataaatgaaaattttaattctttgtgcaattttatattaactgattacgatgagaatattatgcaaatctccaaaacacaagatgaggtgctttctgaacattgcgagaagttacaaagtttgaaaatattaggtatggacattttcactgctcacagcatagaaaaaccccttcatgagcatacaagacctgaagcgagtgtaatcaaggctttacccttattggattatccaaaacaatttcagatttatagggatgctgaaaataagagcaaagacgacacatctaattctcgtacttgtataccaaacttgtctactaatgaaaattttcctctttctcaattcagtccaaaaaccccagtgccagtgcctgatcaacctttaccaaaagttcttataccgaaaagcataaactctgccaagtccaatagatccaagaccttaccaaatacagagggtactggaagagaatctcagaacaatttgaagagaagatttaccaccgagccaatattgaagggagaagaaactgaaaataatgacatattgcaaaataaaaaacttcatcaatga

SEQ ID NO: 275 - DNA, 2091 bp, Saccharomyces cerevisiae
atggcaagttcaccgcaggtacatccatataagaagcatttaatgcaatcacagcatataaattttgataacaggggcctacagtttcaaaacagttcgttgaaggtaggtcaagatttttcagataataaagagaatagggaaaacagggacaatgaagacttcagtaccgcagaccttcctaagcggtcggcaaaccaaccgcttatcaatgagcatcttagagctgcgtcagtacctctactatcaaacgatataggcaatagtcaagaggaagatttcgttccagtcccacccccacagcttcatcttaataattcaaataatacttccttaagttctttgggaagtactcctacaaattctccgtcaccgggagcattaagacagacaaattcgagtacatctcttacgaaggagcaaataaagaaaagaactcgttctgtagatttgtctcacatgtacctgttgaatggtagcagtgatacccaattaacggctactaatgaatctgtagcagatttgtcacatcagatgatcagtcgatatttgggtggtaaaaataatacttccttagttccaaggctaaaaacaatagaaatgtatagacaaaacgttaaaaaatctaaagatcctgaagtgttattccagtatgcgcaatatatgttacaaaccgcactgactattgaatcttccaatgctcttgttcaagatagtgacaaggaaggaaatgtcagccaatctgacttaaaacttcagtttttgaaagaagcgcaaagttatttgaagaaactgagcataaagggttattcagatgcccaatacttattagcggacggctactcatccggagcatttgggaagattgaaaataaagaagcatttgtcttatttcaagcagctgcaaagcatggtcatatagaaagtgcttacagagcatcgcattgcttagaagaaggactaggaacaacaagagattctcgtaagtcagtcaattttttaaagtttgcggctagcaggaatcatccctcagcaatgtataaattgggactttattcattctacggcagaatgggtcttccaaccgacgttaatactaaattaaatggggtaaaatggttatcaagggctgcagcaagagctaatgagttgacggccgcagcaccatacgaattggctaagatttatcatgaagggttcttagatgttgtcattccggatgaaaagtatgcaatggaactatatattcaagcagcaagtttagggcatgttccttcagcaactttgttggcacagatttatgaaacaggtaatgatacagtagggcaggatacatcactttctgtacactattatacgcaggcagcgttaaaaggcgattctgtggcaatgttaggtttatgtgcatggtacttactgggagcagaacctgcttttgaaaaagatgaaaatgaggcttttcaatgggccttgcgtgcagctaatgctggtttgccaaaggcccaattcactctgggctacttctatgagcatggcaagggctgtgatcgtaacatggaatacgcatggaaatggtacgagaaagctgcagggaacgaggacaagagggcgattaataagctacgctcaagggacggtggactagccagcattggtaaaaaacagcataaaaaaaataaaagtatcagtactttgaatttattctctactgtggacagtcaaacaagtaacgtagggtcaaattcaagagtttcttcaaaatctgaaacattctttactggaaatccaaaacgtgatcgtgagccacaaggtttgcaaattaacatgaattcaaacacgaatagaaatggtattaaaacgggttctgatacaagcatcaggaaaagttcttcctcagcaaagggaatgtcaagggaagttgctgagcagtcgatggcagcaaagcaagaagttagtttatcaaatatgggcagttcaaacatgattcgtaaagattttcctgcagtaaaaactgagtcaaaaaaacctacaagcttgaagaacaagaaggataaacaaggtaaaaaaaaaaaagactgtgtaattatgtaa

SEQ ID NO: 276 - DNA, 2091 bp, Artificial Sequence
  Description of Artificial Sequence: Synthetic polynucleotide
atggcaagttctccgcaggtacatccatataagaagcatttaatgcaatctcagcatataaattttgataacaggggcttgcagtttcaaaacagttctttgaaggtaggtcaagatttttctgataataaagagaatagggaaaacagggacaatgaagacttcagtaccgcagaccttcctaagagaagtgcaaaccaaccgcttatcaatgagcatcttagagctgcgagtgtacctttattatctaacgatataggcaatagtcaagaggaagatttcgttccagtcccacccccacagcttcatcttaataatagtaataatacttccttaagttctttgggaagtactcctacaaattctccgtctccgggagcattaagacagacaaatagtagtacatctcttacgaaggagcaaataaagaaaagaactcgttctgtagatttgtctcacatgtacttgttgaatggtagcagtgatacccaattaacggctactaatgaatctgtagcagatttgtctcatcagatgatcagtagatatttgggtggtaaaaataatacttccttagttccaaggttgaaaacaatagaaatgtatagacaaaacgttaaaaaatctaaagatcctgaagtgttattccagtatgcgcaatatatgttacaaaccgcattgactattgaatcttccaatgctcttgttcaagatagtgacaaggaaggaaatgtcagccaatctgacttaaaacttcagtttttgaaagaagcgcaaagttatttgaagaaattaagcataaagggttattctgatgcccaatacttattagcggacggctactcttccggagcatttgggaagattgaaaataaagaagcatttgtcttatttcaagcagctgcaaagcatggtcatatagaaagtgcttacagagcatctcattgcttagaagaaggacttggaacaacaagagattctcgtaagtctgtcaattttttaaagtttgcggctagcaggaatcatccctctgcaatgtataaattgggactttattctttctacggcagaatgggtcttccaaccgacgttaatactaaattaaatggggtaaaatggttatctagggctgcagcaagagctaatgagttgacggccgcagcaccatacgaattggctaagatttatcatgaagggttcttagatgttgtcattccggatgaaaagtatgcaatggaattgtatattcaagcagcaagtttagggcatgttccttctgcaactttgttggcacagatttatgaaacaggtaatgatacagtagggcaggatacatctctttctgtacactattatacgcaggcagcgttaaaaggcgattctgtggcaatgttaggtttatgtgcatggtacttattaggagcagaacctgcttttgaaaaagatgaaaatgaggcttttcaatgggccttgcgtgcagctaatgctggtttgccaaaggcccaattcactttgggctacttctatgagcatggcaagggctgtgatcgtaacatggaatacgcatggaaatggtacgagaaagctgcagggaacgaggacaagagggcgattaataagttgcgcagcagggacggtggattggccagcattggtaaaaaacagcataaaaaaaataaaagtatcagtactttgaatttattctctactgtggacagtcaaacaagtaacgtagggtctaattctagagtttcttctaaatctgaaacattctttactggaaatccaaaacgtgatcgtgagccacaaggtttgcaaattaacatgaatagcaacacgaatagaaatggtattaaaacgggttctgatacaagcatcaggaaaagttcttcctctgcaaagggaatgtctagggaagttgctgagcagtccatggcagcaaagcaagaagttagtttatccaatatgggcagtagtaacatgattcgtaaagattttcctgcagtaaaaactgagagtaaaaaacctacaagcttgaagaacaagaaggataaacaaggtaaaaaaaaaaaagactgtgtaattatgtga

SEQ ID NO: 277 - DNA, 2064 bp, Saccharomyces cerevisiae
atgtgcgccagtttaaacgaggtaaaaaagaatgacacctatggggtctcacaaaagggctacaatgacaatttcagtgaaagtgagggcgtccttcatggtagtaagtcgatgcccactagcatgaaaaatatgctacagtctcccacgatggtcaacatgtgtgatattttacaaaacaaggaagctgctaatgacgaaaaacctgtgatacctactacggataccgccactgcggggactggtactgaagatattagctccactcaatccgaggaaactgatcagaatagtcatcttattgcctcagagatcttggaaggcactttcaaagatgtatcttacaaggaatatgcaaatttcttgggaaacgataacaataatcaagtcttgactgagtttgtaaagttattgagtcctttgccgtcgtcactattagaaacgcttttcaatttatcgaaaagtatatatttcattgcagaagcgcaaaatatcgaccggatactagagtgcttgagcatagaatggatagcttgccacccgaacacacattggaagtcaggctataagtcatgtcatatagtcttattttccctgttgatccttaattcggatttgcacaacaactttcaagttgaccataaaaagattaagttttccatggttgcatttatcaacaatacactgagggcactaagagaggaaaatgaatacgaagaattgaaaatatactcccgcgaacatttgatcatcgaagaactttccgaatactataaaacgttaaatgaaacgcctttaccgttatgcacagaatctagaacatcaataaatatatcagataaccaatcttccttgaaaaggttctctactctaggatcacgggaatttagtacatcaaatttacgtagtgttaactctaattctactacactatattcaagagatggtcaagtatctgtacgagaaatgagcgcaaaatcaaataaaaactttcacaataatcaccccatggatgcactctaccttaaagagtcttttgatgacggtttaattaccgaaaacggctccagttggttcatggacgatttaattcttataagcaagaaatctttaccacgtaaatattctaaaagagacaaagatcaagtggcggcaccaaaaatgacctctaagagaaacaaatcgttcttcggatggctaaaaccatctaaaacgactacacttattgagcacacatctagaaggacttctttatcgtatttgaataaggattctgaatgggagagggtgaaaatacaggtcaaggagggcagaatttttattttcaaaattaaaccagatgttaaggatatcatccaatcaagtgaaacagacagtgctaccatcgactatttcaaagatatcagtagctcttattttgcttactcactgcttgaagctgaagcacatgtcgtgcaagataatataattataggtagtggagcaatgaaatcaaatgtgtgtaacaaaaacaccaagaggaaaagtggcaactttaccgttagttttccagagaatatcaacggaccaaagcttgttctggagttccagacgagaagtgttgaagaagcccacaagtttatggactgtatcaacttctgggcaggtaggatttctccagttcctttaacacaattcgaagccgtatctaacgcagaatatggatggagtgacaagatcttgacagagcacgcttccctcaatcttaaaaatattgttgtaagtgaatggaagccactattggggctagagctactatacgaagatgcgaaagatgtagagatggtcgaactaaaagaaaggctaaaggaattgatgaacttcaccagacagcttggtatatggatagataaacataacgaaataaaggataagctggtcgaaatttggagctttgacgataactattttgaagcagtcatgaataattggaattcgagatatttgtatatgaataatcaatataagaaacgactgagctacttgaaagctttgcaaaaagccatgggttctgttcagttctaa

SEQ ID NO: 278 - DNA, 2064 bp, Artificial Sequence
  Description of Artificial Sequence: Synthetic polynucleotide
atgtgcgccagtttaaacgaggtaaaaaagaatgacacctatggggtctctcaaaagggctacaatgacaatttcagtgaaagtgagggcgtccttcatggtagtaagtctatgcccactagcatgaaaaatatgttacagtctcccacgatggtcaacatgtgtgatattttacaaaacaaggaagctgctaatgacgaaaaacctgtgatacctactacggataccgccactgcggggactggtactgaagatattagctccactcaatccgaggaaactgatcagaatagtcatcttattgcctctgagatcttggaaggcactttcaaagatgtatcttacaaggaatatgcaaatttcttgggaaacgataacaataatcaagtcttgactgagtttgtaaagttattgagtcctttgccgtcttctttattagaaacgcttttcaatttatccaaaagtatatatttcattgcagaagcgcaaaatatcgacaggatattggagtgcttgagcatagaatggatagcttgccacccgaacacacattggaagtctggctataagagttgtcatatagtcttattttccttattgatccttaattctgatttgcacaacaactttcaagttgaccataaaaagattaagttttccatggttgcatttatcaacaatacattaagggcattgagagaggaaaatgaatacgaagaattgaaaatatactcccgcgaacatttgatcatcgaagaactttccgaatactataaaacgttaaatgaaacgcctttaccgttatgcacagaatctagaacatctataaatatatctgataaccaatcttccttgaaaaggttctctactttgggaagtagagaatttagtacaagtaatttacgtagtgttaactctaattctactacattatattctagagatggtcaagtatctgtaagagaaatgagcgcaaaatctaataaaaactttcacaataatcaccccatggatgcactctaccttaaagagtcttttgatgacggtttaattaccgaaaacggctccagttggttcatggacgatttaattcttataagcaagaaatctttaccacgtaaatattctaaaagagacaaagatcaagtggcggcaccaaaaatgacctctaagagaaacaaatctttcttcggatggttgaaaccatctaaaacgactacacttattgagcacacatctagaaggacttctttatcttatttgaataaggattctgaatgggagagggtgaaaatacaggtcaaggagggcagaatttttattttcaaaattaaaccagatgttaaggatatcatccaaagtagtgaaacagacagtgctaccatcgactatttcaaagatatcagtagctcttattttgcttactctttacttgaagctgaagcacatgtcgtgcaagataatataattataggtagtggagcaatgaaatctaatgtgtgtaacaaaaacaccaagaggaaaagtggcaactttaccgttagttttccagagaatatcaacggaccaaagcttgttttggagttccagacgagaagtgttgaagaagcccacaagtttatggactgtatcaacttctgggcaggtaggatttctccagttcctttaacacaattcgaagccgtatctaacgcagaatatggatggagtgacaagatcttgacagagcacgcttccctcaatcttaaaaatattgttgtaagtgaatggaagccattgttggggttagagttattgtacgaagatgcgaaagatgtagagatggtcgaattgaaagaaaggttaaaggaattgatgaacttcaccagacagcttggtatatggatagataaacataacgaaataaaggataagttggtcgaaatttggagctttgacgataactattttgaagcagtcatgaataattggaattctagatatttgtatatgaataatcaatataagaaaagattgagctacttgaaagctttgcaaaaagccatgggttctgttcagttctga

SEQ ID NO: 279 - DNA, 330 bp, Saccharomyces cerevisiae
atgcatccacagttagaagctgaacgttttcattcctgtttggacttcatcaatgcactcgataaatgccatcaaaaggaatattacaagagaatatttggcctttgtaacaacgaaaaggatgctttgaacaagtgtctcaaggaggcaagtttgaataacaagaaacgtgctgtcattgaaagtagaataaagagagctgatgtagaaaagagatggaagaaaattgaggaagaagaatatggcgaggacgctatattaaagactatcttagatagacagtacgccaagaaaaagcaggaaagtgacaatgatgcgaactcgaaataa

SEQ ID NO: 280 - DNA, 330 bp, Artificial Sequence
  Description of Artificial Sequence: Synthetic polynucleotide
atgcatccacagttagaagctgaacgttttcattcctgtttggacttcatcaatgcactcgataaatgccatcaaaaggaatattacaagagaatatttggcctttgtaacaacgaaaaggatgctttgaacaagtgtctcaaggaggcaagtttgaataacaagaaacgtgctgtcattgaaagtagaataaagagagctgatgtagaaaagagatggaagaaaattgaggaagaagaatatggcgaggacgctatattaaagactatcttagatagacagtacgccaagaaaaagcaggaaagtgacaatgatgcgaactccaaatga

SEQ ID NO: 281 - DNA, 582 bp, Saccharomyces cerevisiae
atgttattggacgcgcagcgattttttaataggtctttctctattaatgtaatatgcgaattgaaacataatgtaaacacaagaagaaaattcgaaataaaggactggccaacaataatgttagtgagcagaaacgacaagcccaaaatcagtagtgaggaagtcacacattttatagacgactataaaaagaggaggaaaactcagatgacacgattcttcggaatcactatttttacacttataacatgtagaattgccatgaagaaaatgataactgcaaaagtgccattgaacacttttcaagcaaactacgccagccggacgcagacaataacacacacacaaaagagtcttgcaggttctcttttagcggcaacgggcatgacactaggtatatttggtatgggcatcacagggacatgttggagctgggatgtttcatcatttcaggaactaaagcaacgtctggaaaggcgtgccaacaacgaatttgtagtgacaaacatgcctctggataaaagaagccagcaagtagtggacagcttagttaagacacacaattcatctctttgtaaatag

SEQ ID NO: 282 - DNA, 582 bp, Artificial Sequence
  Description of Artificial Sequence: Synthetic polynucleotide
atgttattggacgcgcagagattttttaataggtctttctctattaatgtaatatgcgaattgaaacataatgtaaacacaagaagaaaattcgaaataaaggactggccaacaataatgttagtgagcagaaacgacaagcccaaaatcagtagtgaggaagtcacacattttatagacgactataaaaagaggaggaaaactcagatgacaagattcttcggaatcactatttttacacttataacatgtagaattgccatgaagaaaatgataactgcaaaagtgccattgaacacttttcaagcaaactacgccagcagaacgcagacaataacacacacacaaaagagtcttgcaggttctcttttagcggcaacgggcatgacattaggtatatttggtatgggcatcacagggacatgttggagctgggatgtttcttcttttcaggaattgaagcaacgtttagaaaggcgtgccaacaacgaatttgtagtgacaaacatgcctttggataaaagaagccagcaagtagtggacagcttagttaagacacacaattcttctctttgtaaatga

SEQ ID NO: 283 - DNA, 1272 bp, Saccharomyces cerevisiae
atggcggaaatacctgatgaaaccatccagcagttcatggcattgaccaatgtgtcgcataacatagccgttcaatatctctctgaatttggagatttaaatgaagcactaaattcctattatgcttctcaaacggatgaccaaaaggatagaagagaggaagcacattggaacagacagcaggagaaggccctcaagcaagaagccttctccaccaactcttcgaataaagccataaatacggagcacgttggtgggttatgtccaaaaccaggatcctcacaaggtagcaacgagtacttgaaaaggaaaggttctacctctcctgaaccaaccaagggtagtagccgctctggaagtggtaacaactccaggtttatgagcttttcggatatggtaagaggtcaagctgatgatgacgatgaagatcaaccgagaaatacttttgctggtggtgaaacatccggcttagaggttacagatccttcagatcctaattcattactgaaggatttgctggaaaaagcgagaaggggtggtcaaatgggcgctgaaaacggattccgtgatgacgaagaccatgaaatgggtgccaataggtttactggaagaggttttagattagggtcaaccatcgacgcagcagatgaagtcgtagaagacaacacttcacaatcacaacgtagaccagaaaaagtcacaagagaaattacattttggaaggaaggttttcaagtggccgatggtccgctttatcgctatgatgatcctgcgaacagtttctatttgagcgagttaaatcaagggagggctccattaaagctcttagatgtgcaatttggacaagaagttgaagttaatgtatataaaaaattagatgagtcttataaagctccgacgagaaaactgggcggtttttcaggccagggccaaagactaggatctcctatcccgggtgaatcgtcacctgcggaggttccaaagaatgagacacccgctgctcaggaacaacccatgccggacaatgagccaaaacaaggcgacacctccatccaaattagatacgcaaatggcaaaagagaagttttgcactgcaattccacagatacagtaaagtttttgtatgagcatgtgacatcaaatgcgaacactgacccatcgaggaatttcaccttgaattatgcctttcctatcaaaccaataagcaacgatgagacaacattgaaggacgctgatctgctgaactccgttgtcgtgcaaagatgggcatga

SEQ ID NO: 284 - DNA, 1272 bp, Artificial Sequence
  Description of Artificial Sequence: Synthetic polynucleotide
atggcggaaatacctgatgaaaccatccagcagttcatggcattgaccaatgtgtctcataacatagccgttcaatatctctctgaatttggagatttaaatgaagcattgaattcctattatgcttctcaaacggatgaccaaaaggatagaagagaggaagcacattggaacagacagcaggagaaggccctcaagcaagaagccttctccaccaactcttccaataaagccataaatacggagcacgttggtgggttatgtccaaaaccaggatcctctcaaggtagcaacgagtacttgaaaaggaaaggttctacctctcctgaaccaaccaagggtagtagccgctctggaagtggtaacaactccaggtttatgagcttttctgatatggtaagaggtcaagctgatgatgacgatgaagatcaaccgagaaatacttttgctggtggtgaaacatccggcttagaggttacagatccttctgatcctaattctttattgaaggatttgttggaaaaagcgagaaggggtggtcaaatgggcgctgaaaacggattccgtgatgacgaagaccatgaaatgggtgccaataggtttactggaagaggttttagattagggtccaccatcgacgcagcagatgaagtcgtagaagacaacacttctcaatctcaacgtagaccagaaaaagtcacaagagaaattacattttggaaggaaggttttcaagtggccgatggtccgctttatcgctatgatgatcctgcgaacagtttctatttgagcgagttaaatcaagggagggctccattaaagctcttagatgtgcaatttggacaagaagttgaagttaatgtatataaaaaattagatgagtcttataaagctccgacgagaaaattgggcggtttttctggccagggccaaagattaggatctcctatcccgggtgaatcttctcctgcggaggttccaaagaatgagacacccgctgctcaggaacaacccatgccggacaatgagccaaaacaaggcgacacctccatccaaattagatacgcaaatggcaaaagagaagttttgcactgcaattccacagatacagtaaagtttttgtatgagcatgtgacaagtaatgcgaacactgacccatctaggaatttcaccttgaattatgcctttcctatcaaaccaataagcaacgatgagacaacattgaaggacgctgatttattaaactccgttgtcgtgcaaagatgggcatga

SEQ ID NO: 285 - DNA, 627 bp, Saccharomyces cerevisiae
atggaaaagatgacagtttcttcgaattacaccatagctttatgggctactttcaccgcaatctcctttgccgtgggttaccagttgggtacgtcgaacgcatcatcaactaagaaatcctcagctactttactgcgttctaaagaaatgaaggaaggaaagctacacaatgacactgatgaggaggaaagtgaaagcgaagatgagagcgatgaggacgaagatattgagtccacttcattgaatgatatacctggagaagttaggatggcattggtgattcgtcaagatcttggcatgacaaagggcaaaatagcggcacaatgctgtcacgcagcattgtcatgttttagacatattgctacaaaccccgcgcgtgcttcatacaacccaattatgacacaaagatggctaaatgctggacaggctaaaataacgttgaaatgtccagataagtttacaatggacgagttgtatgcgaaggctatatcacttggggtgaatgcagcagttattcatgatgctggtagaacacagattgctgcgggaagtgccaccgtattgggtttaggacctgctccaaaagcagtattggatcaaataacaggtgatttgaaattgtattga

SEQ ID NO: 286 - DNA, 627 bp, Artificial Sequence
  Description of Artificial Sequence: Synthetic polynucleotide
atggaaaagatgacagtttcttccaattacaccatagctttatgggctactttcaccgcaatctcctttgccgtgggttaccagttgggtacgtccaacgcatcttctactaagaaatcctctgctactttattacgttctaaagaaatgaaggaaggaaagttgcacaatgacactgatgaggaggaaagtgaaagcgaagatgagagcgatgaggacgaagatattgagtccacttctttgaatgatatacctggagaagttaggatggcattggtgattcgtcaagatcttggcatgacaaagggcaaaatagcggcacaatgctgtcacgcagcattgagttgttttagacatattgctacaaaccccgcgcgtgcttcttacaacccaattatgacacaaagatggttaaatgctggacaggctaaaataacgttgaaatgtccagataagtttacaatggacgagttgtatgcgaaggctatatctcttggggtgaatgcagcagttattcatgatgctggtagaacacagattgctgcgggaagtgccaccgtattgggtttaggacctgctccaaaagcagtattggatcaaataacaggtgatttgaaattgtattga

SEQ ID NO: 287 - DNA, 1407 bp, Saccharomyces cerevisiae
atgggtcaaatattgtccaatccaattatcgacaaagagcatcattctggtacggactgtttgacagcgtttggactatgtgccatgcaaggctggcgtatgtccatggaagatgcccatattgttgagccgaaccttttggctgagtctgacgaggaacatctcgcattttatggtatatttgacggtcatggtggttcttctgtagcggagttttgtggctctaaaatgatatctatactgaaaaaacaggagagcttcaagagcggtatgttagagcagtgcttaatagatacctttttagctacagatgttgagttgttgaaagatgaaaaattaaaagatgaccatagtggttgtacagcaactgtgatattggtatctcaattgaaaaagctactaatttgcgccaattccggtgatagtagaacagttctatctactggtggtaatagtaaagcaatgtcatttgatcataagcccacattgttaagtgaaaaatctcgtattgtagctgctgatggttttgttgagatggaccgtgttaatggaaatttagcgttatcaagagccataggtgattttgaattcaaatctaacacaaaattgggacctcatgagcaagtcgttacatgtgttcctgatatcatttgtcacaatttgaattatgatgaggatgaatttgttattttagcatgtgatggtatttgggattgtttaacttctcaagagtgtgttgacttggttcactacggtataagtcaaggtaatatgacgttgagcgacatttcatctagaatcgtagatgtttgttgttcacccacaactgaaggctcaggaattggctgtgataatatgagtatttccattgttgctttactaaaggaaaatgaatctgagtcacaatggtttgagcgtatgagatcaaaaaattacaatatccaaacgtcttttgtccaaagaaggaaaagtatttttgatttccatgatttttcggatgatgataacgaagtgttcgcaataaccaccaaaaaattacaagaccgcttgaatcgtagtaaagataatgacgacatggaaattgatgatcttgataccgaattaggcagcagtgctactccctcaaagttatcaggtgaggatagaactggccctattgacttgttttcgttggaggctctattagaagccgggattcaaataaggcagaggcccagctccgacagtgacggcaacacttcttatttccatggtgcttctttatcagatatgttggcatctttaagcaatgcggctgcaggagaaacagaacctaatgatgctgatgataacgatgataacgacggcgaagaaaacggcaagaatgaaaatgcgaagaagggttccaagattgaagaaattgaataa

SEQ ID NO: 288 - DNA, 1407 bp, Artificial Sequence
  Description of Artificial Sequence: Synthetic polynucleotide
atgggtcaaatattgtccaatccaattatcgacaaagagcatcattctggtacggactgtttgacagcgtttggattatgtgccatgcaaggctggcgtatgtccatggaagatgcccatattgttgagccgaaccttttggctgagtctgacgaggaacatctcgcattttatggtatatttgacggtcatggtggttcttctgtagcggagttttgtggctctaaaatgatatctatattgaaaaaacaggagagcttcaagagcggtatgttagagcagtgcttaatagatacctttttagctacagatgttgagttgttgaaagatgaaaaattaaaagatgaccatagtggttgtacagcaactgtgatattggtatctcaattgaaaaagttattgatttgcgccaattccggtgatagtagaacagttttatctactggtggtaatagtaaagcaatgagttttgatcataagcccacattgttaagtgaaaaatctcgtattgtagctgctgatggttttgttgagatggaccgtgttaatggaaatttagcgttatctagagccataggtgattttgaattcaaatctaacacaaaattgggacctcatgagcaagtcgttacatgtgttcctgatatcatttgtcacaatttgaattatgatgaggatgaatttgttattttagcatgtgatggtatttgggattgtttaacttctcaagagtgtgttgacttggttcactacggtataagtcaaggtaatatgacgttgagcgacatttcttctagaatcgtagatgtttgttgttctcccacaactgaaggcagtggaattggctgtgataatatgagtatttccattgttgctttattgaaggaaaatgaatctgagtctcaatggtttgagcgtatgagaagtaaaaattacaatatccaaacgtcttttgtccaaagaaggaaaagtatttttgatttccatgatttttctgatgatgataacgaagtgttcgcaataaccaccaaaaaattacaagaccgcttgaatcgtagtaaagataatgacgacatggaaattgatgatcttgataccgaattaggcagcagtgctactccctccaagttatctggtgaggatagaactggccctattgacttgttttctttggaggctttattagaagccgggattcaaataaggcagaggcccagctccgacagtgacggcaacacttcttatttccatggtgcttctttaagtgatatgttggcatctttaagcaatgcggctgcaggagaaacagaacctaatgatgctgatgataacgatgataacgacggcgaagaaaacggcaagaatgaaaatgcgaagaagggttccaagattgaagaaattgaatga

SEQ ID NO: 289 - DNA, 1257 bp, Saccharomyces cerevisiae
atgtggggcatcttattgaaatcctcgaacaaaagttgttctaggctctggaaaccaattttgacacaatattatagcatgacatcaactgccacggattctccgctgaaatactatgatattggattgaatctgacagatcctatgtttcacggtatttacaatggtaagcagtaccatccagcagattatgtaaaattattagagcgtgctgctcagaggcacgtgaaaaatgcccttgttacaggatcatccatagcggagtctcaaagtgccattgagttggtaagcagcgtcaaagatcttagcccgttaaagctgtatcacacaataggtgttcacccatgttgcgttaacgagtttgcggatgctagtcaaggggacaaggctagcgcttctattgataacccttccatggatgaagcatataatgagtctctatatgctaaagttattagtaatccatcttttgcacagggtaaactgaaagagctttatgatttgatgaatcagcaagcaaaacctcatgatacaagtttcaggtcaattggtgagatcgggttggactacgacagatttcactatagttctaaagagatgcaaaaggttttttttgaagagcaactgaaaataagttgtttgaacgataaactcagcagctatccattgtttctgcatatgagaagcgcatgtgacgattttgttcaaatattggaaagatttattgccgggttcactgatgagagggatacctttcagctacaaaagttaggtgcatcgtcgtctagcgggttttacaaatttcatccagatagaaaactagtggtccattcattcactggttctgcgatagatttgcagaaattactgaacttatcacccaacatcttcataggagtaaacggttgctcgttgagaaccgaggaaaatctagctgttgtaaagcaaataccaacagaaaggttgttattagagacagatgctccgtggtgtgagattaaaagaacgcatgcatctttccagtacttagccaaataccaggaggttagggatttcgaataccctgcattcaagtccgttaagaaaaataagctcgctgacaagttgaatgcagaagaactttacatggtcaagggccgtaatgagccttgtaatatggaacaagtagcaattgtcgtatcggaagtcaaggacgtggatctggctactttgatagataccacgtggaagacgacctgtaagatatttggagagtaa

SEQ ID NO: 290 - DNA, 1257 bp, Artificial Sequence
  Description of Artificial Sequence: Synthetic polynucleotide
atgtggggcatcttattgaaatccagtaacaaaagttgttctaggctctggaaaccaattttgacacaatattatagcatgacatctactgccacggattctccgttaaaatactatgatattggattgaatttgacagatcctatgtttcacggtatttacaatggtaagcagtaccatccagcagattatgtaaaattattagagcgtgctgctcagaggcacgtgaaaaatgcccttgttacaggatcttccatagcggagtctcaaagtgccattgagttggtaagcagcgtcaaagatcttagcccgttaaagctttatcacacaataggtgttcacccatgttgcgttaacgagtttgcggatgctagtcaaggggacaaggctagcgcttctattgataacccttccatggatgaagcatataatgagtctttgtatgctaaagttattagtaatccatcttttgcacagggtaaattgaaagagctttatgatttgatgaatcagcaagcaaaacctcatgatacaagtttcaggtctattggtgagatcgggttggactacgacagatttcactatagttctaaagagatgcaaaaggttttttttgaagagcaattgaaaataagttgtttgaacgataaactcagcagctatccattgtttttacatatgagaagcgcatgtgacgattttgttcaaatattggaaagatttattgccgggttcactgatgagagggatacctttcagttacaaaagttaggtgcatcttcttctagcgggttttacaaatttcatccagatagaaaattagtggtccattctttcactggttctgcgatagatttgcagaaattattaaacttatctcccaacatcttcataggagtaaacggttgctctttgagaaccgaggaaaatttggctgttgtaaagcaaataccaacagaaaggttgttattagagacagatgctccgtggtgtgagattaaaagaacgcatgcatctttccagtacttagccaaataccaggaggttagggatttcgaataccctgcattcaagtccgttaagaaaaataagctcgctgacaagttgaatgcagaagaactttacatggtcaagggccgtaatgagccttgtaatatggaacaagtagcaattgtcgtatctgaagtcaaggacgtggatttggctactttgatagataccacgtggaagacgacctgtaagatatttggagagtga

SEQ ID NO: 291 - DNA, 1578 bp, Saccharomyces cerevisiae
atgacgttgccgaaactcagtagcgtttctgtttcatcaggacatgttagtgccaactcacatggtttctcaatactaagcaaacaccctcacccaaataatcttgtccattcccactcactttctcacacaaatgcgaagagccacctgcctatcagtagcactagcactaaagagaacagcacgaacaaggaggaggcggaatcactcaaaaaaaacaacccctcttcttgggaccctagtgatgatatcaagctccgccacctgaaagagatcaagaacttgggctggaaggagattgcacatcatttcccaaatagaactcctaacgcttgtcaattcagatggaggagactgaaatcaggcaacttaaagtctaacaagaccgcagttattgacatcaataagctattcggcgtgtatgcgactggtgatgctaccccatccgcgggtactccgtctgcggaagaagccgtaaaagaggaagctgttgaggatgaagatattactgcaggttctagtgctatcgaggattctccaccggatttcaagccattagttaagcctaaatacatggacagaaaactgataactcaaagatctacatcaacattttcggaccatgagccacaacacacgaaaccaaggaaactgtttgttaagccaaggtccttctctcattctataacaaccaacacgcctaatgtaaagactgctcagcagacaaatctaagcctttataacactacttcagcaaagacaaataaagctgttaattccaatgattatgagaatattggtcttgtgcctaaaattattatcaggtctagaaggaactcctttattccttcaactcaaatccctcattcaacgacgaagactaggaaaaactcgcattccgtaatttcttctagaagatcatcttttaacatgatgcattcaagaagatcatccttcaactctcacgctcctacggagcctatttctagaagagcttccttggtagttagcccgtatatgtcacccagaaggttatctacatcgcaatccgttcattatcatccacagcaccaatactatcttaaccccatagcgtctcccaactgcaagacagaccacgcaaatgacaaaatcacgcacacgaggactttcttagatatgcaaaaattcgctaataaacacccgtggtctagagaagatgatgaagtgctacttaacaatacgaaggacaaacaaaaccatttgtcgccgctagaaatttctattgttctgcctaataatagatccgagttggaaatccaacaaagaatggattatttaaagagaaaaggacgtgtaagtggttttcatacaaatgaaggatgcaaagacgaggaggaggaggatgacattgacccactgcacaaggagaatggcattaacacgccatcgcagcaatcgcaaaattacggtatgttagaggctaaacatgataatccaaagtctagtgagctttcttctatgaccagcgcaaatgacatacgcaatgagcaagatgaacttccaggtataaattctatctttaaaaatatattttaa

SEQ ID NO: 292 - DNA, 1578 bp, Artificial Sequence
  Description of Artificial Sequence: Synthetic polynucleotide
atgacgttgccgaaactcagtagcgtttctgtttcttctggacatgttagtgccaactctcatggtttctctatattaagcaaacaccctcacccaaataatcttgtccattcccactccctttctcacacaaatgcgaagagccacttgcctatcagtagcactagcactaaagagaacagcacgaacaaggaggaggcggaatctctcaaaaaaaacaacccctcttcttgggaccctagtgatgatatcaagctccgccacttgaaagagatcaagaacttgggctggaaggagattgcacatcatttcccaaatagaactcctaacgcttgtcaattcagatggaggagattgaaatctggcaacttaaagtctaacaagaccgcagttattgacatcaataagcttttcggcgtgtatgcgactggtgatgctaccccatccgcgggtactccgtctgcggaagaagccgtaaaagaggaagctgttgaggatgaagatattactgcaggttctagtgctatcgaggattctccaccggatttcaagccattagttaagcctaaatacatggacagaaaattgataactcaaagatctacatctacattttctgaccatgagccacaacacacgaaaccaaggaaattatttgttaagccaaggtccttctctcattctataacaaccaacacgcctaatgtaaagactgctcagcagacaaatttgagcctttataacactacttctgcaaagacaaataaagctgttaattccaatgattatgagaatattggtcttgtgcctaaaattattatcaggtctagaaggaactcctttattccttccactcaaatccctcattctacgacgaagactaggaaaaactctcattccgtaatttcttctagaagatcttcttttaacatgatgcattccagaagaagttccttcaactctcacgctcctacggagcctatttctagaagagcttccttggtagttagcccgtatatgtctcccagaaggttatctacatctcaatccgttcattatcatccacagcaccaatactatcttaaccccatagcgtctcccaactgcaagacagaccacgcaaatgacaaaatcacgcacacgaggactttcttagatatgcaaaaattcgctaataaacacccgtggtctagagaagatgatgaagtgttgcttaacaatacgaaggacaaacaaaaccatttgtctccgttggaaatttctattgttttacctaataatagatccgagttggaaatccaacaaagaatggattatttaaagagaaaaggacgtgtaagtggttttcatacaaatgaaggatgcaaagacgaggaggaggaggatgacattgacccattacacaaggagaatggcattaacacgccatctcagcaatctcaaaattacggtatgttagaggctaaacatgataatccaaagtctagtgagctttcttctatgaccagcgcaaatgacatacgcaatgagcaagatgaacttccaggtataaattctatctttaaaaatatattttga

SEQ ID NO: 293 - DNA, 2496 bp, Saccharomyces cerevisiae
atgtcattaacagcaaacgacgaatcgccaaaacccaaaaaaaatgcattattgaaaaacttagagatcgatgatctgatacattctcaatttgtcagaagcgatacaaatggacatagaactacaagacgactattcaactccgatgccagtatatcacatcgaataagaggaagtgttcggtctgataaaggccttaataaaataaaaaaagggttgatttcccagcagtccaaacttgcgtcagaaaattcttctcaaaatatcgttaatagggacaataagatgggagcagtaagtttccccattattgaacctaatattgaagtcagcgaggagttgaaggttagaattaagtatgattctatcaaatttttcaattttgaaagactaatatctaaatcttcagtcatagcacctttagttaacaaaaatataacatcatccggtcctctaatcgggtttcaaagaagagttaacaggttaaagcaaacatgggatctagcaaccgaaaacatggagtacccatattcttctgataatacgccattcagggataacgattcttggcaatggtacgtaccatacggcggaacaataaaaaaaatgaaagatttcagtacaaaaagaactttacccacctgggaagataaaataaagtttcttacatttttagaaaactctaagtctgcaacgtacattaatggtaacgtatcactttgcaatcataatgaaaccgatcaagaaaacgaagataggaaaaaaaggaaagggaaagtaccaagaatcaaaaataaagtgtggttttcccagatagaatacattgttcttcgaaattatgaaattaaaccttggtatacatctccttttccggaacacatcaaccaaaataaaatggtttttatatgtgagttctgcctaaaatatatgacttctcgatatactttttatagacaccaactaaagtgtctaacttttaagccccccggaaatgaaatttatcgcgacggtaagctgtctgtttgggaaattgatgggcgggagaatgtcttgtattgtcaaaatctttgcctgttggcaaaatgttttatcaattctaagactttgtattacgatgttgaaccgtttatattctatattctaacggagagagaggatacagagaaccatccctatcaaaacgcagccaaattccatttcgtaggctatttctccaaggaaaaattcaactccaatgactataacctaagttgtattttaactctacccatataccagaggaaaggatatggtcagtttttgatggaattttcatatttattatccagaaaggagtcaaaatttggaactcctgaaaaaccattgtcggatttaggattattgacttacagaacgttttggaagataaaatgtgctgaagtgctattaaaattaagagacagtgctagacgtcgatcaaataataaaaatgaagatacttttcagcaggttagcctaaacgatatcgctaaactaacaggaatgataccaacagacgttgtgtttggattggaacaacttcaagttttgtatcgccataaaacacgctcattatccagtttggatgatttcaactatattattaaaatcgattcttggaacaggattgaaaatatttacaaaacttggagctcaaaaaactatcctcgcgtcaaatatgacaaactattgtgggaacctattatattagggccgtcatttggtataaatgggatgatgaacttagaacccaccgcattagcggacgaagctcttacaaatgaaactatggctccggtaatttcgaataacacacatatagaaaactataacaacagtagagcacataataaacgcagaagaagaagaagaagaagtagtgagcacaaaacatccaagcttcatgtaaacaatatcatagaaccggaagtacctgctactgatttttttgaagacactgtttcctccttaacagagtatatgtgtgattataagaacacaaataatgatagattaatctatcaagcggaaaaaagagtgctggaaagcatccatgatcgcaaagggataccaagatcaaaatttagtacagaaactcattgggagctctgcttcactattaaaaactccgaaacaccacttggaaatcatgcagctaggagaaacgatactggaatatcaagtttagagcaggatgaagtagaaaacgatgtagatactgaattatatgtaggtgaaaacgccaaagaagatgaagacgaagacgaagactttacccttgatgatgacattgaggatgagcaaatatcagaagaaaatgatgaggaggaagacacatatgaagaagacagtgatgatgatgaggatgggaagagaaaaggacaagagcaggatgaaaacgatatagaaagccacataaggaaggagagagtcagaaaaagaagaaaaataactctaatagaggatgacgaagaataa

SEQ ID NO: 294 - DNA, 2496 bp, Artificial Sequence
  Description of Artificial Sequence: Synthetic polynucleotide
atgtctttaacagcaaacgacgaatctccaaaacccaaaaaaaatgcattattgaaaaacttagagatcgatgatttgatacattctcaatttgtcagaagcgatacaaatggacatagaactacaagaagattattcaactccgatgccagtatatctcatagaataagaggaagtgttagatctgataaaggccttaataaaataaaaaaagggttgatttcccagcagtccaaacttgcgtctgaaaattcttctcaaaatatcgttaatagggacaataagatgggagcagtaagtttccccattattgaacctaatattgaagtcagcgaggagttgaaggttagaattaagtatgattctatcaaatttttcaattttgaaagattaatatctaaatcttctgtcatagcacctttagttaacaaaaatataacatcttccggtcctttgatcgggtttcaaagaagagttaacaggttaaagcaaacatgggatttggcaaccgaaaacatggagtacccatattcttctgataatacgccattcagggataacgattcttggcaatggtacgtaccatacggcggaacaataaaaaaaatgaaagatttcagtacaaaaagaactttacccacctgggaagataaaataaagtttcttacatttttagaaaactctaagtctgcaacgtacattaatggtaacgtatctctttgcaatcataatgaaaccgatcaagaaaacgaagataggaaaaaaaggaaagggaaagtaccaagaatcaaaaataaagtgtggttttcccagatagaatacattgttcttagaaattatgaaattaaaccttggtatacatctccttttccggaacacatcaaccaaaataaaatggtttttatatgtgagttctgcttgaaatatatgacttctagatatactttttatagacaccaattgaagtgtttaacttttaagccccccggaaatgaaatttatcgcgacggtaagttatctgtttgggaaattgatgggcgtgagaatgtcttgtattgtcaaaatctttgcttgttggcaaaatgttttatcaattctaagactttgtattacgatgttgaaccgtttatattctatattttaacggagagagaggatacagagaaccatccctatcaaaacgcagccaaattccatttcgtaggctatttctccaaggaaaaattcaactccaatgactataacttgagttgtattttaactttacccatataccagaggaaaggatatggtcagtttttgatggaattttcttatttattatccagaaaggagagtaaatttggaactcctgaaaaaccattgagtgatttaggattattgacttacagaacgttttggaagataaaatgtgctgaagtgttattaaaattaagagacagtgctagacgtagatctaataataaaaatgaagatacttttcagcaggttagcttgaacgatatcgctaaattaacaggaatgataccaacagacgttgtgtttggattggaacaacttcaagttttgtatcgccataaaacacgctctttatccagtttggatgatttcaactatattattaaaatcgattcttggaacaggattgaaaatatttacaaaacttggagcagtaaaaactatcctcgcgtcaaatatgacaaacttttgtgggaacctattatattagggccgtcctttggtataaatgggatgatgaacttagaacccaccgcattagcggacgaagctcttacaaatgaaactatggctccggtaatttctaataacacacatatagaaaactataacaacagtagagcacataataaacgcagaagaagaagaagaagaagtagtgagcacaaaacatccaagcttcatgtaaacaatatcatagaaccggaagtacctgctactgatttttttgaagacactgtttcctccttaacagagtatatgtgtgattataagaacacaaataatgatagattaatctatcaagcggaaaaaagagtgttggaaagcatccatgatcgcaaagggataccaagaagtaaatttagtacagaaactcattgggagctctgcttcactattaaaaactccgaaacaccacttggaaatcatgcagctaggagaaacgatactggaatatctagtttagagcaggatgaagtagaaaacgatgtagatactgaattatatgtaggtgaaaacgccaaagaagatgaagacgaagacgaagactttacccttgatgatgacattgaggatgagcaaatatctgaagaaaatgatgaggaggaagacacatatgaagaagacagtgatgatgatgaggatgggaagagaaaaggacaagagcaggatgaaaacgatatagaaagccacataaggaaggagagagtcagaaaaagaagaaaaataactttgatagaggatgacgaagaatga

SEQ ID NO: 295 - DNA, 2007 bp, Saccharomyces cerevisiae
atggagaccagttcttttgagaatgctcctcctgcagccatcaatgatgctcaggataataatataaatacggagactaatgaccaggaaacaaatcagcaatctatcgaaactagagatgcaattgacaaagaaaacggtgtgcaaacggaaactggtgagaactctgcaaaaaatgccgaacaaaacgtttcttctacaaatttgaataatgcccccaccaatggtgctttggacgatgatgttatcccaaatgctattgttattaaaaacattccgtttgctattaaaaaagagcaattgttagacattattgaagaaatggatcttccccttccttatgccttcaattaccactttgataacggtattttcagaggactagcctttgcgaatttcaccactcctgaagaaactactcaagtgataacttctttgaatggaaaggaaatcagcgggaggaaattgaaagtggaatataaaaaaatgcttccccaagctgaaagagaaagaatcgagagggagaagagagagaaaagaggacaattagaagaacaacacagatcgtcatctaatctttctttggattctttatctaaaatgagtggaagcggaaacaataatacttctaacaatcaattattctcgactctaatgaacggcattaatgctaatagcatgatgaacagtccaatgaataataccattaacaataacagttctaataacaacaatagtggtaacatcattctgaaccaaccttcactttctgcccaacatacttcttcatcgttgtaccaaacaaacgttaataatcaagcccagatgtccactgagagattttatgcgcctttaccatcaacttccactttgcctctcccaccccaacaactggacttcaatgaccctgacactttggaaatttattcccaattattgttatttaaggatagagaaaagtattattacgagttggcttatcccatgggtatatccgcttcccacaagagaattatcaatgttttgtgctcgtacttagggctagtagaagtatatgatccaagatttattattatcagaagaaagattctggatcatgctaatttacaatctcatttgcaacaacaaggtcaaatgacatctgctcatcctttgcagccaaactccactggcggctccatgaataggtcacaatcttatacaagtttgttacaggcccatgcagcagctgcagcgaatagtattagcaatcaggccgttaacaattcttccaacagcaatactattaacagtaataacggtaacggtaacaatgtcatcattaataacaatagcgccagctcaacaccaaaaatttcttcacagggacaattctccatgcaaccaacactaacctcacctaaaatgaacatacaccatagttctcaatacaattccgcagaccaaccgcaacaacctcaaccacaaacacagcaaaatgttcagtcagctgcgcaacaacaacaatcttttttaagacaacaagctactttaacaccatcctcaagaattccatccggttattctgccaaccattatcaaatcaattccgttaatcccttactgagaaattctcaaatttcacctccaaattcacaaatcccaatcaacagccaaaccctatcccaagcgcaaccaccagcacagtcccaaactcaacaacgggtaccagtggcataccaaaatgcttcattgtcttcccagcagttgtacaaccttaacggcccatcttcagcaaactcacagtcccaactgcttccacagcacacaaatggctcagtacattctaatttctcatatcagtcttatcacgatgagtccatgttgtccgcacacaatttgaatagtgccgacttgatctataaatctttgagtcactctggactagatgatggcttggaacagggcttgaatcgttctttaagcggactggatttacaaaaccaaaacaagaagaatctatggtaa

SEQ ID NO: 296 - DNA, 2007 bp, Artificial Sequence
  Description of Artificial Sequence: Synthetic polynucleotide
atggagaccagttcttttgagaatgctcctcctgcagccatcaatgatgctcaggataataatataaatacggagactaatgaccaggaaacaaatcagcaatctatcgaaactagagatgcaattgacaaagaaaacggtgtgcaaacggaaactggtgagaactctgcaaaaaatgccgaacaaaacgtttcttctacaaatttgaataatgcccccaccaatggtgctttggacgatgatgttatcccaaatgctattgttattaaaaacattccgtttgctattaaaaaagagcaattgttagacattattgaagaaatggatcttccccttccttatgccttcaattaccactttgataacggtattttcagaggattggcctttgcgaatttcaccactcctgaagaaactactcaagtgataacttctttgaatggaaaggaaatcagcgggaggaaattgaaagtggaatataaaaaaatgcttccccaagctgaaagagaaagaatcgagagggagaagagagagaaaagaggacaattagaagaacaacacagaagttcttctaatctttctttggattctttatctaaaatgagtggaagcggaaacaataatacttctaacaatcaattattctctactttaatgaacggcattaatgctaatagcatgatgaacagtccaatgaataataccattaacaataacagttctaataacaacaatagtggtaacatcattttgaaccaaccttctctttctgcccaacatacttcttcttctttgtaccaaacaaacgttaataatcaagcccagatgtccactgagagattttatgcgcctttaccatctacttccactttgcctctcccaccccaacaattggacttcaatgaccctgacactttggaaatttattcccaattattgttatttaaggatagagaaaagtattattacgagttggcttatcccatgggtatatccgcttcccacaagagaattatcaatgttttgtgctcttacttagggttggtagaagtatatgatccaagatttattattatcagaagaaagattttagatcatgctaatttacaatctcatttgcaacaacaaggtcaaatgacatctgctcatcctttgcagccaaactccactggcggctccatgaataggtctcaatcttatacaagtttgttacaggcccatgcagcagctgcagcgaatagtattagcaatcaggccgttaacaattcttccaacagcaatactattaacagtaataacggtaacggtaacaatgtcatcattaataacaatagcgccagctctacaccaaaaatttcttctcagggacaattctccatgcaaccaacattaacctctcctaaaatgaacatacaccatagttctcaatacaattccgcagaccaaccgcaacaacctcaaccacaaacacagcaaaatgttcagtctgctgcgcaacaacaacaatcttttttaagacaacaagctactttaacaccatccagcagaattccatccggttattctgccaaccattatcaaatcaattccgttaatcccttattaagaaattctcaaatttctcctccaaattctcaaatcccaatcaacagccaaaccttatcccaagcgcaaccaccagcacagtcccaaactcaacaaagagtaccagtggcataccaaaatgcttctttgtcttcccagcagttgtacaaccttaacggcccatcttctgcaaactctcagtcccaattacttccacagcacacaaatggctctgtacattctaatttctcttatcagtcttatcacgatgagtccatgttgtccgcacacaatttgaatagtgccgacttgatctataaatctttgagtcactctggattagatgatggcttggaacagggcttgaatcgttctttaagcggattagatttacaaaaccaaaacaagaagaatttatggtga

SEQ ID NO: 297 - DNA, 879 bp, Saccharomyces cerevisiae
atgtcagaccctgtagagttattgaaaagagctgagaagaagggtgttccttcatcgggtttcatgaaattgtttagcggttctgattcatacaagtttgaggaggctgctgatctttgtgtccaagcagccaccatttaccgtctaagaaaagagttaaacttggcaggagactcgtttttgaaagctgctgactatcagaaaaaggctggtaatgaagacgaagcaggaaatacctacgtagaggcttataaatgctttaaaagcggtggaaactctgtgaacgccgtggattcattagaaaatgctattcaaatttttactcatagggggcagttccggagaggtgctaatttcaagtttgagcttggagaaattctagaaaatgatttgcatgactatgcaaaagctatagattgctatgagctcgctggtgagtggtatgcccaagaccagtcggtagcattatcgaataagtgttttatcaaatgcgcagatctaaaggctcttgacggtcaatatattgaagcaagtgatatatattcgaagttgatcaagagcagcatgggcaatagattgagccaatggagtttgaaggattacttcctaaaaaaagggctttgtcagctagctgctactgatgcagtcgctgctgcaagaactttacaagagggtcaaagtgaagatccgaattttgcggattcaagggagtcaaatttcttgaaaagtttaatcgatgctgttaatgaaggtgatagcgagcagctaagcgaacactgtaaggagtttgacaattttatgagactagataaatggaaaattaccattttgaataaaattaaggagtccatccagcaacaagaagatgatttgttatga

SEQ ID NO: 298 - DNA, 879 bp, Artificial Sequence
  Description of Artificial Sequence: Synthetic polynucleotide
atgtctgaccctgtagagttattgaaaagagctgagaagaagggtgttccttcttctggtttcatgaaattgtttagcggttctgattcttacaagtttgaggaggctgctgatctttgtgtccaagcagccaccatttaccgtttaagaaaagagttaaacttggcaggagactcttttttgaaagctgctgactatcagaaaaaggctggtaatgaagacgaagcaggaaatacctacgtagaggcttataaatgctttaaaagcggtggaaactctgtgaacgccgtggattctttagaaaatgctattcaaatttttactcatagggggcagttcagaagaggtgctaatttcaagtttgagcttggagaaattttggaaaatgatttgcatgactatgcaaaagctatagattgctatgagctcgctggtgagtggtatgcccaagaccagtctgtagcattatccaataagtgttttatcaaatgcgcagatttgaaggctcttgacggtcaatatattgaagcaagtgatatatattccaagttgatcaagagcagcatgggcaatagattgagccaatggagtttgaaggattacttcttgaaaaaagggctttgtcagttagctgctactgatgcagtcgctgctgcaagaactttacaagagggtcaaagtgaagatccgaattttgcggatagtagggagagcaatttcttgaaaagtttaatcgatgctgttaatgaaggtgatagcgagcagttgagcgaacactgtaaggagtttgacaattttatgagattagataaatggaaaattaccattttgaataaaattaaggagtccatccagcaacaagaagatgatttgttatga

SEQ ID NO: 299 - DNA, 417 bp, Saccharomyces cerevisiae
atgggattgcgttactccatatatattgaaaatccgttatcttccccatcatcatcgtataaatcaataaacgacccgttattccactctcagcatcgatcgcaaaaaaacgtgagcttcatcacctacggttgtagacattgcaagacacatctttccagttccttccagattatttctagagattataggggtaggaccggaactgcttatttaatgaacaaagttgttaatgtcgttgaaggaaaggtcgagcaacgaagaatgttgactggcgactacttagtctgtgatattctttgtcattggtgcaagaggaacgtaggttggaaatacttgcagagcagcaatgatgatcagcagtataaggaaggaaagtttatcttagagctgaaaaacatttgtaaatgtacttga

SEQ ID NO: 300 - DNA, 417 bp, Artificial Sequence
  Description of Artificial Sequence: Synthetic polynucleotide
atgggattgcgttactccatatatattgaaaatccgttatcttccccatcttcttcttataaatctataaacgacccgttattccactctcagcataggtctcaaaaaaacgtgagcttcatcacctacggttgtagacattgcaagacacatctttccagttccttccagattatttctagagattataggggtaggaccggaactgcttatttaatgaacaaagttgttaatgtcgttgaaggaaaggtcgagcaaagaagaatgttgactggcgactacttagtctgtgatattctttgtcattggtgcaagaggaacgtaggttggaaatacttgcagagcagcaatgatgatcagcagtataaggaaggaaagtttatcttagagttgaaaaacatttgtaaatgtacttga

SEQ ID NO: 301 - DNA, 312 bp, Saccharomyces cerevisiae
atgattctttttaagaatctggtctttcttccttctattttgattgggtatatttctattcgtgtttcattactggtctgggttaattgggttttggtttggtccagttgttttcaagtagcctttattttttcattgtggtattttatcttatcgatttatacttttttttattcaaagaaaattaaacagataatctcttatgagcctagctactttgttttttcttacagggccattgacttatgccctgaacgagtcttactttactttttttgtattttcaataatgtcgtgtttcccatgttgtaa

SEQ ID NO: 302 - DNA, 312 bp, Artificial Sequence
  Description of Artificial Sequence: Synthetic polynucleotide
atgattctttttaagaatttggtctttcttccttctattttgattgggtatatttctattcgtgtttctttattggtctgggttaattgggttttggtttggtccagttgttttcaagtagcctttattttttctttgtggtattttatcttatccatttatacttttttttattccaagaaaattaaacagataatctcttatgagcctagctactttgttttttcttacagggccattgacttatgccctgaaagagtcttactttactttttttgtattttcaataatgtcgtgtttcccatgttgtga

SEQ ID NO: 303 - DNA, 4146 bp, Saccharomyces cerevisiae
atggcatctattacttttagaactccattatcctctcaggaacaagccttttataatcagaaatttcaccaattggatacggaagatctcggggtggtcactggcgaggcagtcagaccgctcttcgcgtcttctggtcttccagggcaattactatcgcaagtgtgggctaccgtcgatatagacaataaagggtttttgaacttgaacgagttttcggctgctttgagaatgatcgctcaattgcaaaatgctcccaaccaaccaatttccgctgccctatatgagagcacacctactcaactggcttctttttctataaatcagaacccagcccctatgcaaagcggtagtgcaaccggcaatacaaacaacactgatattcctgccttatcctcaaatgatattgctaaattttcacaactgtttgataggacagcaaagggtgctcaaactgttgctggtgataaagccaaggatatatttttaaaggcaagattaccaaatcaaactttaggtgaaatttgggctctttgtgatagagacgcatccggtgtcttagacaaatctgagtttataatggccatgtatttgatccaactatgtatgtctcatcatcctagtatgaacacaccaccggccgtgttgcctactcagctgtgggattctattcgtttagaacctgttgttgttaatcaaccaaacaggactactcctttgagtgctaactccactggcgtatcttcactaacaagacactctactatatcacgtctatctactggtgcattcagtaatgctgcttcagattggtctttaagttttgaaaaaaaacaacagtttgatgcaatttttgattcattagataagcaacatgctggttcgctaagctctgctgtgttggttccattcttcttatcctctagattaaaccaagagacgttagccaccatctgggacttagctgacatccacaacaatgctgaattcaccaaattggaatttgctattgccatgttcttaattcaaaaaaagaatgctggtgtcgaattaccggatgttatccccaatgaattattacagtcccccgctttaggactttatccgccaaacccacttcctcaacaacaaagtgcacctcaaattgccatcccctcaagagcaagtaagccttctttacaggatatgccacaccaagtttctgccccagcagttaatactcaaccaacagttccacaagttcttcctcaaaactcaaataacggttctttgaatgatttactggctttgaacccttcattcagctctccttctcccactaaagcacaaactgtggttcaaaacaacacaaataatagtttttcatatgataataacaatggccaagcaacattacaacaacaacagccacagcagcctccacctttaactcactcctcctctggattgaagaaatttactcccacctcaaacttcggtcaaagtataatcaaggaagaaccagaggaacaagagcaactaagggaatccagtgatacttttagcgctcagcctccgccagttccaaaacatgcttcaagtccagtcaaacgtacagcttcaacaacactgccacaagttcccaacttttctgtgtttagcatgccagcaggcgctgccactagcgctgccactggtgctgctgtaggcgccgcagtgggtgctgctgctttaggcgcatccgctttttcaagatcttccaataatgcattcaagaaccaggatttatttgcagatggtgaagcttctgctcagttatctaatgctaccacagaaatggctaatttatctaaccaagtaaactccctgtccaagcaggcaagtataactaatgacaaaaagtcaagagcgacccaggagttgaaacgtgttactgagatgaaaaattccattcaaatcaaattgaacaatttacgttctacccatgaccaaaatgttaaacaaacggaacaactggaagcacaagtacttcaagtaaacaaagaaaacgaaacattagcgcaacagttggctgtatccgaagcaaactaccatgccgctgagtccaaactcaatgaactaactactgatttgcaagaatctcaaacaaagaacgcagaattaaaagaacaaattacgaatttgaactcgatgacagcctccttacagtcacaattaaatgaaaaacaacaacaggtcaagcaagaaaggtcaatggtagatgttaattcaaaacagctagagttgaatcaagtcacagtagcaaacttgcagaaggaaatcgatggtcttggcgaaaagataagcgtttacttaactaaacaaaaggagttaaatgactaccaaaagaccgtggaggagcaacacgcacaattacaagctaaataccaggatctgtccaacaaggatactgatttaacggaccgtgaaaaacaattggaagaacgtaacagacaaattgaagaacaagaaaatctctaccatcagcacgtttctaaattgcaagaaatgttcgacgatctatcacagagaaaagcttcttttgaaaaagctgatcaagagttaaaggagagaaacatcgaatacgctaacaatgtgagagagttatccgaaagacaaatgaatttagctatgggacaattacctgaggatgctaaggacattattgcgaaaagcgcctctaatacagatacaacaaccaaagaagccacatcaagaggaaatgttcacgaagacactgtatccaaatttgtcgaaactactgttgagaattcaaacttgaatgttaatcgggttaaagacgatgaagaaaagacagaaagaaccgaaagtgacgtatttgatagagacgttccaactttgggatctcaaagcgatagtgaaaatgccaatacaaacaacggcacccagtcaggaaatgagacagcaaatccaaacttaactgaaacattaagtgataggtttgatggtgatttgaatgaatatggtattccaagaagtcaatccttgacatcgtctgttgcaaacaatgctcctcaatccgtaagagatgatgttgagctaccggaaacgttggaagaacgtgacaccatcaataatactgcgaatagagataatactggaaacttatctcacattcctggtgaatgggaagctaccccagctaccgcttctactgatgttttgagcaacgaaactacagaagttattgaagacggaagtaccacaaaaagggctaattcaaatgaagacggtgagtcggtcagttctatccaagaatctccaaaaatctctgctcaaccaaaagcaaagacaataaatgaagagtttccaccaattcaggaattgcatattgacgaaagcgattcatcctcttcagacgatgatgagtttgaagataccagagaaattccatcagcaacagtgaagacccttcaaactccctataatgcccagcccacatcaagtttggaaatccacacggaacaagtcataaaatatcccgctccaggcacttctccttcacataatgaaggtaactcaaaaaaggcaagcaccaattccattttgcctgttaaggacgaatttgatgatgaattcgcagggttagaacaagcggctgtggaggaagataatggtgctgattcggaatctgaatttgagaatgttgcgaatgctgggtcgatggagcaatttgaaaccatagaccataaggatctcgatgacgaactacaaatgaacgcttttacagggacgttaactagttcctctaacccaactatcccaaaaccacaagtacaacaacagtcaaccagtgaccctgctcaagtaagcaacgatgagtgggacgagatttttgctggatttggtaactccaaagctgaaccaaccaaagtagctaccccaagcattccacaacaaccaattccattgaagaatgatcctatcgttgatgctagcttgtcaaaaggtccaatagttaaccgcggggttgcaactactccaaagtctctagccgtcgaggagttaagtggcatgggatttactgaagaagaagcgcacaatgccttggaaaagtgcaactgggatctagaagccgccactaactttttgttggatagtgcttag

SEQ ID NO: 304 - DNA, 4146 bp, Artificial Sequence
  Description of Artificial Sequence: Synthetic polynucleotide
atggcatctattacttttagaactccattatcctctcaggaacaagccttttataatcagaaatttcaccaattggatacggaagatctcggggtggtcactggcgaggcagtcagaccgctcttcgcgtcttctggtcttccagggcaattattatctcaagtgtgggctaccgtcgatatagacaataaagggtttttgaacttgaacgagttttctgctgctttgagaatgatcgctcaattgcaaaatgctcccaaccaaccaatttccgctgccttatatgagagcacacctactcaattggcttctttttctataaatcagaacccagcccctatgcaaagcggtagtgcaaccggcaatacaaacaacactgatattcctgccttatcctctaatgatattgctaaattttctcaattatttgataggacagcaaagggtgctcaaactgttgctggtgataaagccaaggatatatttttaaaggcaagattaccaaatcaaactttaggtgaaatttgggctctttgtgatagagacgcatccggtgtcttagacaaatctgagtttataatggccatgtatttgatccaattatgtatgtctcatcatcctagtatgaacacaccaccggccgtgttgcctactcagttatgggattctattcgtttagaacctgttgttgttaatcaaccaaacaggactactcctttgagtgctaactccactggcgtatcttctttaacaagacactctactatatctcgtttatctactggtgcattcagtaatgctgcttctgattggtctttaagttttgaaaaaaaacaacagtttgatgcaatttttgattctttagataagcaacatgctggttctttaagctctgctgtgttggttccattcttcttatcctctagattaaaccaagagacgttagccaccatctgggacttagctgacatccacaacaatgctgaattcaccaaattggaatttgctattgccatgttcttaattcaaaaaaagaatgctggtgtcgaattaccggatgttatccccaatgaattattacagtcccccgctttaggactttatccgccaaacccacttcctcaacaacaaagtgcacctcaaattgccatccccagtagagcaagtaagccttctttacaggatatgccacaccaagtttctgccccagcagttaatactcaaccaacagttccacaagttcttcctcaaaacagtaataacggttctttgaatgatttattagctttgaacccttctttcagctctccttctcccactaaagcacaaactgtggttcaaaacaacacaaataatagtttttcttatgataataacaatggccaagcaacattacaacaacaacagccacagcagcctccacctttaactcactcctcctctggattgaagaaatttactcccaccagtaacttcggtcaaagtataatcaaggaagaaccagaggaacaagagcaattaagggaatccagtgatacttttagcgctcagcctccgccagttccaaaacatgcttccagtccagtcaaacgtacagcttctacaacattaccacaagttcccaacttttctgtgtttagcatgccagcaggcgctgccactagcgctgccactggtgctgctgtaggcgccgcagtgggtgctgctgctttaggcgcatccgctttttccagatcttccaataatgcattcaagaaccaggatttatttgcagatggtgaagcttctgctcagttatctaatgctaccacagaaatggctaatttatctaaccaagtaaactccttgtccaagcaggcaagtataactaatgacaaaaagtctagagcgacccaggagttgaaacgtgttactgagatgaaaaattccattcaaatcaaattgaacaatttacgttctacccatgaccaaaatgttaaacaaacggaacaattggaagcacaagtacttcaagtaaacaaagaaaacgaaacattagcgcaacagttggctgtatccgaagcaaactaccatgccgctgagtccaaactcaatgaattgactactgatttgcaagaatctcaaacaaagaacgcagaattaaaagaacaaattacgaatttgaactccatgacagcctccttacagtctcaattaaatgaaaaacaacaacaggtcaagcaagaaaggtctatggtagatgttaattctaaacagttggagttgaatcaagtcacagtagcaaacttgcagaaggaaatcgatggtcttggcgaaaagataagcgtttacttaactaaacaaaaggagttaaatgactaccaaaagaccgtggaggagcaacacgcacaattacaagctaaataccaggatttatccaacaaggatactgatttaacggaccgtgaaaaacaattggaagaacgtaacagacaaattgaagaacaagaaaatctctaccatcagcacgtttctaaattgcaagaaatgttcgacgatttatctcagagaaaagcttcttttgaaaaagctgatcaagagttaaaggagagaaacatcgaatacgctaacaatgtgagagagttatccgaaagacaaatgaatttagctatgggacaattacctgaggatgctaaggacattattgcgaaaagcgcctctaatacagatacaacaaccaaagaagccacatctagaggaaatgttcacgaagacactgtatccaaatttgtcgaaactactgttgagaatagcaacttgaatgttaatagagttaaagacgatgaagaaaagacagaaagaaccgaaagtgacgtatttgatagagacgttccaactttgggatctcaaagcgatagtgaaaatgccaatacaaacaacggcacccagtccggaaatgagacagcaaatccaaacttaactgaaacattaagtgataggtttgatggtgatttgaatgaatatggtattccaagaagtcaatccttgacatcttctgttgcaaacaatgctcctcaatccgtaagagatgatgttgagttaccggaaacgttggaagaacgtgacaccatcaataatactgcgaatagagataatactggaaacttatctcacattcctggtgaatgggaagctaccccagctaccgcttctactgatgttttgagcaacgaaactacagaagttattgaagacggaagtaccacaaaaagggctaatagtaatgaagacggtgagtctgtcagttctatccaagaatctccaaaaatctctgctcaaccaaaagcaaagacaataaatgaagagtttccaccaattcaggaattgcatattgacgaaagcgattcttcctcttctgacgatgatgagtttgaagataccagagaaattccatctgcaacagtgaagacccttcaaactccctataatgcccagcccacatctagtttggaaatccacacggaacaagtcataaaatatcccgctccaggcacttctccttctcataatgaaggtaactccaaaaaggcaagcaccaattccattttgcctgttaaggacgaatttgatgatgaattcgcagggttagaacaagcggctgtggaggaagataatggtgctgattctgaatctgaatttgagaatgttgcgaatgctgggtccatggagcaatttgaaaccatagaccataaggatctcgatgacgaattacaaatgaacgcttttacagggacgttaactagttcctctaacccaactatcccaaaaccacaagtacaacaacagtctaccagtgaccctgctcaagtaagcaacgatgagtgggacgagatttttgctggatttggtaactccaaagctgaaccaaccaaagtagctaccccaagcattccacaacaaccaattccattgaagaatgatcctatcgttgatgctagcttgagtaaaggtccaatagttaaccgcggggttgcaactactccaaagtctttggccgtcgaggagttaagtggcatgggatttactgaagaagaagcgcacaatgccttggaaaagtgcaactgggatttggaagccgccactaactttttgttggatagtgcttga

SEQ ID NO: 305 - DNA, 1326 bp, Saccharomyces cerevisiae
atgagctcgacgatgttggatgatgtggataataatatgatgggtatcaagtctatcagcctttatgaattacttagcgatgtggtgaaacagggcgacaagacgcgattggtgacggcgggtcccgagcaagttttgcctgatttaatccggcatatcactgaaacaataccgtttgacctatttataaaccttaagaatgaaatgaacgatgcgagaaatctcgttactagattaaattggctgggtaagtttctgaatgataattttttacaaaatcatacatttccattcacaatacttcggatatgcgaattgtgttatgatcctttcaaatattacaagatcaatgaattggagaagtttgtaaatgcgctagaaaaatgttgcatggtaactagcagttggcaggtttttgataaaacacacggtgagaagcaagaggacgataaggagaaagatattaacttcatcaagaatcaagaagatgtctcactaatgaagataccgtggatgaccgaaaacaatactagggagttggcaccctttattagagaaatcgactctataatgagtgtcaacctaggctacgatgacgaggatgaagaggaaggattttttgatggtgatgaagatagggagatggggaataagagtaagcgtaatgttttgctgaaagatgaaaatttcatggtggaagaatactatgaggatgattgcgggataaacgatgataatagcgataataaaggacaaaattgtcagagcgatgttacgaagaataatagcgatgatgaagatgacgatgacaacgacgacgattatcgtgaagatggtgcagatgaagatgatgaggatgatgatcacatgggcagcacagatgacgatgaagatgatgacgaagataggcaggcgggcgaaagtaccaaggtgcaaaattttgacaagaaaaatgaaactccaaggaagaggaagcccacagatttagataactttgaatatgacgaatcaccatcattcacaaacatggatctcacgacgccaaagaaatataaacataccgcaacgggcaggttctccataatagagtcgccatcgtcttcgctcctcaatgccatggacggcagtaatgagatctcatcgagccaggaggaggagaaagaggatgctcatgaaaaccatgagggtagaagtgaaggactgttaccaggtgacgaattagtgagtccatcgatgagctcttcacaagaggataagatggttgcgattgctggtattacctaccgtgagaatattagcagtccattaggcaagaagtccagatga

SEQ ID NO: 306 - DNA, 1326 bp, Artificial Sequence
  Description of Artificial Sequence: Synthetic polynucleotide
atgagctctacgatgttggatgatgtggataataatatgatgggtatcaagtctatcagcctttatgaattacttagcgatgtggtgaaacagggcgacaagacgagattggtgacggcgggtcccgagcaagttttgcctgatttaatcaggcatatcactgaaacaataccgtttgacttatttataaaccttaagaatgaaatgaacgatgcgagaaatctcgttactagattaaattggttaggtaagtttttgaatgataattttttacaaaatcatacatttccattcacaatacttagaatatgcgaattgtgttatgatcctttcaaatattacaagatcaatgaattggagaagtttgtaaatgcgttagaaaaatgttgcatggtaactagcagttggcaggtttttgataaaacacacggtgagaagcaagaggacgataaggagaaagatattaacttcatcaagaatcaagaagatgtctctttgatgaagataccgtggatgaccgaaaacaatactagggagttggcaccctttattagagaaatcgactctataatgagtgtcaacttgggctacgatgacgaggatgaagaggaaggattttttgatggtgatgaagatagggagatggggaataagagtaagcgtaatgttttgttgaaagatgaaaatttcatggtggaagaatactatgaggatgattgcgggataaacgatgataatagcgataataaaggacaaaattgtcagagcgatgttacgaagaataatagcgatgatgaagatgacgatgacaacgacgacgattatcgtgaagatggtgcagatgaagatgatgaggatgatgatcacatgggcagcacagatgacgatgaagatgatgacgaagataggcaggcgggcgaaagtaccaaggtgcaaaattttgacaagaaaaatgaaactccaaggaagaggaagcccacagatttagataactttgaatatgacgaatctccatctttcacaaacatggatctcacgacgccaaagaaatataaacataccgcaacgggcaggttctccataatagagtctccatcttcttctctcctcaatgccatggacggcagtaatgagatctcttctagccaggaggaggagaaagaggatgctcatgaaaaccatgagggtagaagtgaaggattattaccaggtgacgaattagtgagtccaagcatgagctcttctcaagaggataagatggttgcgattgctggtattacctaccgtgagaatattagcagtccattaggcaagaagtccagatga

SEQ ID NO: 307 - DNA, 1374 bp, Saccharomyces cerevisiae
atgctaagaacagtaacttcaaagactgtatctaaccagttcaagaggtctttggctacagctgtagcaacccccaaggccgaagtaacgcaattatctaacggtatagttgtagccactgagcataatccttccgctcacacagcctctgtcggtgttgtcttcggctccggtgctgccaacgaaaacccttataacaacggggtttccaatttatggaagaacatctttctatccaaagaaaactctgctgttgccgccaaggaaggtttggcattgtcttccaatatctccagagacttccaatcttacattgtatcttctttgccaggttctaccgataaatcactagacttcttgaatcagtctttcatccaacaaaaggctaatttgctatcttcttctaacttcgaggccacgaagaaatctgtcttgaagcaagttcaagattttgaagaaaacgaccatcccaacagagttttggaacatttacactccaccgccttccaaaacactccattatctttgcctactagaggtactttggagtccttggagaatttagttgttgctgatctggaatcttttgccaataaccatttcttgaattcaaatgctgttgttgttggtaccggtaatatcaaacatgaggatttagtaaattccatcgaatccaaaaacctaagtttgcaaaccggtaccaagcccgtactcaagaaaaaggccgctttcttgggttccgaagttagattgagagacgacaccttgccaaaggcgtggatttcgctggctgtggaaggtgaacctgtcaattcaccaaattattttgttgctaaattagccgcccaaattttcggctcatacaacgccttcgaacccgcttctagattacaaggtatcaaattgttagacaacatacaggagtaccaattatgcgacaatttcaatcatttctctctttcttacaaagattccggtttatgggggttctctacggccacgagaaacgttaccatgattgacgacctcatccatttcactttgaaacaatggaacagattgaccatttctgtcactgatactgaagttgaacgtgccaaatcgctgttgaaattacaattagggcagttatacgaatctggtaatcccgtcaatgacgctaacttgttaggcgcagaagtcctaatcaagggctccaaactgtctctgggtgaggctttcaagaaaattgatgcaatcacagtcaaagatgttaaggcttgggccggtaagagattatgggaccaagatattgctattgctggtacaggccaaattgaagggttattagattacatgagaatcagaagtgacatgtccatgatgagatggtaa

SEQ ID NO: 308 - DNA, 1374 bp, Artificial Sequence
  Description of Artificial Sequence: Synthetic polynucleotide
atgttgagaacagtaacttctaagactgtatctaaccagttcaagaggtctttggctacagctgtagcaacccccaaggccgaagtaacgcaattatctaacggtatagttgtagccactgagcataatccttccgctcacacagcctctgtcggtgttgtcttcggctccggtgctgccaacgaaaacccttataacaacggggtttccaatttatggaagaacatctttctttccaaagaaaactctgctgttgccgccaaggaaggtttggcattgtcttccaatatctccagagacttccaatcttacattgtatcttctttgccaggttctaccgataaatctttggacttcttgaatcagtctttcatccaacaaaaggctaatttgttatcttcttctaacttcgaggccacgaagaaatctgtcttgaagcaagttcaagattttgaagaaaacgaccatcccaacagagttttggaacatttacactccaccgccttccaaaacactccattatctttgcctactagaggtactttggagtccttggagaatttagttgttgctgatttggaatcttttgccaataaccatttcttgaatagtaatgctgttgttgttggtaccggtaatatcaaacatgaggatttagtaaattccatcgaatccaaaaacttgagtttgcaaaccggtaccaagcccgtactcaagaaaaaggccgctttcttgggttccgaagttagattgagagacgacaccttgccaaaggcgtggatttctttggctgtggaaggtgaacctgtcaattctccaaattattttgttgctaaattagccgcccaaattttcggctcttacaacgccttcgaacccgcttctagattacaaggtatcaaattgttagacaacatacaggagtaccaattatgcgacaatttcaatcatttctctctttcttacaaagattccggtttatgggggttctctacggccacgagaaacgttaccatgattgacgacctcatccatttcactttgaaacaatggaacagattgaccatttctgtcactgatactgaagttgaacgtgccaaatctttgttgaaattacaattagggcagttatacgaatctggtaatcccgtcaatgacgctaacttgttaggcgcagaagtcttgatcaagggctccaaattatctttgggtgaggctttcaagaaaattgatgcaatcacagtcaaagatgttaaggcttgggccggtaagagattatgggaccaagatattgctattgctggtacaggccaaattgaagggttattagattacatgagaatcagaagtgacatgtccatgatgagatggtga

SEQ ID NO: 309 - DNA, 369 bp, Saccharomyces cerevisiae
atgggtgaaatgctagagaggcaaaaaaaaaggttgccaagtaaagcgaagtatttgaagtatactgcaagcatcaccgaaacaggaaatcacgaagctgactcatctgtgattttccgtccccaccatagtgatgtaacatgcagtaacgcacggcgggccgaaagtcggactttaccccagatttgtagttgtatcctattggatcacgggcgacggacaagacccgaagtgcggaccggcatggtcagcttgcacggaagctttaagggtttcccttgtttcggcattagaagaggcatttcgcacgttttaccgggtcagaaacttcgaggaagctgtgacaattggaaaaaaaggcaaaactaa

SEQ ID NO: 310 - DNA, 369 bp, Artificial Sequence
  Description of Artificial Sequence: Synthetic polynucleotide
atgggtgaaatgttagagaggcaaaaaaaaaggttgccaagtaaagcgaagtatttgaagtatactgcaagcatcaccgaaacaggaaatcacgaagctgactcttctgtgattttccgtccccaccatagtgatgtaacatgcagtaacgcaagaagagccgaaagtagaactttaccccagatttgtagttgtatcttgttggatcacgggcgtagaacaagacccgaagtgagaaccggcatggtcagcttgcacggaagctttaagggtttcccttgtttcggcattagaagaggcatttctcacgttttaccgggtcagaaacttagaggaagctgtgacaattggaaaaaaaggcaaaactga

SEQ ID NO: 311 - DNA, 774 bp, Saccharomyces cerevisiae
atgaactctacaaccccatcgattcaagatcaatatattttggccagcaaagtacgctccaagctggcaaaatgcgttagcgtgactactaaaaacaaagactacaacctgagagttttagtcgggcacgcaaacttgctggataagattacagaaaatgtggaaactcataatgctgcaaccaacgcccttgccggagaccctttcagtaaaggacctgaaaacttgtccatcgaacatatcgaattgtccaatgctaatgctagtaaaaatgacgtcggtaaggaggaaaatgcagaaaagacgatagaaagtgaagattactgtgatttttactctagtgacgaagatccagatgctgacactctatcttctactgacagtgaagacgatgatgattatgaagactatgattttgagtacgattactctggcggtgattataacaagaaaattgacatgtactttagttttcacaccgcacctaattatcaatatttgactcacacaaactctcattccgagcagacggatgaacttgccgaatcaacgccgcgctacaatgctcttcccgccactgcctctacgacagaggaagaacaggacactgaaacgctcgatgctgtgagtttgcatagttcagcgccaatcttccgtgtgctctctcggcgggtaaatggacaagaagatgacagcgaaaacgagagtagtagcgatgtcgacgatggttccgtaccattaacgagatttcattcttgtcctatcacagcataa

SEQ ID NO: 312 - DNA, 774 bp, Artificial Sequence
  Description of Artificial Sequence: Synthetic polynucleotide
atgaactctacaaccccatctattcaagatcaatatattttggccagcaaagtacgctccaagttagcaaaatgcgttagcgtgactactaaaaacaaagactacaacttgagagttttagtcgggcacgcaaacttgttggataagattacagaaaatgtggaaactcataatgctgcaaccaacgcccttgccggagaccctttcagtaaaggacctgaaaacttgtccatcgaacatatcgaattgtccaatgctaatgctagtaaaaatgacgtcggtaaggaggaaaatgcagaaaagacgatagaaagtgaagattactgtgatttttactctagtgacgaagatccagatgctgacactttatcttctactgacagtgaagacgatgatgattatgaagactatgattttgagtacgattactctggcggtgattataacaagaaaattgacatgtactttagttttcacaccgcacctaattatcaatatttgactcacacaaactctcattccgagcagacggatgaacttgccgaaagtacgccgcgctacaatgctcttcccgccactgcctctacgacagaggaagaacaggacactgaaacgctcgatgctgtgagtttgcatagttctgcgccaatcttccgtgtgctctctagaagagtaaatggacaagaagatgacagcgaaaacgagagtagtagcgatgtcgacgatggttccgtaccattaacgagatttcattcttgtcctatcacagcatga

SEQ ID NO: 313 - DNA, 1920 bp, Saccharomyces cerevisiae
atgccggtatctgattctggattcgataattcttcaaaaacaatgaaggacgacactataccgacggaggattacgaagaaatcacgaaagagtccgagatgggtgatgcgactaaaattacttctaagattgatgctaatgtcattgaaaaaaaagataccgattcagaaaacaatataaccattgctcaggatgacgaaaaggtgtcttggctgcaaagagttgtcgagttttttgaggttaagaatgactctaccgatttggccgatcataagcccgaaaatccaattaggacatttaaagatttacaggagtccctccgttcgacgtacttgtacaacacagatctgcggcccgtggaggcaaaaagaagaacgtggacatggaagcagtacattttcttttggatttctgggtcctttaacgtcaatacatggcaaatctcagccactgggctacagttagggcttaactggtggcagacttggatctgtatttgggttggatacacgtttgtcgcatttttcttgatactgggttccaaagtggggaacaattaccatatctctttccccatttcctcaagagtatcatttggtatctacttctccatctggattgtcatcaaccgtgtcgtcatggcatgtgtctggaattctactttggcttatatcggtagtcaatgtgttcagttgatgctaaaggctatcttcggtactaatttgaatactagaatcaaagacaccataaagaaccccaatttgacgaacttcgagttcatgtgcttcatggtcttctgggtcgcatgtttaccgttcctatggtttccacctgacaaattgcgtcatatatttgcactcaaatccgccatcactccatttgcggccttcggttttttgatttggactctttgtaaggccaaaggtcatttggcattgggttccctaaatgacaatggtggcgcaatcagcaagacggttttagcatggtctgtcattagagctattatgagtgctctggataacttctctactttaatcctaaacgctcctgacttcactagattcggtaagacctacaagtcatctgtttactcgcaattgattgcgctacccgtctgctatgccattatttccttaatcggaatattgtctgtctccgcagcttatacattgtacggagtaaattattggagtcccctagacattctgaacaggtacttggataactatacttcggggaacagagccggtgtattcttaatatctttcatttttgcgtttgaccagctgggtgccaacttgtctggtaactcgatccctgcaggtaccgatctgactgcattattgcctaaattcatcaatatcagacgcggttcttatatttgtgctctaatatcgttggcgatttgcccctgggatttattatcatcatcgtcaaagtttactacggcactagcggcatatgcagttttcttaagtgctattgcgggtgtaatatcagccgattacttcattgtcagaaagggttacgttaatattttccattgctacaccgacaagccaggatcgtactacatgtacaataaatatggtacgaactggagggcggtggtagcttatatatttggtattgctcctaattttgcaggctttttaggttcagtgggagtttctgtgcctattggcgctatgaaagtttactacctaaactatttcgttggttatctccttgcagcattgagttactgcattttagtgtatttttacccaattaagggtattccaggcgatgccaagataactgaccgtaaatggctcgaagagtgggtcgaagtagaagaattcggaactgaaagagaagcttttgaagaatatggcggcgtttccactggctatgaaaagatacgatatatctaa

SEQ ID NO: 314 - DNA, 1920 bp, Artificial Sequence
  Description of Artificial Sequence: Synthetic polynucleotide
atgccggtatctgattctggattcgataattcttctaaaacaatgaaggacgacactataccgacggaggattacgaagaaatcacgaaagagtccgagatgggtgatgcgactaaaattacttctaagattgatgctaatgtcattgaaaaaaaagataccgattctgaaaacaatataaccattgctcaggatgacgaaaaggtgtcttggttacaaagagttgtcgagttttttgaggttaagaatgactctaccgatttggccgatcataagcccgaaaatccaattaggacatttaaagatttacaggagtccctccgttctacgtacttgtacaacacagatttaagacccgtggaggcaaaaagaagaacgtggacatggaagcagtacattttcttttggatttctgggtcctttaacgtcaatacatggcaaatcagtgccactgggttgcagttagggcttaactggtggcagacttggatctgtatttgggttggatacacgtttgtcgcatttttcttgatattaggttccaaagtggggaacaattaccatatctctttccccatttccagcagagtatcctttggtatctacttctccatctggattgtcatcaaccgtgtcgtcatggcatgtgtctggaattctactttggcttatatcggtagtcaatgtgttcagttgatgttgaaggctatcttcggtactaatttgaatactagaatcaaagacaccataaagaaccccaatttgacgaacttcgagttcatgtgcttcatggtcttctgggtcgcatgtttaccgttcttatggtttccacctgacaaattgcgtcatatatttgcactcaaatccgccatcactccatttgcggccttcggttttttgatttggactctttgtaaggccaaaggtcatttggcattgggttccttgaatgacaatggtggcgcaatcagcaagacggttttagcatggtctgtcattagagctattatgagtgctttagataacttctctactttaatcttgaacgctcctgacttcactagattcggtaagacctacaagtcttctgtttactctcaattgattgcgttgcccgtctgctatgccattatttccttaatcggaatattgtctgtctccgcagcttatacattgtacggagtaaattattggagtcccttagacattttgaacaggtacttggataactatacttctgggaacagagccggtgtattcttaatatctttcatttttgcgtttgaccagttgggtgccaacttgtctggtaactctatccctgcaggtaccgatttgactgcattattgcctaaattcatcaatatcagacgcggttcttatatttgtgctttaatatctttggcgatttgcccctgggatttattatcttcttcttccaagtttactacggcattagcggcatatgcagttttcttaagtgctattgcgggtgtaatatctgccgattacttcattgtcagaaagggttacgttaatattttccattgctacaccgacaagccaggatcttactacatgtacaataaatatggtacgaactggagggcggtggtagcttatatatttggtattgctcctaattttgcaggctttttaggttctgtgggagtttctgtgcctattggcgctatgaaagtttactacttgaactatttcgttggttatctccttgcagcattgagttactgcattttagtgtatttttacccaattaagggtattccaggcgatgccaagataactgaccgtaaatggctcgaagagtgggtcgaagtagaagaattcggaactgaaagagaagcttttgaagaatatggcggcgtttccactggctatgaaaagataagatatatctga

SEQ ID NO: 315 - DNA, 726 bp, Saccharomyces cerevisiae
atggccactattgcatcagaatactcttcggaggcgtcaaatacacccattgaacatcaattcaatccttacggtgataatggtggtacaatcctgggcattgcaggtgaagatttcgcagtgttagcaggcgatacaagaaatatcaccgattactcaattaattctcgttatgaacccaaggtttttgattgtggtgataacatagtcatgtcggcgaatggatttgcagcagacggcgacgctttagtaaaaagattcaaaaatagtgtaaaatggtaccatttcgaccacaacgacaaaaaactatctataaactctgcagcaaggaacattcaacatcttctgtacgggaagaggtttttcccttactacgttcatacgatcattgcgggtcttgacgaagatggtaagggcgctgtctattcgttcgacccagttggctcctacgaaagagaacagtgtagagcaggtggtgctgcggcatcattgatcatgccatttttggacaatcaggttaatttcaaaaatcaatatgagccaggtacaaacggtaaagtcaaaaagcctttgaaatacttgtccgtggaagaagtcatcaaactggtgagagactcgttcacttctgctacagaaagacatatacaagtgggtgatgggctggaaatccttattgtcaccaaggatggtgtaaggaaagaattttatgagctaaaaagagattaa

SEQ ID NO: 316 - DNA, 726 bp, Artificial Sequence
  Description of Artificial Sequence: Synthetic polynucleotide
atggccactattgcatctgaatactcttctgaggcgtctaatacacccattgaacatcaattcaatccttacggtgataatggtggtacaatcttgggcattgcaggtgaagatttcgcagtgttagcaggcgatacaagaaatatcaccgattactctattaattctcgttatgaacccaaggtttttgattgtggtgataacatagtcatgagtgcgaatggatttgcagcagacggcgacgctttagtaaaaagattcaaaaatagtgtaaaatggtaccatttcgaccacaacgacaaaaaattatctataaactctgcagcaaggaacattcaacatcttttatacgggaagaggtttttcccttactacgttcatacgatcattgcgggtcttgacgaagatggtaagggcgctgtctattctttcgacccagttggctcctacgaaagagaacagtgtagagcaggtggtgctgcggcaagtttgatcatgccatttttggacaatcaggttaatttcaaaaatcaatatgagccaggtacaaacggtaaagtcaaaaagcctttgaaatacttgtccgtggaagaagtcatcaaattagtgagagactctttcacttctgctacagaaagacatatacaagtgggtgatgggttggaaatccttattgtcaccaaggatggtgtaaggaaagaattttatgagttgaaaagagattga

SEQ ID NO: 317 - DNA, 660 bp, Saccharomyces cerevisiae
atgaatccgtttagaatcttaggtgatttatcacatctaaccagtatactgatcctgattcataatatcaagaccacaaggtacattgaaggtatttctttcaagacccaaacgttgtacgctttggttttcataacacgatacttggatctcttgacttttcactgggtatccctatacaatgctctaatgaaaatatttttcattgtatctaccgcttacattgtagtgctattacaagggtctaaaagaaccaacaccattgcgtataatgaaatgcttatgcatgatacctttaagatccagcatttactaattgggagtgctctaatgagtgtttttttccatcacaagttcacttttcttgaattagcatggagtttttctgtatggttggagagtgtggctattctacctcaattgtacatgctatctaagggtgggaagactagaagtctaactgttcattatatttttgccatgggattatacagagcattgtatattcctaactggatttggaggtacagcacggaagataaaaaattggacaagattgccttcttcgcgggacttttgcaaactctgttgtactctgatttcttttacatttactacactaaagtcatcagaggaaagggtttcaaactgccaaaataa

SEQ ID NO: 318 - DNA, 660 bp, Artificial Sequence
  Description of Artificial Sequence: Synthetic polynucleotide
atgaatccgtttagaatcttaggtgatttatctcatttgaccagtatattgatcttgattcataatatcaagaccacaaggtacattgaaggtatttctttcaagacccaaacgttgtacgctttggttttcataacaagatacttggatctcttgacttttcactgggtatccttgtacaatgctttgatgaaaatatttttcattgtatctaccgcttacattgtagtgttattacaagggtctaaaagaaccaacaccattgcgtataatgaaatgcttatgcatgatacctttaagatccagcatttattgattgggagtgctttgatgagtgtttttttccatcacaagttcacttttcttgaattagcatggagtttttctgtatggttggagagtgtggctattttacctcaattgtacatgctttctaagggtgggaagactagaagtttgactgttcattatatttttgccatgggattatacagagcattgtatattcctaactggatttggaggtacagcacggaagataaaaaattggacaagattgccttcttcgcgggacttttgcaaactttattgtactctgatttcttttacatttactacactaaagtcatcagaggaaagggtttcaaattaccaaaatga

SEQ ID NO: 319 - DNA, 180 bp, Saccharomyces cerevisiae
atgggcttttttaacaataatccggtaattgaattcttccacagaataacgagaaaacccagtaccattgcgatgtgggtgtttgctggtctgatttgttcaagtacattttatttaatgttcatgtcatcacctacaatcgacttcaactcgaagagtaagaaaaaaaatgataaataa

SEQ ID NO: 320 - DNA, 180 bp, Artificial Sequence
  Description of Artificial Sequence: Synthetic polynucleotide
atgggcttttttaacaataatccggtaattgaattcttccacagaataacgagaaaacccagtaccattgcgatgtgggtgtttgctggtttgatttgtagtagtacattttatttaatgttcatgtcttctcctacaatcgacttcaactccaagagtaagaaaaaaaatgataaatga

SEQ ID NO: 321 - DNA, 1740 bp, Saccharomyces cerevisiae
atgaagtacgttgttgtttcaggtggtgtcatttcgggtatcggtaaaggtgttcttgcatcttcaactggtatgctaatgaaaaccctcggtttaaaggttacgtcaattaaaattgacccttatatgaacattgatgcaggtactatgtctcctttggaacatggtgaatgtttcgtgcttgacgacggtggtgaaacagatttggacttgggtaactacgagagataccttggagttactttgactaaagatcataacattactactggtaaaatatactcgcacgttattgctaaggaaagaaaaggtgactatttaggcaaaaccgtgcaaattgtccctcatttgaccaacgctatccaagattggattgagcgcgtggccaaaattcctgtagatgacaccggtatggaaccagatgtttgtatcattgaattgggtgggacagttggtgacattgaaagtgctccttttgtggaggcactaagacaattccaatttaaagttggaaaggaaaattttgccttgatacacgtttctctagttcctgtcatccacggtgaacaaaaaactaagccaactcaagctgccatcaaaggtttgaggtctcttggtttagttccagatatgatcgcctgtagatgtagtgaaactttggataaaccaacaatcgataagattgccatgttttgtcatgtggggcctgaacaggtggttaacgttcacgatgttaattctacttatcacgtcccattgttgctactggaacaaaagatgattgattacttacacgccagattaaagttagatgaaatatcacttacagaagaagaaaaacaaagaggcctggaattattgtctaaatggaaggccacaacaggtaacttcgatgaatccatggaaacagtgaagattgctttggttgggaaatacaccaacttgaaagattcttatctatcagtgataaaagcattggaacattcatccatgaagtgtcgtcgtaagttagacattaaatgggtggaagctactgatttggaacctgaagcacaagaaagcaacaaaactaaatttcatgaagcatggaacatggtcagtaccgcagacggtatcttaatccccggtggttttggtgttagaggtactgaaggtatggttttggctgctagatgggctcgtgaaaatcacattccattcttaggggtttgcctgggtttacaaattgccaccattgaatttacacgtagtgtgttgggaagaaaagacagtcattcggcagaattttatccagacattgatgaaaaaaatcacgttgtcgttttcatgcctgaaattgacaaggaaaccatggggggctcaatgagattaggtttgagaccaacatttttccaaaatgaaactgaatggagtcaaatcaagaagttatacggtgacgtctccgaagtccatgaaagacaccgtcaccgttacgaaatcaatccaaagatggttgatgaattggaaaacaacgggttgatctttgtaggtaaggacgacactggaaagcgttgtgagattttggaattaaagaatcacccatactatattgctactcaatatcacccagaatacacatcaaaggtcttagatccatccaaaccatttttgggtttagttgctgcttccgctggtatccttcaagatgtcattgaaggtaagtacgatcttgaggccggcgaaaacaaattcaacttttaa

SEQ ID NO: 322 - DNA, 1740 bp, Artificial Sequence
  Description of Artificial Sequence: Synthetic polynucleotide
atgaagtacgttgttgtttctggtggtgtcatttctggtatcggtaaaggtgttcttgcatcttctactggtatgttaatgaaaaccctcggtttaaaggttacgtccattaaaattgacccttatatgaacattgatgcaggtactatgtctcctttggaacatggtgaatgtttcgtgcttgacgacggtggtgaaacagatttggacttgggtaactacgagagataccttggagttactttgactaaagatcataacattactactggtaaaatatactctcacgttattgctaaggaaagaaaaggtgactatttaggcaaaaccgtgcaaattgtccctcatttgaccaacgctatccaagattggattgagcgcgtggccaaaattcctgtagatgacaccggtatggaaccagatgtttgtatcattgaattgggtgggacagttggtgacattgaaagtgctccttttgtggaggcattgagacaattccaatttaaagttggaaaggaaaattttgccttgatacacgtttctttggttcctgtcatccacggtgaacaaaaaactaagccaactcaagctgccatcaaaggtttgaggtctcttggtttagttccagatatgatcgcctgtagatgtagtgaaactttggataaaccaacaatcgataagattgccatgttttgtcatgtggggcctgaacaggtggttaacgttcacgatgttaattctacttatcacgtcccattgttgttgttggaacaaaagatgattgattacttacacgccagattaaagttagatgaaatatctcttacagaagaagaaaaacaaagaggccttgaattattgtctaaatggaaggccacaacaggtaacttcgatgaatccatggaaacagtgaagattgctttggttgggaaatacaccaacttgaaagattcttatttatctgtgataaaagcattggaacattcttccatgaagtgtcgtcgtaagttagacattaaatgggtggaagctactgatttggaacctgaagcacaagaaagcaacaaaactaaatttcatgaagcatggaacatggtcagtaccgcagacggtatcttaatccccggtggttttggtgttagaggtactgaaggtatggttttggctgctagatgggctcgtgaaaatcacattccattcttaggggtttgcttgggtttacaaattgccaccattgaatttacacgtagtgtgttgggaagaaaagacagtcattctgcagaattttatccagacattgatgaaaaaaatcacgttgtcgttttcatgcctgaaattgacaaggaaaccatggggggctctatgagattaggtttgagaccaacatttttccaaaatgaaactgaatggagtcaaatcaagaagttatacggtgacgtctccgaagtccatgaaagacaccgtcaccgttacgaaatcaatccaaagatggttgatgaattggaaaacaacgggttgatctttgtaggtaaggacgacactggaaagcgttgtgagattttggaattaaagaatcacccatactatattgctactcaatatcacccagaatacacatccaaggtcttagatccatccaaaccatttttgggtttagttgctgcttccgctggtatccttcaagatgtcattgaaggtaagtacgatcttgaggccggcgaaaacaaattcaacttttga

SEQ ID NO: 323 - DNA, 699 bp, Saccharomyces cerevisiae
atgttcccctatttaacaagaatgaatttatccataaagatgggagggctaactttaaaagaaagttcccccaatgcttttttaaataacaccactattgctaggagattcaagcatgaatatgccccacgtttcaaaatcgtacagaaaaagcaaaaaggtagagtgccagttcgtacaggtggttcaataaagggatccactttgcaatttggtaagtacggattacgactgaaaagcgaaggtattaggatatccgcgcaacagctgaaggaagcagataacgcaattatgagatatgtcaggcctttaaacaatggtcatttgtggaggcgtttgtgtacaaacgttgctgtatgtatcaagggtaacgaaacaagaatgggtaaaggtaaaggtgggtttgaccactggatggtgagggtacccacagggaagatccttttcgaaataaatggtgatgatttgcatgaaaaagtcgcacgggaagccttcagaaaagcaggcaccaagttacctggggtatatgaatttgtatccttggattctctggttagagttggattacatagtttcaaaaatcctaaagacgacccagtgaagaatttttacgatgaaaatgcaaagaagccatcaaagaagtatttgaatattttaaagtctcaagaaccacagtacaaactcttcagaggacgttga

SEQ ID NO: 324 - DNA, 699 bp, Artificial Sequence
  Description of Artificial Sequence: Synthetic polynucleotide
atgttcccctatttaacaagaatgaatttatccataaagatgggagggttgactttaaaagaaagttcccccaatgcttttttaaataacaccactattgctaggagattcaagcatgaatatgccccacgtttcaaaatcgtacagaaaaagcaaaaaggtagagtgccagttcgtacaggtggttccataaagggatccactttgcaatttggtaagtacggattaagattgaaaagcgaaggtattaggatatccgcgcaacagttgaaggaagcagataacgcaattatgagatatgtcaggcctttaaacaatggtcatttgtggaggcgtttgtgtacaaacgttgctgtatgtatcaagggtaacgaaacaagaatgggtaaaggtaaaggtgggtttgaccactggatggtgagggtacccacagggaagatccttttcgaaataaatggtgatgatttgcatgaaaaagtcgcaagagaagccttcagaaaagcaggcaccaagttacctggggtatatgaatttgtatccttggattctttggttagagttggattacatagtttcaaaaatcctaaagacgacccagtgaagaatttttacgatgaaaatgcaaagaagccatctaagaagtatttgaatattttaaagtctcaagaaccacagtacaaactcttcagaggacgttga

SEQ ID NO: 325 - DNA, 3078 bp, Saccharomyces cerevisiae
atggatcgcaaaaaaacacttataaactcaagtgtttctaataataacagtaccatcaagggcctacagttattcattgcagatcttcgttctgcacaacaagcacaagagcaggaaaagagaatacaatctgaaattgtcaaaattaaacagcatttcgatgctgcaaagaaaaaacaaggcaatcacgacagattaggtggctatcaaagaaagaagtacgttgccaagctagcctatatatatattacttctaatacgacaaaactaaatgaaattttattcgggttggagcaaacggtagagctgttgaagtccagcatattttctgaaaaattcattggatatatgacccttgagttgctttatgaacgtagtgaagttgttgccaaagttaacgatgaggtgaattatcaactgatgaaagatctctcttcttccgatgataatttcgtaatgttggcgctgaattttgttggtgtagtaggagaacttacgaaccgtctagcgtacaacgatgatatcacaacaggagtattcaagatattaagatcaccgacctcctccatttatctcaagaaaaaatcagcattgtcatttctagcactattgaaaagtaatcattctatactgaccgaagatttacaacgtaagcaactatggatacaaaggatattaagcttattggatgatacggaaaactataggttaactttagctacgattccgttaatagaattcattgcaaaatacattgatcccagttactgtacgagactattaccacagctaacagaaattttgtacaattgtgttgttgttggtacttcaagatctagtgacaatcagtttccgttagaatatacgttcgcgaatatgccaaatccttggcttatcacaaaagttgtctctttgttgagcatattgattgcctcaccaactgagagggattctggctcattactacaaaccaacaacatagataatgaattactaaataaacttcgaaagtgtgtttccgttgccatcgaattaggaaccagacaagctcaagatcccatggaacgtatcgtccaaaacacagtattgttttcattgatcaatttcgcctctaagctagatccgtcggatgaagctatcagcaattctgtgacagccttatgttccctgctaacatctaaggaaattaatattcggtatttaacgctagattcattggtcaaattatgctcatcaagcgggaaacctgcaattgatgccgttcgttacaagaatttggatatgatttttcatcttttgaacacagaaagagattcatctattgttaggaaggttgttgacttgttatatacctttactgatgttgaaaacgttaagattattgtggacggtttactgcagtatattttatctccgaaaaatcttgctgaaccgcaaataaaatctgatattgcagttaaaatagctattttgaccgagaaatatgccacggatatcaattggtttgtaattatttcgttgcagttgctatcattaacttcaaatacaactattaacgatgatgagatctggcaacgactatgtcaaattgtagtgaacaatccatctttacatagaataacatgtgaacggttggtggactatttatgtaaaaagcaagcatctgaagctattattaaagctgcggcttttctactaggggagtactcaagtctcataacagacaggatttcaagcgcaaatttatttactttgtttgccgagaaatattttagtgcaccaaatgtggctaaggcgatgatattgactacgatgatcaagttgtacaagacctcacctgagatcggctccaacgtcatcaaatttttccaattggaattgaactctcttgatattgagttgcaaacaagatccttcgaatatctcaacattattcaactggctaaggtgaacggaaatacagatattttgcaaattttatttgaaccaatgccgccttttaacagcaaatctaatccattattgaagagattagggtcactgccggcatcagcgggtagcacaactttaataaatacaccatccgaagcatcctcctccacgcctgacttactatcaaaaagagcaaactcttccaggtcgatcatggttcccatgcccccaccatctcgtaggaacaccattgatgatgtaaattccaaaattagttcatctgaagacttttcaggaaaggactcttattattcaaggcagatcctcgctccaaattggagggaaggtttcacaagaatgatttcgcataagcagggtgtgcttttcacatcatctttgatgaaagttttctatcggataaccactcctgatgcacaacagccatacgtgtttcatatatctcttgccttcattaacctgactgagtgggaaatcacgggattatccacacagattatcccttcaaaaacgcaaggtaatcctgagtatttaattatgaatattaatacaccttctactgctactattgggccccataaaagggcagagcaaagctatgaagtttcaataagaaaacctttcgacgttgaagatagtccaattttggcaattcatttcaaatgtggcggtagtacaaacactatcaatttgaaaactgccataggcatgactacaacactaattagcagcgatgtcaatcctagcatgcatttgaatttggcacagttcatcagccgttggaagactttgagcgatgctttgggaaaagagggagaataccaaaaatctggcataaagctcaacaaggattttagaaaagttgaaacaatcagtttagaagacggacttctactattgacgcaaacagtgaagaggttgggctttgatatagtcgatcagaccagtgttcgtagtacattgtttgtctcgggtattattcatacgaaaagtgagggaaacttcggttgtttaatgaagatacaataccaggtaaatggaacagttaatgttacctgtaaaacaacgacggccggtcccctggcgaagtacattgtcgaatgtataaagaatgtgcttacgaagtaa

SEQ ID NO: 326 - DNA, 3078 bp, Artificial Sequence
  Description of Artificial Sequence: Synthetic polynucleotide
atggatcgcaaaaaaacacttataaacagtagtgtttctaataataacagtaccatcaagggcttgcagttattcattgcagatcttcgttctgcacaacaagcacaagagcaggaaaagagaatacaatctgaaattgtcaaaattaaacagcatttcgatgctgcaaagaaaaaacaaggcaatcacgacagattaggtggctatcaaagaaagaagtacgttgccaagttggcctatatatatattacttctaatacgacaaaattgaatgaaattttattcgggttggagcaaacggtagagttattgaagtccagcatattttctgaaaaattcattggatatatgacccttgagttgctttatgaacgtagtgaagttgttgccaaagttaacgatgaggtgaattatcaattgatgaaagatctctcttcttccgatgataatttcgtaatgttggcgttgaattttgttggtgtagtaggagaacttacgaaccgtttggcgtacaacgatgatatcacaacaggagtattcaagatattaagatctccgacctcctccatttatctcaagaaaaaatctgcattgagttttttggcattattgaaaagtaatcattctatattgaccgaagatttacaacgtaagcaattatggatacaaaggatattaagcttattggatgatacggaaaactataggttaactttagctacgattccgttaatagaattcattgcaaaatacattgatcccagttactgtacgagattattaccacagttgacagaaattttgtacaattgtgttgttgttggtacttccagatctagtgacaatcagtttccgttagaatatacgttcgcgaatatgccaaatccttggcttatcacaaaagttgtctctttgttgagcatattgattgcctctccaactgagagggattctggctctttattacaaaccaacaacatagataatgaattattgaataaacttagaaagtgtgtttccgttgccatcgaattaggaaccagacaagctcaagatcccatggaacgtatcgtccaaaacacagtattgttttctttgatcaatttcgcctctaagttggatccgagtgatgaagctatcagcaattctgtgacagccttatgttccttattaacatctaaggaaattaatattcgttatttaacgttagattctttggtcaaattatgctcttctagcgggaaacctgcaattgatgccgttcgttacaagaatttggatatgatttttcatcttttgaacacagaaagagattcttctattgttaggaaggttgttgacttgttatatacctttactgatgttgaaaacgttaagattattgtggacggtttattgcagtatattttatctccgaaaaatcttgctgaaccgcaaataaaatctgatattgcagttaaaatagctattttgaccgagaaatatgccacggatatcaattggtttgtaattatttctttgcagttgttatctttaacttccaatacaactattaacgatgatgagatctggcaaagattatgtcaaattgtagtgaacaatccatctttacatagaataacatgtgaaagattggtggactatttatgtaaaaagcaagcatctgaagctattattaaagctgcggcttttttattaggggagtactctagtctcataacagacaggatttctagcgcaaatttatttactttgtttgccgagaaatattttagtgcaccaaatgtggctaaggcgatgatattgactacgatgatcaagttgtacaagacctctcctgagatcggctccaacgtcatcaaatttttccaattggaattgaactctcttgatattgagttgcaaacaagatccttcgaatatctcaacattattcaattggctaaggtgaacggaaatacagatattttgcaaattttatttgaaccaatgccgccttttaacagcaaatctaatccattattgaagagattagggtctttaccggcaagtgcgggtagcacaactttaataaatacaccatccgaagcatcctcctccacgcctgacttattatccaaaagagcaaactcttccaggtctatcatggttcccatgcccccaccatctcgtaggaacaccattgatgatgtaaattccaaaattagttcttctgaagacttttctggaaaggactcttattattctaggcagatcctcgctccaaattggagggaaggtttcacaagaatgatttctcataagcagggtgtgcttttcacatcttctttgatgaaagttttctatagaataaccactcctgatgcacaacagccatacgtgtttcatatatctcttgccttcattaacttgactgagtgggaaatcacgggattatccacacagattatcccttccaaaacgcaaggtaatcctgagtatttaattatgaatattaatacaccttctactgctactattgggccccataaaagggcagagcaaagctatgaagtttctataagaaaacctttcgacgttgaagatagtccaattttggcaattcatttcaaatgtggcggtagtacaaacactatcaatttgaaaactgccataggcatgactacaacattaattagcagcgatgtcaatcctagcatgcatttgaatttggcacagttcatcagccgttggaagactttgagcgatgctttgggaaaagagggagaataccaaaaatctggcataaagctcaacaaggattttagaaaagttgaaacaatcagtttagaagacggacttttattattgacgcaaacagtgaagaggttgggctttgatatagtcgatcagaccagtgttcgtagtacattgtttgtctctggtattattcatacgaaaagtgagggaaacttcggttgtttaatgaagatacaataccaggtaaatggaacagttaatgttacctgtaaaacaacgacggccggtcccttagcgaagtacattgtcgaatgtataaagaatgtgcttacgaagtga

SEQ ID NO: 327 - DNA, 774 bp, Saccharomyces cerevisiae
atgtccactggtattacttatgatgaagatagaaagacacaattaattgcccaatacgaatctgtaagggaagttgtgaatgcagaggcaaaaaatgttcatgttaatgaaaatgcctccaaaattttattattggttgtttcgaaattgaaaccagctagcgatatacaaattctttacgaccatggtgtgagggagttcggggaaaactatgttcaagagttgatcgaaaaggcaaaattactaccagacgatatcaagtggcactttattggcggtttgcaaacgaataaatgtaaagatttggctaaagtgccaaatttatactctgttgaaacaatcgactccttgaagaaagccaaaaaattaaacgaatcgagggctaaatttcaaccagattgcaacccaatattgtgtaatgttcaaattaatacctcccatgaggatcaaaaatcgggcttgaataatgaagcagaaatatttgaagtcatcgacttcttcttatccgaagaatgcaagtatattaagttgaatgggttaatgactattggttcatggaacgtctctcatgaagatagcaaagaaaacagagactttgctacgctggttgagtggaagaagaagattgatgctaaatttggtacatcattgaaattgtctatggggatgagtgctgatttcagggaggctataaggcaaggaacagcggaagtcagaattggtaccgacatttttggtgctagacctccaaaaaatgaagctagaatcatttag

SEQ ID NO: 328 - DNA, 774 bp, Artificial Sequence
  Description of Artificial Sequence: Synthetic polynucleotide
atgtccactggtattacttatgatgaagatagaaagacacaattaattgcccaatacgaatctgtaagggaagttgtgaatgcagaggcaaaaaatgttcatgttaatgaaaatgcctccaaaattttattattggttgtttccaaattgaaaccagctagcgatatacaaattctttacgaccatggtgtgagggagttcggggaaaactatgttcaagagttgatcgaaaaggcaaaattattaccagacgatatcaagtggcactttattggcggtttgcaaacgaataaatgtaaagatttggctaaagtgccaaatttatactctgttgaaacaatcgactccttgaagaaagccaaaaaattaaacgaaagtagggctaaatttcaaccagattgcaacccaatattgtgtaatgttcaaattaatacctcccatgaggatcaaaaatctggcttgaataatgaagcagaaatatttgaagtcatcgacttcttcttatccgaagaatgcaagtatattaagttgaatgggttaatgactattggttcttggaacgtctctcatgaagatagcaaagaaaacagagactttgctacgttagttgagtggaagaagaagattgatgctaaatttggtacatctttgaaattgtctatggggatgagtgctgatttcagggaggctataaggcaaggaacagcggaagtcagaattggtaccgacatttttggtgctagacctccaaaaaatgaagctagaatcatttga

SEQ ID NO: 329 - DNA, 2118 bp, Saccharomyces cerevisiae
atgagcggatctatcgatgtcatcactcattttgggcctgatgcagacaagccggaaatcatcactgcattagagaatttaactaaactgcatgcattgtccgtcgaggatctatacattaaatgggagcagttctccaatcaaaggcgtcaaactcacacagatctgacttccaagaacatagatgagtttaaacaatttttacaattacaaatggaaaagcgtgctaaccaaatttcatcgtcctctaaggtaaacacatccacaaaaaaaccagtgattaaaaaaagtttgaattcaagtcccttgtttggccttagtattccaaagactccgactttaaaaaaaagaaagttacatggtcccttttcactcagtgattccaagcaaacatataatgtaggctctgaggcagaaacaaatgaaaaaggaaatagttctttaaaattggagtttactccaggcatggcagaagatgctgtgggtgacagtgctccattgtcccacgctaaaagctcggatgccaagactcccggctcgtcgacattccaaactccaacaacaaacactcctaccacatcgaggcaaaatgttcctgctggtgaaattttggattctttgaaccctgaaaatattgaaatatcatctggtaatccaaatgtaggccttctttcgactgaagaaccatcatataaccaggtcaaagtagaaccattttatgatgctaaaaagtataaattcagaacaatgaggcaaaacttacaggaagcgtctgatgtcctcgatgatcaaattgaatcgtttactaagattattcaaaatcactataagttatctccaaacgacttcgctgatccaactattcaatctcagtccgaaatttatgctgttggaaggatagttccagattcgccgacctacgacaagtttttgaatccagaatcgctttccctagagacctcaagaatgggcggcgttggaagaagggtaaggttagatctatcgcaggtcaacgagctttcgtttttcttaggccaaattgtggcattcaaaggtaaaaatgctaatggggattacttcaccgttaactctattttgccgctaccttatccaaactccccagtgtccacatcgcaggaactgcaggagtttcaagcaaatttggaaggttcttctttgaaggttatcgtgacctgtggcccatactttgcaaatgataacttctccctcgaattgttgcaagaatttatcgatagtataaataatgaggtaaaacctcacgtcttgataatgtttggcccatttatagatatcacccatcctctgatagcgagtggtaaattgccaaattttccccagttcaagacacagcccaaaacattggacgagctttttttgaagttatttactcctattctaaaaaccatatcaccacatatccaaaccgtattgataccctccacaaaagatgcaatttctaatcacgccgcatatccacaagcttctttaattagaaaggctttacagctgcctaaaaggaacttcaaatgcatggctaatccttcatcttttcaaataaatgagatatacttcggttgctcaaacgttgatacattcaaagatctaaaggaagtcataaaaggcggtactacctcatcaagatatagattagatcgtgtttctgagcatattttacaacagcgcaggtattaccccatatttccaggtagtattcgtacaagaataaaaccaaaagacgtatctacgaagaaggaaaccaatgatatggaaagcaaagaagaaaaagtttatgaacatatatctggtgcagatttagacgtgagttatctgggactaacagagtttgttggtgggttctcgcctgacataatgattatacccagtgaattacaacactttgcaagagttgtccaaaacgtagttgttataaatcccggaagatttattagagcaacaggtaacaggggatcctatgcacaaattactgtccaatgccctgatcttgaagacgggaaattgacgcttgttgaaggtgaagagccagtttatctacacaacgtgtggaagcgcgctagagttgacttgattgctagttga

SEQ ID NO: 330 - DNA, 2118 bp, Artificial Sequence
  Description of Artificial Sequence: Synthetic polynucleotide
atgagcggatctatcgatgtcatcactcattttgggcctgatgcagacaagccggaaatcatcactgcattagagaatttaactaaattgcatgcattgtccgtcgaggatttatacattaaatgggagcagttctccaatcaaaggcgtcaaactcacacagatttgacttccaagaacatagatgagtttaaacaatttttacaattacaaatggaaaagcgtgctaaccaaatttcttcttcctctaaggtaaacacatccacaaaaaaaccagtgattaaaaaaagtttgaatagtagtcccttgtttggccttagtattccaaagactccgactttaaaaaaaagaaagttacatggtcccttttctctcagtgattccaagcaaacatataatgtaggctctgaggcagaaacaaatgaaaaaggaaatagttctttaaaattggagtttactccaggcatggcagaagatgctgtgggtgacagtgctccattgtcccacgctaaaagcagtgatgccaagactcccggctcctctacattccaaactccaacaacaaacactcctaccacatccaggcaaaatgttcctgctggtgaaattttggattctttgaaccctgaaaatattgaaatatcttctggtaatccaaatgtaggccttctttctactgaagaaccatcttataaccaggtcaaagtagaaccattttatgatgctaaaaagtataaattcagaacaatgaggcaaaacttacaggaagcgtctgatgtcctcgatgatcaaattgaaagttttactaagattattcaaaatcactataagttatctccaaacgacttcgctgatccaactattcaatctcagtccgaaatttatgctgttggaaggatagttccagattctccgacctacgacaagtttttgaatccagaatctctttccttggagacctccagaatgggcggcgttggaagaagggtaaggttagatttatctcaggtcaacgagctttcttttttcttaggccaaattgtggcattcaaaggtaaaaatgctaatggggattacttcaccgttaactctattttgccgttgccttatccaaactccccagtgtccacatctcaggaattacaggagtttcaagcaaatttggaaggttcttctttgaaggttatcgtgacctgtggcccatactttgcaaatgataacttctccctcgaattgttgcaagaatttatcgatagtataaataatgaggtaaaacctcacgtcttgataatgtttggcccatttatagatatcacccatcctttgatagcgagtggtaaattgccaaattttccccagttcaagacacagcccaaaacattggacgagctttttttgaagttatttactcctattttgaaaaccatatctccacatatccaaaccgtattgataccctccacaaaagatgcaatttctaatcacgccgcatatccacaagcttctttaattagaaaggctttacagttgcctaaaaggaacttcaaatgcatggctaatccttcttcttttcaaataaatgagatatacttcggttgcagcaacgttgatacattcaaagatttgaaggaagtcataaaaggcggtactacctcttctagatatagattagatcgtgtttctgagcatattttacaacagcgcaggtattaccccatatttccaggtagtattcgtacaagaataaaaccaaaagacgtatctacgaagaaggaaaccaatgatatggaaagcaaagaagaaaaagtttatgaacatatatctggtgcagatttagacgtgagttatttgggattaacagagtttgttggtgggttcagtcctgacataatgattatacccagtgaattacaacactttgcaagagttgtccaaaacgtagttgttataaatcccggaagatttattagagcaacaggtaacaggggatcctatgcacaaattactgtccaatgccctgatcttgaagacgggaaattgacgcttgttgaaggtgaagagccagtttatttgcacaacgtgtggaagcgcgctagagttgacttgattgctagttga

SEQ ID NO: 331 - DNA, 4542 bp, Saccharomyces cerevisiae
atgtcgtccttcaacaatgagaccaataataacagcaacactaatacacatccagacgattccttccctttgtataccgtattcaaggacgagtctgtacccatcgaggaaaaaatggcactgcttacacggttcaaaggacatgtaaaaaaggaactagttaacgaatcgtcgatccaagcttatttcgctgcgttactgttcatctccggccattacgcttaccgttcgtacccgcggttaatcttcctatcacattcctcgctttgttaccttatcaaacgtgtggccatgcagtctccagtacaattcaatgacactctagttgagcaattactaaaccacttaattttcgagttgcctaatgagaagaaattttggctggcttccattaaagccattgaagccatttatttggttaatccatcgaagatccaagctattctagcaaatttcttgcgaagaccaagtgaaaaccaaaacggagattacctgaataggataaaatctacattattgaccatcgatgagttgatccagatcaacgagaaaaataattcaaatcatttgcaactactgaggtttttcatgctgtctttcaccaaccttttaaataacaacctaaatgaacacgcaaacgatgataacaataatgtaataatagagcttattttcgatataatgtacaagtatttgaaaatggatgacgaaaattcacaggatctgatagatggatttattaacgatttagaagttgagaaattcaagcaaaaattcataagtttagcaaagtcacaggaccagcatggttcacaagaagataaatcgaccttgtttgacgaagagtacgagtttcaattactattagccgaagcgaaattgccgcagttatcaaacaacttgagcagtaaagacccagcgatgaaaaaaaactatgagtctttgaaccaattacaacaagacttggagaatttgttggcaccgttccaaagtgtaaaggaaacagaacaaaattggaagctaaggcaatcaaatataattgaattagacaacattatatccggcaacattcccaaagataatccagaggaatttgtcactgtaataaaggaggtgcagttgattgagttgatttcaagagctacctcgtcgttgaggacaacgttatcattaactgcattacttttcctcaagaggctaatccatatcctaaacgatcagttgcccctatcaatattggaccaaatatttgtcattttcaagaacttgttatcatctaccaagaaaatctcttcacaaactgcatttcattgtttaattactttgatcattgatataaatcatttccataataaactattccaattatcttttttattaataaatgagaaaaccgtaacaccgagattttgctctgcaatactgctgcgtagcttcctgattaagttcaacgactccaatctttcgctcaacaattcaaatacaacttcgccaacctcaaagttggagaataacatcatatacatcgaagaatggctaaaaaagggcatttcagattcacagacaaccgttagagaggcaatgaggttaactttttggtatttctacaaatgttatcctacaaatgccaaaagattattgagttcttccttttctccacagttgaaaaaagcaacagaattggcaatccctgctcatttgaatataaactatcaagtttccagggtgtcctctactgcctccgcctcctctgcaacgtctcgattgtactctcactcttcgaataattcttcaagaaaaaccagtttactggagcagaaaaggaactatccaagttatgcccaaccgactcaatcttcctccacctccctactcaacgctcctgcagtcacagctggtggaagtgtcatagccagtaaactatcaaataagctgaaaacaaacttaaggtctactagtgaatattcaagtaaagaaaatgaaaaaagggcaaggcatcatgacagtatgaactctgtttcaaacagcaacaccaaagataataataatgttactaaaagaaaagttagtgcccctccttcttctactgccgccacaaaagtatctgaaaattacacaaattttgatgactttccgtcaaaccaaatcgacttgactgatgagttatcaaatagttactctaacccgttgataaagaaatatatggataaaaatgatgtttcgatgtcatcttctccaatctcattaaaaggcagtaataaacttggtgaatatgaaaccctttacaaaaaattcaatgatgcttcgtttccagctcagatcaaagatgctttacagtatttacaaaaggagttactgttgacatcgcaacagtcatcatcagccccaaaatttgaatttcccatgattatgaaaaagctacgccaaattatgataaagtcaccaaatgatttcaagccatttttgagtatagagaagtttacaaatggagttcccttaaattacctcattgagctatattctattaatagttttgattacgcggaaatcttaaagaatagaatgaatcctgaaaagccctacgagcttactaacttgattataactatcgcggatttattcaatttcttgaatgccaataattgtccgaatgatttcaaactatactatatgaaatacaaaaccacttttttcaattataatttcaagttacttttagagattttccgtaacttgaacataaaacatgataacactctgaggtcaggaacgaacgatctcatgcctaaaatatcaatgatactctttcaaatctacggtaaagagtttgactacacatgttatttcaatctaatttttgaaatttataaattcgataataatcgttttaataaattgctagctgattttgacattgtatctaccaagatgaaaatctgtcatgaacttgaaaagaaggatgccaactttaaggtagaagacatcatttctagagaaagttctgtaagcttcactcccatcgacaataaaaaatctgaaggggatgaggaatccgacgatgctgtagacgaaaatgatgttaagaaatgcatggaaatgacaatgattaatcccttcaaaaacttggaaactgataaaacactagagttgaagaataacgttggaaaaagaacatcaagcacagacagcgtagttattcatgatgataatgacaaagataaaaagctttcagaaatgacgaaaatagtaagtgtttatcaactggaccagccaaacccagcaaaggaggaagatgatatagatatggaaaattctcaaaaatctgatttgaatttaagtgaaatttttcaaaacagtggtgaaaataccgaaaggaaattgaaggacgataatgaaccaacagtaaaattcagtacagatcctccaaagataataaatgagccagaaaaacttattggaaatgggaatgagaatgaaaagcctgatttggaaacaatgtcaccaatcaaaataaacggggacgagaatatgggtcaaaagcaaaggatcacagtaaagagagaaagagacgtagcactaactgaacaagacataaactccaaaaagatgaaactagttaataacaaaaaatcagagaagatgcatttgcttatcatggataatttcccaagggattccttgactgtatatgaaattagtcatcttttaatggttgattctaatggcaacactttgatggattttgatgtctatttcaatcacatgtcaaaggcaataaacaggataaaaagtggatcgttcactatgaaacatataaattacctgatcgaacccttgattacttgttttcaaaatcaaaaaatgaccgattggttgacgaatgaaaatggttttgatgaactactggatgttgctattatgcttttgaaatctactgatgacacgccttcaattccatcaaaaatatccagtaagtccataattctcgttcattgtcttttggtttggaaaaagtttctaaatacactaagcgagaatgccgacgatgatggcgtttcggtgagaatgtgtttcgaagaagtatgggaacagatccttttaatgcttaataaattttctgattatggaaacgaaatctataaattagcgcaagagttcagggacagtctaatgttatcgcactttttcaaaaaacattcggcaacaagaattctaagcatgttggttactgaaattcagcctgacaccgctggtgtgaaagaaacatttttaattgagaccttatggaagatgctgcaatctcctaccatttgccaacaattcaagaaatctaatatatcagagattatccaaacaatgagctatttcattatggggactgataatacttcgtggaacttcaccagtgccgtggtattagctcgttgtttgagagtcctccaaactactccagattatactgagcaagaaaccgaacgattattcgattgtttgcctaagaatgtctttaaaatgatcatgttcatcgcctcaaacgaatag

SEQ ID NO: 332 - DNA, 4542 bp, Artificial Sequence
  Description of Artificial Sequence: Synthetic polynucleotide
atgtcttccttcaacaatgagaccaataataacagcaacactaatacacatccagacgattccttccctttgtataccgtattcaaggacgagtctgtacccatcgaggaaaaaatggcattacttacaagattcaaaggacatgtaaaaaaggaattggttaacgaaagttctatccaagcttatttcgctgcgttattattcatctccggccattacgcttaccgttcttacccgagattaatcttcttatctcattcctctctttgttaccttatcaaacgtgtggccatgcagtctccagtacaattcaatgacactttggttgagcaattattaaaccacttaattttcgagttgcctaatgagaagaaattttggttggcttccattaaagccattgaagccatttatttggttaatccatctaagatccaagctattttggcaaatttcttgagaagaccaagtgaaaaccaaaacggagattacttgaataggataaaatctacattattgaccatcgatgagttgatccagatcaacgagaaaaataatagtaatcatttgcaattattgaggtttttcatgctttctttcaccaaccttttaaataacaacttgaatgaacacgcaaacgatgataacaataatgtaataatagagcttattttcgatataatgtacaagtatttgaaaatggatgacgaaaattctcaggatttgatagatggatttattaacgatttagaagttgagaaattcaagcaaaaattcataagtttagcaaagtctcaggaccagcatggttctcaagaagataaatctaccttgtttgacgaagagtacgagtttcaattattattagccgaagcgaaattgccgcagttatctaacaacttgagcagtaaagacccagcgatgaaaaaaaactatgagtctttgaaccaattacaacaagacttggagaatttgttggcaccgttccaaagtgtaaaggaaacagaacaaaattggaagttaaggcaaagcaatataattgaattagacaacattatatccggcaacattcccaaagataatccagaggaatttgtcactgtaataaaggaggtgcagttgattgagttgatttctagagctacctcttctttgaggacaacgttatctttaactgcattacttttcctcaagaggttgatccatatcttgaacgatcagttgcccttatctatattggaccaaatatttgtcattttcaagaacttgttatcttctaccaagaaaatctcttctcaaactgcatttcattgtttaattactttgatcattgatataaatcatttccataataaattattccaattatcttttttattaataaatgagaaaaccgtaacaccgagattttgctctgcaatattattacgtagcttcttgattaagttcaacgactccaatctttctctcaacaatagtaatacaacttctccaacctccaagttggagaataacatcatatacatcgaagaatggttgaaaaagggcatttctgattctcagacaaccgttagagaggcaatgaggttaactttttggtatttctacaaatgttatcctacaaatgccaaaagattattgagttcttccttttctccacagttgaaaaaagcaacagaattggcaatccctgctcatttgaatataaactatcaagtttccagggtgtcctctactgcctccgcctcctctgcaacgtctagattgtactctcactcttccaataattcttctagaaaaaccagtttattggagcagaaaaggaactatccaagttatgcccaaccgactcaatcttcctccacctccttactcaacgctcctgcagtcacagctggtggaagtgtcatagccagtaaattatccaataagttgaaaacaaacttaaggtctactagtgaatattctagtaaagaaaatgaaaaaagggcaaggcatcatgacagtatgaactctgtttctaacagcaacaccaaagataataataatgttactaaaagaaaagttagtgcccctccttcttctactgccgccacaaaagtatctgaaaattacacaaattttgatgactttccgtctaaccaaatcgacttgactgatgagttatccaatagttactctaacccgttgataaagaaatatatggataaaaatgatgtttctatgtcttcttctccaatctctttaaaaggcagtaataaacttggtgaatatgaaaccctttacaaaaaattcaatgatgcttcttttccagctcagatcaaagatgctttacagtatttacaaaaggagttattattgacatctcaacagtcttcttctgccccaaaatttgaatttcccatgattatgaaaaagttgcgccaaattatgataaagtctccaaatgatttcaagccatttttgagtatagagaagtttacaaatggagttcccttaaattacctcattgagttgtattctattaatagttttgattacgcggaaatcttaaagaatagaatgaatcctgaaaagccctacgagcttactaacttgattataactatcgcggatttattcaatttcttgaatgccaataattgtccgaatgatttcaaactttactatatgaaatacaaaaccacttttttcaattataatttcaagttacttttagagattttccgtaacttgaacataaaacatgataacactttgaggtctggaacgaacgatctcatgcctaaaatatccatgatactctttcaaatctacggtaaagagtttgactacacatgttatttcaatttaatttttgaaatttataaattcgataataatcgttttaataaattgttggctgattttgacattgtatctaccaagatgaaaatctgtcatgaacttgaaaagaaggatgccaactttaaggtagaagacatcatttctagagaaagttctgtaagcttcactcccatcgacaataaaaaatctgaaggggatgaggaatccgacgatgctgtagacgaaaatgatgttaagaaatgcatggaaatgacaatgattaatcccttcaaaaacttggaaactgataaaacattagagttgaagaataacgttggaaaaagaacatctagcacagacagcgtagttattcatgatgataatgacaaagataaaaagctttctgaaatgacgaaaatagtaagtgtttatcaattggaccagccaaacccagcaaaggaggaagatgatatagatatggaaaattctcaaaaatctgatttgaatttaagtgaaatttttcaaaacagtggtgaaaataccgaaaggaaattgaaggacgataatgaaccaacagtaaaattcagtacagatcctccaaagataataaatgagccagaaaaacttattggaaatgggaatgagaatgaaaagcctgatttggaaacaatgtctccaatcaaaataaacggggacgagaatatgggtcaaaagcaaaggatcacagtaaagagagaaagagacgtagcattgactgaacaagacataaactccaaaaagatgaaattggttaataacaaaaaaagtgagaagatgcatttgcttatcatggataatttcccaagggattccttgactgtatatgaaattagtcatcttttaatggttgattctaatggcaacactttgatggattttgatgtctatttcaatcacatgtccaaggcaataaacaggataaaaagtggaagtttcactatgaaacatataaattacttgatcgaacccttgattacttgttttcaaaatcaaaaaatgaccgattggttgacgaatgaaaatggttttgatgaattattagatgttgctattatgcttttgaaatctactgatgacacgccttctattccatctaaaatatccagtaagtccataattctcgttcattgtcttttggtttggaaaaagtttttgaatacattgagcgagaatgccgacgatgatggcgtttctgtgagaatgtgtttcgaagaagtatgggaacagatccttttaatgcttaataaattttctgattatggaaacgaaatctataaattagcgcaagagttcagggacagtttaatgttatcccactttttcaaaaaacattctgcaacaagaattttgagcatgttggttactgaaattcagcctgacaccgctggtgtgaaagaaacatttttaattgagaccttatggaagatgttacaatctcctaccatttgccaacaattcaagaaatctaatatatctgagattatccaaacaatgagctatttcattatggggactgataatacttcttggaacttcaccagtgccgtggtattagctcgttgtttgagagtcctccaaactactccagattatactgagcaagaaaccgaaagattattcgattgtttgcctaagaatgtctttaaaatgatcatgttcatcgcctccaacgaatga

SEQ ID NO: 333 - DNA, 1038 bp, Saccharomyces cerevisiae
atgaccatagataactacgacaacagtaaacaggatagcagcaaatacgaggttagtggtacgggtgatggcaggaacggcgatggcggcttgcctctagtacaatgtgtcgcaagagctcgtatcccaaccacacagggtccggatatctttttacatctttacagtaacaacagggacaacaaggaacatctagccattgtgtttggtgaagacatacggtcgcgctcgctattccgtagaagacagtgcgagacgcaacaagatagaatgatcaggggcgcttatattggcaaactgtatcccggcagaactgtggcagacgaagacgatagactcggattagctctggagtttgatgatagtacaggtgagttattagcttccaaagccactacatgggacgcccataacgacacgctggtacggatccattctgaatgttacaccggtgaaaacgcatggagcgcccgttgtgattgtggtgaacaattcgatagggccggtaggcttatcgcttgcgaccacgaacccacaagcaacatcaaaggtggaaacggccatggtgttatcgtgtatctaagacaagagggtcgtggcatcgggttaggtgagaaactcaaggcctacaacctgcaagacttaggtgctgacacagtgcaggccaacttaatgctgaaacatcccgtggatgctagggacttctcgctgggtaaggctattttgctggatcttggcatcggtaatgtcaggctgctgacaaataacccggaaaagataaaacaggtagatcatgcgccttaccttaagtgcgttgaacgagtgcctatggtacccatacactggacaaactccagtgaaggcatagactccaaggagatagaaggttatctcaggaccaagatagaaagaatgggtcatttactaacggagcctctgaaacttcatacaaaccctcaacctactgagacaagtgaagcccaaaaccaaaaccgtatgaactctgcgttgtcatcaacatcgacgctggcaatataa

SEQ ID NO: 334 - DNA, 1038 bp, Artificial Sequence
  Description of Artificial Sequence: Synthetic polynucleotide
atgaccatagataactacgacaacagtaaacaggatagcagcaaatacgaggttagtggtacgggtgatggcaggaacggcgatggcggcttgcctttggtacaatgtgtcgcaagagctcgtatcccaaccacacagggtccggatatctttttacatctttacagtaacaacagggacaacaaggaacatttggccattgtgtttggtgaagacataaggtctcgctctttattccgtagaagacagtgcgagacgcaacaagatagaatgatcaggggcgcttatattggcaaactttatcccggcagaactgtggcagacgaagacgatagactcggattagctttggagtttgatgatagtacaggtgagttattagcttccaaagccactacatgggacgcccataacgacacgttggtaagaatccattctgaatgttacaccggtgaaaacgcatggagcgcccgttgtgattgtggtgaacaattcgatagggccggtaggcttatcgcttgcgaccacgaacccacaagcaacatcaaaggtggaaacggccatggtgttatcgtgtatttaagacaagagggtcgtggcatcgggttaggtgagaaactcaaggcctacaacttacaagacttaggtgctgacacagtgcaggccaacttaatgttgaaacatcccgtggatgctagggacttctccttgggtaaggctattttgttggatcttggcatcggtaatgtcaggttattaacaaataacccggaaaagataaaacaggtagatcatgcgccttaccttaagtgcgttgaaagagtgcctatggtacccatacactggacaaactccagtgaaggcatagactccaaggagatagaaggttatctcaggaccaagatagaaagaatgggtcatttattgacggagcctttgaaacttcatacaaaccctcaacctactgagacaagtgaagcccaaaaccaaaaccgtatgaactctgcgttgagttctacaagtacgttggcaatatga

SEQ ID NO: 335 - DNA, 1146 bp, Saccharomyces cerevisiae
atgtcacagttcttcgaagctgctactcccgttgcaattcccacaaacaataccaacggcggctccagtgatgccggcagcgccgccactggcggcgcccccgttgttggcaccaccgctcaacccaccatcaatcacaggcttttgctgtcattgaaagaggctgccaagatcattggcactaagggctccaccatctcacgcataagagctgcaaacgccgtcaagatcggtatttctgaaaaggtgcccggttgctctgacaggatcctgtcctgtgctgggaacgtaatcaatgtggccaatgccattggtgatattgttgacgtgcttaacaaacggaatcccgaaaatgaggacgcagctgagggcgaagcggaagagcactactacttccactttttgaaccatattttaccagctccctcaaaggacgagatcagagatctgcagcaactggaggacatcggttatgtgaggctcattgtggccaattcccatatctcatcgattatcgggaaagcaggcgccaccatcaagtccctgatcaataagcacggcgttaagatcgtggcttccaaggacttcttacctgctagcgacgagagaattatcgagatccagggtttcccaggatccatcaccaatgtacttatcgaaattagcgagatcatcttgagtgacgttgacgtcagattcagcacagaaagatcttatttccctcatctgaaaaagtcctccggtgagccaacttccccttctacctcatctaacactaggatcgaattgaagattccagaactgtatgtaggcgccattattggccgtggaatgaacagaattaagaatttgaaaactttcacaaaaaccaatattgtcgtggaaaggaaggatgacgatgataaagacgaaaattttagaaaattcataatcacaagtaaatttcctaagaatgtcaaacttgctgagtccatgcttttgaagaacctgaatactgaaattgagaaacgtgaaaactacaagagaaaattggaagctgccgaaggagatgccactgttgttactgaacgctctgattctgcttctttcttggaagagaaggaagaacctcaagagaatcatgataacaaagaggagcagtcgtag

SEQ ID NO: 336 - DNA, 1146 bp, Artificial Sequence
  Description of Artificial Sequence: Synthetic polynucleotide
atgtctcagttcttcgaagctgctactcccgttgcaattcccacaaacaataccaacggcggctccagtgatgccggcagcgccgccactggcggcgcccccgttgttggcaccaccgctcaacccaccatcaatcacaggcttttgttatctttgaaagaggctgccaagatcattggcactaagggctccaccatcagccgcataagagctgcaaacgccgtcaagatcggtatttctgaaaaggtgcccggttgctctgacaggatcttgtcctgtgctgggaacgtaatcaatgtggccaatgccattggtgatattgttgacgtgcttaacaaaagaaatcccgaaaatgaggacgcagctgagggcgaagcggaagagcactactacttccactttttgaaccatattttaccagctccctccaaggacgagatcagagatttacagcaattggaggacatcggttatgtgaggctcattgtggccaattcccatatctcttccattatcgggaaagcaggcgccaccatcaagtccttaatcaataagcacggcgttaagatcgtggcttccaaggacttcttacctgctagcgacgagagaattatcgagatccagggtttcccaggatccatcaccaatgtacttatcgaaattagcgagatcatcttgagtgacgttgacgtcagattcagcacagaaagatcttatttccctcatttgaaaaagtcctccggtgagccaacttccccttctacctcttctaacactaggatcgaattgaagattccagaattgtatgtaggcgccattattggccgtggaatgaacagaattaagaatttgaaaactttcacaaaaaccaatattgtcgtggaaaggaaggatgacgatgataaagacgaaaattttagaaaattcataatcacaagtaaatttcctaagaatgtcaaacttgctgagtccatgcttttgaagaacttgaatactgaaattgagaaacgtgaaaactacaagagaaaattggaagctgccgaaggagatgccactgttgttactgaacgctctgattctgcttctttcttggaagagaaggaagaacctcaagagaatcatgataacaaagaggagcagtcttga

SEQ ID NO: 337 - DNA, 1017 bp, Saccharomyces cerevisiae
atgaatgataaactccaagaagagcataacgaaaaagacaccacttcacaaattaatggtttcacgccgccgcatatgagtatagactttcattcaaataacaatagcaatatcatcgagactattggcgtttccaaaagattaggaaattctgtattaagtgaactggattctagagctagctcaaaatttgaatttttaaaagatcaatccgaacaacaatacaacggcgacaagaacaatgaaccaaaatcgggctcgtataatattaatgagttcttccaagcaaagcacgactctcaatttggccagatggagtcgctagacacacattatacccttttacatacgcccaagagaaagtcacaacatgcaatcccacaggatcgatcggattcgatgaaaaggtcgagaccgtcccgctcaattccatacactacaccagtggtaaacgatatcacaagaagaatacgaagattgaaattacggaactcattggttaatggtaatgacatagtggctagagcgagatctatgcaagcaaattctaacattaattcaataaagaacacaccattgtcaaagcccaagccatttatgcacaaaccaaactttctaatgcccactacgaattctttgaacaagatcaattccgctcaccgtaatacatcctcctcttcgacagcttcatcgataccaagatctaaagtacacagatcgatatcaataagagatttacacgccaaaaccaaaccggtagaacgcacgccagttgcgcaaggaacaaattcgcaattgaagaattcagtttccgtttttgatagactttacaagcaaacaacgttctctaggtcgacgtctatgaacaacttatcgtcaggaacctctgcaaaatccaaggaacacacaaatgtaaagactcggttggttaaaagtaagacaagtggttcattgtccagtaaccttaagcaaagtactgccaccggcacaaagagtgatagacctatttggcggtga

SEQ ID NO: 338 - DNA, 1017 bp, Artificial Sequence
  Description of Artificial Sequence: Synthetic polynucleotide
atgaatgataaactccaagaagagcataacgaaaaagacaccacttctcaaattaatggtttcacgccgccgcatatgagtatagactttcattctaataacaatagcaatatcatcgagactattggcgtttccaaaagattaggaaattctgtattaagtgaattagattctagagctagcagtaaatttgaatttttaaaagatcaatccgaacaacaatacaacggcgacaagaacaatgaaccaaaatctggctcctataatattaatgagttcttccaagcaaagcacgactctcaatttggccagatggagtctttggacacacattatacccttttacatacgcccaagagaaagtctcaacatgcaatcccacaggatagaagtgattctatgaaaaggagcagaccgtcccgctccattccatacactacaccagtggtaaacgatatcacaagaagaataagaagattgaaattaagaaactctttggttaatggtaatgacatagtggctagagcgagatctatgcaagcaaattctaacattaattctataaagaacacaccattgtccaagcccaagccatttatgcacaaaccaaactttttgatgcccactacgaattctttgaacaagatcaattccgctcaccgtaatacatcctcctcttctacagcttcttctataccaagatctaaagtacacagaagtatatccataagagatttacacgccaaaaccaaaccggtagaacgcacgccagttgcgcaaggaacaaattctcaattgaagaattctgtttccgtttttgatagactttacaagcaaacaacgttctctaggtctacgtctatgaacaacttatcttctggaacctctgcaaaatccaaggaacacacaaatgtaaagactagattggttaaaagtaagacaagtggttctttgtccagtaaccttaagcaaagtactgccaccggcacaaagagtgatagacctatttggcgttga

SEQ ID NO: 339 - DNA, 957 bp, Saccharomyces cerevisiae
atgtcttccaacgcccaagtcaaaaccccattacctccagccccagctccaaagaaggaatctaactttttgattgatttcttaatgggtggtgtcagtgccgctgtcgccaaaactgctgcatctcccatcgaaagagttaaacttttgatccaaaaccaagatgaaatgttaaaacaaggtactttggacagaaaatacgcaggtatcttagactgtttcaagagaaccgctacacaggaaggtgttatctcattctggagaggtaacactgctaacgttatccgttatttccccactcaagctttgaatttcgccttcaaggacaagatcaaggccatgtttggtttcaagaaggaagaaggttacgccaaatggtttgccggtaacttggcatctggtggtgctgctggtgccttgtcattactatttgtttactctttggattatgcaagaactagattggctgctgactccaagtcctctaaaaagggtggtgctcgtcaattcaacggtttgatcgatgtctacaagaagaccttaaaatctgatggtgttgctggtctttacagaggtttcttaccttctgtcgttggtattgttgtctacagaggtctatacttcggtatgtacgattctttgaagcctctattgttgactggttctttggaaggttcattcttggcttcattcttgttgggttgggttgttactactggtgcttctacatgttcttacccattggataccgttagaagaagaatgatgatgacctccggtcaagctgttaagtacgacggtgcctttgactgtttgaggaagattgttgctgctgaaggtgttggttctctattcaagggttgtggtgctaacatcttaagaggtgtcgcaggtgctggtgttatctcaatgtacgaccaactgcaaatgatcttgtttggtaagaagttcaaataa

SEQ ID NO: 340 - DNA, 957 bp, Artificial Sequence
  Description of Artificial Sequence: Synthetic polynucleotide
atgtcttccaacgcccaagtcaaaaccccattacctccagccccagctccaaagaaggaatctaactttttgattgatttcttaatgggtggtgtcagtgccgctgtcgccaaaactgctgcatctcccatcgaaagagttaaacttttgatccaaaaccaagatgaaatgttaaaacaaggtactttggacagaaaatacgcaggtatcttagactgtttcaagagaaccgctacacaggaaggtgttatctctttctggagaggtaacactgctaacgttatccgttatttccccactcaagctttgaatttcgccttcaaggacaagatcaaggccatgtttggtttcaagaaggaagaaggttacgccaaatggtttgccggtaacttggcatctggtggtgctgctggtgccttgtctttactttttgtttactctttggattatgcaagaactagattggctgctgactccaagtcctctaaaaagggtggtgctcgtcaattcaacggtttgatcgatgtctacaagaagaccttaaaatctgatggtgttgctggtctttacagaggtttcttaccttctgtcgttggtattgttgtctacagaggtttatacttcggtatgtacgattctttgaagcctttattgttgactggttctttggaaggttctttcttggcttctttcttgttgggttgggttgttactactggtgcttctacatgttcttacccattggataccgttagaagaagaatgatgatgacctccggtcaagctgttaagtacgacggtgcctttgactgtttgaggaagattgttgctgctgaaggtgttggttctttattcaagggttgtggtgctaacatcttaagaggtgtcgcaggtgctggtgttatctctatgtacgaccaattacaaatgatcttgtttggtaagaagttcaaatga

SEQ ID NO: 341 - DNA, 285 bp, Saccharomyces cerevisiae
atgtcattcatacctattgtatgtggtatgaagagtttcgactcttcatacgataccgttcccggacatcaaaacctgtattgcccgaattgtcacaattatagtgtcggccccataaaaagaaaggaatttttcactatttggtttataccgttggttccggtcttctggggaaaacagttgcactgccccatatgcaattggcgacaagattttaagaatgacgaacagcttaataaagtcattcaagaacaacaaaacttacgacaaaagcagcccaactga

SEQ ID NO: 342 - DNA, 285 bp, Artificial Sequence
  Description of Artificial Sequence: Synthetic polynucleotide
atgagtttcatacctattgtatgtggtatgaagagtttcgactcttcctacgataccgttcccggacatcaaaacttatattgcccgaattgtcacaattatagtgtcggccccataaaaagaaaggaatttttcactatttggtttataccgttggttccggtcttctggggaaaacagttgcactgccccatatgcaattggagacaagattttaagaatgacgaacagcttaataaagtcattcaagaacaacaaaacttaagacaaaagcagcccaactga

SEQ ID NO: 343 - DNA, 1131 bp, Saccharomyces cerevisiae
atgtgcgccaatatccccgaattcgactctttttacgaaaatgaaaatataaattacaacttggaatcattcgcacctttaaattgtgatgttaattcgccctttctccccattaataacaatgacatcaacgttaatgcttatggtgacgaaaatttaacgtactccaactttttactgtcttataacgataagctggctactacaactgctaaaaacaatagcattaataatagtaatagtaataataatagtaataataataaaaataataataataatcataataataataatctactcggtaatgacatcagtcagatggcctttttactcgattacccttctactctcaacgaaccgcaatttgccgtaaattgtaaagacatttacagaaaggatatatcaacgccttcgtcattagtttcgagtctgccacctgcaaagttttcgttatccctatcgaattcgccttctccgccaccaccatcgtcgtcctctttgaaacatggggaagcaataatttctaataccagcgaaagcagtgacatatttgccgatcctaattcgtttgaaaaggatactatgcccctaacgcaagaactgacgctagaaaatctaaataatcaattaaactatcccgatttcacgataaacgccatcgagcaggatcctgccccttcgtctttttcatcctcatcttcgtcttcggagtcaacggtctcttccagcaggaagaggaagccctgtcatgattcctacacacattcttcaccctcttcctcagagtctaagaaaatttccgactcgagattatccgccgaaggtttagccaaagtgcttaatttagaatcccccgaagaagctttaaaaagagaacgctttatattgggtattttccagaatgaattaaattacccgctaggttacaaaacgtggattagggatactacaaaagaatataggacaaagttaatcaatcaactgcacgaacgagtaaaggtaaagtaccccgaatacaaccagtccatactggaaacaataattagacgaggcacctactacatgatgcagagtaggttaagaagagagaggagaatgaagcttaaggaacgtaaaagaacaacctaa

SEQ ID NO: 344 - DNA, 1131 bp, Artificial Sequence
  Description of Artificial Sequence: Synthetic polynucleotide
atgtgcgccaatatccccgaattcgactctttttacgaaaatgaaaatataaattacaacttggaatctttcgcacctttaaattgtgatgttaattctccctttctccccattaataacaatgacatcaacgttaatgcttatggtgacgaaaatttaacgtactccaactttttattatcttataacgataagttggctactacaactgctaaaaacaatagcattaataatagtaatagtaataataatagtaataataataaaaataataataataatcataataataataatttactcggtaatgacatcagtcagatggcctttttactcgattacccttctactctcaacgaaccgcaatttgccgtaaattgtaaagacatttacagaaaggatatatctacgccttcttctttagtttctagtttaccacctgcaaagttttctttatccttatccaattctccttctccgccaccaccatcttcttcctctttgaaacatggggaagcaataatttctaataccagcgaaagcagtgacatatttgccgatcctaattcttttgaaaaggatactatgcccttaacgcaagaattgacgttagaaaatttgaataatcaattaaactatcccgatttcacgataaacgccatcgagcaggatcctgccccttcttctttttcttcctcttcttcttcttctgagtctacggtctcttccagcaggaagaggaagccctgtcatgattcctacacacattcttctccctcttcctctgagtctaagaaaatttccgacagtagattatccgccgaaggtttagccaaagtgcttaatttagaatcccccgaagaagctttaaaaagagaacgctttatattgggtattttccagaatgaattaaattacccgttgggttacaaaacgtggattagggatactacaaaagaatataggacaaagttaatcaatcaattacacgaaagagtaaaggtaaagtaccccgaatacaaccagtccatattggaaacaataattagaagaggcacctactacatgatgcagagtaggttaagaagagagaggagaatgaagcttaaggaacgtaaaagaacaacctga

SEQ ID NO: 345 - DNA, 321 bp, Saccharomyces cerevisiae
atggccaaatcattacgtgctagcagtcatctaaatgctaaatctgtcaaaagacgtggcgttttccaaaaagcagtagatgcacgtgaacaaagaatatccgataaactaaaggaagacttactaaagcaaaaattagaagatctaaaaaagaaagaagagcaaggaattgacatggatgtcgacgagaaaaaatccaatgaagaagctcccagaaaaaaaatcagcacctctggttggagagacggtagacatcacacttataaaaaggctaagctgatgaaacaatctaagaaaaaaacttctttcaccagattctga

SEQ ID NO: 346 - DNA, 321 bp, Artificial Sequence
  Description of Artificial Sequence: Synthetic polynucleotide
atggccaaatctttacgtgctagcagtcatttgaatgctaaatctgtcaaaagacgtggcgttttccaaaaagcagtagatgcacgtgaacaaagaatatccgataaattgaaggaagacttattgaagcaaaaattagaagatttgaaaaagaaagaagagcaaggaattgacatggatgtcgacgagaaaaaatccaatgaagaagctcccagaaaaaaaatcagcacctctggttggagagacggtagacatcacacttataaaaaggctaagttgatgaaacaatctaagaaaaaaacttctttcaccagattctga

SEQ ID NO: 347 - DNA, 570 bp, Saccharomyces cerevisiae
atggctaacttgcgtactcaaaagagacttgccgcttctgttgtcggtgttggtaagagaaaggtttggttagacccaaacgaaacttctgaaattgcccaagccaactctagaaatgccattagaaaattggtcaagaacggaaccatcgtcaagaaggccgttactgtccactctaaatctagaactagagcccatgctcaatccaagagagaaggtcgtcacagtggttacggtaagagaaagggtactagagaagctcgtttaccatcccaagtcgtctggatcagaagattacgtgtcttgagaagattattggccaagtaccgtgacgctggtaagattgacaagcatttgtaccacgttttgtacaaggaatccaagggtaacgccttcaagcacaagagagctttggttgaacacattattcaagctaaggctgatgctcaacgtgaaaaggctttgaacgaagaagctgaagctagaagattgaagaacagagctgctcgtgacagaagagctcaaagagttgctgaaaagagagacgctttgctaaaggaagacgcttaa

SEQ ID NO: 348 - DNA, 570 bp, Artificial Sequence
  Description of Artificial Sequence: Synthetic polynucleotide
atggctaacttgcgtactcaaaagagacttgccgcttctgttgtcggtgttggtaagagaaaggtttggttagacccaaacgaaacttctgaaattgcccaagccaactctagaaatgccattagaaaattggtcaagaacggaaccatcgtcaagaaggccgttactgtccactctaaatctagaactagagcccatgctcaatccaagagagaaggtcgtcacagtggttacggtaagagaaagggtactagagaagctcgtttaccatcccaagtcgtctggatcagaagattacgtgtcttgagaagattattggccaagtaccgtgacgctggtaagattgacaagcatttgtaccacgttttgtacaaggaatccaagggtaacgccttcaagcacaagagagctttggttgaacacattattcaagctaaggctgatgctcaacgtgaaaaggctttgaacgaagaagctgaagctagaagattgaagaacagagctgctcgtgacagaagagctcaaagagttgctgaaaagagagacgctttgttgaaggaagacgcttga

SEQ ID NO: 349 - DNA, 288 bp, Saccharomyces cerevisiae
atgcttttcttctcctttttcaagactttagttgaccaagaagtggtcgtagagttaaaaaacgacattgaaataaaaggtacactacaatcagttgaccaatttttgaatctgaaactagacaacatatcatgcacagatgaaaaaaaatatccacacttgggttccgtaaggaatatttttataagaggttcaacagtcaggtacgtttacttgaataagaacatggtagatacgaatttgctacaagacgctaccagaagggaggtaatgactgaaagaaaataa

SEQ ID NO: 350 - DNA, 288 bp, Artificial Sequence
  Description of Artificial Sequence: Synthetic polynucleotide
atgcttttcttctcctttttcaagactttagttgaccaagaagtggtcgtagagttaaaaaacgacattgaaataaaaggtacattacaatctgttgaccaatttttgaatttgaaattagacaacatatcttgcacagatgaaaaaaaatatccacacttgggttccgtaaggaatatttttataagaggttctacagtcaggtacgtttacttgaataagaacatggtagatacgaatttgttgcaagacgctaccagaagggaggtaatgactgaaagaaaatga

SEQ ID NO: 351 - DNA, 438 bp, Saccharomyces cerevisiae
atggatagaaatgtatatgaagcctgcagcaatataattaaggaatttggaacacatgtagtgagcgccgatgaagtactcgcagaaaaaatagataatgctgttcctataccgttcaaaacaagggaggagatagatgccgacgtggaaaaagatagaaacgaaggagttttcgaaggtaatatcattcctgatatcgacctacgtgtagtacactactacgccacgcagttgtgtctaaataagtatcctcatttgattaacgcctttgatgagacaagccttataacattgggtttactcatcgaaaagtgggtaaaagactatctaaccagcatccagacagaacagggaaggcaaagtaaggtaatcgggaaggggccatgcgaattcatatcaaaacatattgattataggcatgcgccaggtaatatctga

SEQ ID NO: 352 - DNA, 438 bp, Artificial Sequence
  Description of Artificial Sequence: Synthetic polynucleotide
atggatagaaatgtatatgaagcctgcagcaatataattaaggaatttggaacacatgtagtgagcgccgatgaagtactcgcagaaaaaatagataatgctgttcctataccgttcaaaacaagggaggagatagatgccgacgtggaaaaagatagaaacgaaggagttttcgaaggtaatatcattcctgatatcgacttgcgtgtagtacactactacgccacgcagttgtgtttgaataagtatcctcatttgattaacgcctttgatgagacaagccttataacattgggtttactcatcgaaaagtgggtaaaagactatttgaccagcatccagacagaacagggaaggcaaagtaaggtaatcgggaaggggccatgcgaattcatatccaaacatattgattataggcatgcgccaggtaatatctga

SEQ ID NO: 353 - DNA, 2055 bp, Saccharomyces cerevisiae
atggctagaagaaagaatttcaaaaaagggaacaagaagacttttggtgctcgtgatgactcgagagctcaaaaaaactggtctgaactggtaaaggaaaatgaaaaatgggaaaaatactataagactttagctcttttcccagaagatcaatgggaagaatttaaaaagacatgtcaagctccacttcctctaacttttagaattacaggttctagaaagcatgccggtgaggtcctgaatttgtttaaagaaagacatctaccaaacttgactaatgttgagtttgaaggtgagaagattaaggcccctgtagaattaccttggtatccagaccatcttgcttggcaattggacgttcctaagacggttattagaaagaatgaacaattcgcaaaaactcagagatttttagttgttgaaaatgccgttggtaatatctcaagacaagaagccgtttcaatgattcctccaatcgttctagaagtaaaacctcatcacactgttttagatatgtgtgctgctcctggctccaaaactgctcaattaatcgaagccttgcacaaggatacagatgaaccatctggtttcgttgtagctaatgatgccgatgccagaagatctcatatgttggttcaccaattgaagagattgaacagtgccaacttgatggttgtcaaccatgacgcccaattcttcccacgtatcagattacatggcaactcaaataacaagaatgatgttttaaaatttgacagaatcctgtgtgacgttccatgttctggtgatggtaccatgaggaaaaatgttaatgtttggaaagactggaacacacaagcaggtcttggtttgcatgctgttcagctgaatatattaaacaggggtttgcatcttctaaagaacaacggtagattggtttactcaacctgttctttaaatcctattgaaaatgaagcggttgttgccgaagcgttaagaaagtggggtgacaagattagattagttaactgtgatgataagcttcctggcctaataagatccaagggtgtatccaaatggcctgtctatgacagaaatttgactgagaaaaccaaaggagacgaaggtacactagatagtttcttttcaccatctgaagaagaggcatcgaaattcaatttacaaaattgtatgagggtttatcctcaccaacaaaacacaggcggatttttcattactgttttcgaaaaagtcgaagatagcactgaggcggctacagagaaactatcttctgaaaccccagctctagagtctgaaggacctcaaacaaagaaaataaaggtagaagaagtccaaaagaaagaaagactaccacgtgacgcgaacgaagagccttttgttttcgttgatccacagcacgaagctttaaaagtttgttgggatttctacggcatcgataatattttcgacagaaacacttgtttagtgcgtaacgccactggtgaaccaacaagagtggtttacactgtgtgtccagcattgaaggatgttattcaagcgaatgacgataggttgaagattatttattctggtgtaaaattgtttgtctctcaaagaagtgatatcgaatgttcatggagaatccaaagtgaatcattgccaataatgaaacaccatatgaaatctaatagaattgttgaagctaatttagagatgttaaaacacttgttaatcgaatctttccctaactttgacgacattcgttcgaagaacatcgataatgattttgttgaaaagatgacaaaattaagctctggttgcgcctttattgatgtgtcaagaaatgaccctgccaaagaaaacttattcttgcctgtgtggaaaggcaacaagtgtatcaatttgatggtttgtaaagaagatactcatgagctattatataggatctttggtattgatgcgaatgccaaggctactccaagcgctgaagaaaaagaaaaagaaaaagaaacgactgaatctcccgcagaaactactaccggaacctctactgaagctcctagcgctgctaattga

SEQ ID NO: 354 - DNA, 2055 bp, Artificial Sequence
  Description of Artificial Sequence: Synthetic polynucleotide
atggctagaagaaagaatttcaaaaaagggaacaagaagacttttggtgctcgtgatgacagtagagctcaaaaaaactggtctgaattggtaaaggaaaatgaaaaatgggaaaaatactataagactttagctcttttcccagaagatcaatgggaagaatttaaaaagacatgtcaagctccacttcctttaacttttagaattacaggttctagaaagcatgccggtgaggtcttgaatttgtttaaagaaagacatttaccaaacttgactaatgttgagtttgaaggtgagaagattaaggcccctgtagaattaccttggtatccagaccatcttgcttggcaattggacgttcctaagacggttattagaaagaatgaacaattcgcaaaaactcagagatttttagttgttgaaaatgccgttggtaatatctccagacaagaagccgtttctatgattcctccaatcgttttggaagtaaaacctcatcacactgttttagatatgtgtgctgctcctggctccaaaactgctcaattaatcgaagccttgcacaaggatacagatgaaccatctggtttcgttgtagctaatgatgccgatgccagaagatctcatatgttggttcaccaattgaagagattgaacagtgccaacttgatggttgtcaaccatgacgcccaattcttcccacgtatcagattacatggcaacagtaataacaagaatgatgttttaaaatttgacagaatcttgtgtgacgttccatgttctggtgatggtaccatgaggaaaaatgttaatgtttggaaagactggaacacacaagcaggtcttggtttgcatgctgttcagttgaatatattaaacaggggtttgcatcttttgaagaacaacggtagattggtttactctacctgttctttaaatcctattgaaaatgaagcggttgttgccgaagcgttaagaaagtggggtgacaagattagattagttaactgtgatgataagcttcctggcttgataagatccaagggtgtatccaaatggcctgtctatgacagaaatttgactgagaaaaccaaaggagacgaaggtacattagatagtttcttttctccatctgaagaagaggcatccaaattcaatttacaaaattgtatgagggtttatcctcaccaacaaaacacaggcggatttttcattactgttttcgaaaaagtcgaagatagcactgaggcggctacagagaaattatcttctgaaaccccagctttggagtctgaaggacctcaaacaaagaaaataaaggtagaagaagtccaaaagaaagaaagattaccacgtgacgcgaacgaagagccttttgttttcgttgatccacagcacgaagctttaaaagtttgttgggatttctacggcatcgataatattttcgacagaaacacttgtttagtgcgtaacgccactggtgaaccaacaagagtggtttacactgtgtgtccagcattgaaggatgttattcaagcgaatgacgataggttgaagattatttattctggtgtaaaattgtttgtctctcaaagaagtgatatcgaatgttcttggagaatccaaagtgaatctttgccaataatgaaacaccatatgaaatctaatagaattgttgaagctaatttagagatgttaaaacacttgttaatcgaatctttccctaactttgacgacattcgttccaagaacatcgataatgattttgttgaaaagatgacaaaattaagctctggttgcgcctttattgatgtgtccagaaatgaccctgccaaagaaaacttattcttgcctgtgtggaaaggcaacaagtgtatcaatttgatggtttgtaaagaagatactcatgagttattatataggatctttggtattgatgcgaatgccaaggctactccaagcgctgaagaaaaagaaaaagaaaaagaaacgactgaatctcccgcagaaactactaccggaacctctactgaagctcctagcgctgctaattga

SEQ ID NO: 355 - DNA, 2607 bp, Saccharomyces cerevisiae
atgtctgataatagaagacgtagacgtgaggaagatgattcggactcagaaaatgagctaccgccatcctcacctcagcaacattttagaggggggatgaacccagtttcatcacctattggttctccagatatgattaaccctgaaggtgacgataatgaagttgacgatgtaccagatattgatgaagttgaagaacaaatgaacgaagtagatttgatggacgataatatgtatgaggattatgcggctgatcataatagagatagatatgatccagatcaagttgacgacagggaacaacaagaactatctttaagcgaacgtcgccgcattgatgctcaactaaatgaaagagataggctattgagaaatgttgcctacatagatgacgaggacgaagaacaagaaggtgcagcgcaacttgatgaaatgggccttcctgtgcaaagacgaagaaggagaaggcagtatgaggacttagagaatagtgatgacgatctattgagtgacatggacattgacccattaagagaagaacttactttagaatctctgagtaacgttaaggctaacagttactcggaatggataacacaacctaatgtctcaagaactattgccagagagttaaaatcattcctgctggaatatacagatgaaacgggtcgttctgtatatggtgcacgtattagaacattaggtgaaatgaattctgaatctttggaggttaattatagacacttagcggagtccaaagccatcctggcactatttttagctaaatgtccagaagaaatgttgaaaatattcgatctcgtggctatggaggcaacagaattgcattacccagattatgcccgtattcactccgaaattcacgtaagaatctctgattttccaacaatatacagtttacgtgaattgcgtgagtctaatttgtcctctctagtacgcgtcactggggtggtgacaagaagaacaggagtcttccctcaattaaaatatgtcaaattcaattgtttgaaatgtggctccattttgggcccattttttcaagattctaatgaagaaattagaatctcattctgtacaaactgcaaatcaaaaggtccctttagagtcaatggagaaaaaactgtgtaccgaaattatcaaagggttacgctccaggaagctcccggaaccgttcctccaggccgtctaccaagacatagagaagtcattttgttggcggatttggtagatgtatccaagccaggtgaagaggtagaagttaccggcatctacaaaaataactacgatggtaacttgaatgcaaagaacggattccccgtttttgcaacaattatcgaggcaaattctataaaaagaagagagggcaatacagctaacgaaggcgaagaagggttggatgttttcagttggactgaagaagaagaacgtgaatttagaaagatttctagggatcgtggtataattgataaaattatatcatcgatggcaccgtctatctatggtcatagagatattaaaactgcagtcgcgtgctcattatttggaggtgttccaaaaaacgtcaatggaaaacattctattcgtggtgatatcaatgtgttattattaggtgatccaggtactgccaaatctcaaatcttaaaatacgtcgagaaaacagcgcatagagcggtctttgcaactggtcagggtgcttcggctgtcggtctgacagcatccgtcagaaaagatcctattactaaagaatggaccttagaagggggggcgctagtattggctgataagggtgtttgtttaattgatgaattcgataagatgaacgatcaggatcgtacatctattcatgaggctatggaacagcaaagtatttccatttccaaggccggtattgttactacattacaagcgcgctgctcaattattgctgcggcaaatcctaatggtggtagatataattcaaccttgcctttagctcagaatgttagtttgaccgagcctattctgtctagatttgatattttatgtgttgtcagagaccttgttgatgaagaggcagacgaaagattggccacatttgttgtcgattctcatgtaagatctcatccagaaaacgatgaagatcgagaaggcgaagagcttaaaaataatggcgaatcggcgatagaacaaggagaagatgaaataaatgagcagcttaatgcaaggcaaagaagacttcaaagacaaaggaagaaggaggaagagatctcgcctattccacaggaattattgatgaaatatattcactatgcgaggacaaaaatataccctaaattgcatcagatggatatggataaggttagcagggtatatgcggatttgagaagagaaagtatttctacaggttcgtttccaatcacagttcgtcatttagaatctattctaagaattgcagaatcttttgctaaaatgagattatctgaatttgtgtcttcttatgatttggatagagctatcaaagttgtagttgattcctttgttgatgcccaaaaagtcagtgttcgccgccaactccgcaggtctttcgcaatttataccttgggtcactaa

SEQ ID NO: 356 - DNA, 2607 bp, Artificial Sequence
  Description of Artificial Sequence: Synthetic polynucleotide
atgtctgataatagaagacgtagacgtgaggaagatgattctgactctgaaaatgagttaccgccatcctcccctcagcaacattttagaggggggatgaacccagtttcttctcctattggttctccagatatgattaaccctgaaggtgacgataatgaagttgacgatgtaccagatattgatgaagttgaagaacaaatgaacgaagtagatttgatggacgataatatgtatgaggattatgcggctgatcataatagagatagatatgatccagatcaagttgacgacagggaacaacaagaattatctttaagcgaacgtcgccgcattgatgctcaattgaatgaaagagataggttattgagaaatgttgcctacatagatgacgaggacgaagaacaagaaggtgcagcgcaacttgatgaaatgggccttcctgtgcaaagaagaagaaggagaaggcagtatgaggacttagagaatagtgatgacgatttattgagtgacatggacattgacccattaagagaagaacttactttagaatctttgagtaacgttaaggctaacagttactctgaatggataacacaacctaatgtctctagaactattgccagagagttaaaatctttcttattggaatatacagatgaaacgggtcgttctgtatatggtgcacgtattagaacattaggtgaaatgaattctgaatctttggaggttaattatagacacttagcggagtccaaagccatcttggcattatttttagctaaatgtccagaagaaatgttgaaaatattcgatctcgtggctatggaggcaacagaattgcattacccagattatgcccgtattcactccgaaattcacgtaagaatctctgattttccaacaatatacagtttacgtgaattgcgtgagtctaatttgtcctctttagtacgcgtcactggggtggtgacaagaagaacaggagtcttccctcaattaaaatatgtcaaattcaattgtttgaaatgtggctccattttgggcccattttttcaagattctaatgaagaaattagaatctctttctgtacaaactgcaaatctaaaggtccctttagagtcaatggagaaaaaactgtgtacagaaattatcaaagggttacgctccaggaagctcccggaaccgttcctccaggccgtttgccaagacatagagaagtcattttgttggcggatttggtagatgtatccaagccaggtgaagaggtagaagttaccggcatctacaaaaataactacgatggtaacttgaatgcaaagaacggattccccgtttttgcaacaattatcgaggcaaattctataaaaagaagagagggcaatacagctaacgaaggcgaagaagggttggatgttttcagttggactgaagaagaagaacgtgaatttagaaagatttctagggatcgtggtataattgataaaattatatcttctatggcaccgtctatctatggtcatagagatattaaaactgcagtcgcgtgctctttatttggaggtgttccaaaaaacgtcaatggaaaacattctattcgtggtgatatcaatgtgttattattaggtgatccaggtactgccaaatctcaaatcttaaaatacgtcgagaaaacagcgcatagagcggtctttgcaactggtcagggtgcttctgctgtcggtttaacagcatccgtcagaaaagatcctattactaaagaatggaccttagaagggggggcgttggtattggctgataagggtgtttgtttaattgatgaattcgataagatgaacgatcaggatcgtacatctattcatgaggctatggaacagcaaagtatttccatttccaaggccggtattgttactacattacaagcgcgctgctccattattgctgcggcaaatcctaatggtggtagatataattctaccttgcctttagctcagaatgttagtttgaccgagcctattttatctagatttgatattttatgtgttgtcagagaccttgttgatgaagaggcagacgaaagattggccacatttgttgtcgattctcatgtaagatctcatccagaaaacgatgaagatagagaaggcgaagagcttaaaaataatggcgaaagtgcgatagaacaaggagaagatgaaataaatgagcagcttaatgcaaggcaaagaagacttcaaagacaaaggaagaaggaggaagagatctctcctattccacaggaattattgatgaaatatattcactatgcgaggacaaaaatataccctaaattgcatcagatggatatggataaggttagcagggtatatgcggatttgagaagagaaagtatttctacaggttcttttccaatcacagttcgtcatttagaatctattttaagaattgcagaatcttttgctaaaatgagattatctgaatttgtgtcttcttatgatttggatagagctatcaaagttgtagttgattcctttgttgatgcccaaaaagtcagtgttcgccgccaactccgcaggtctttcgcaatttataccttgggtcactga

SEQ ID NO: 357 - DNA, 3402 bp, Saccharomyces cerevisiae
atgctaagaacaagaaccacaaagacccttagcacagtggcgaggaccacaagagctatccaatattaccgatctatcgctaagactgctgcagtttctcaaagaaggttcgcatcgaccttgaccgtgcgtgacgtagagaatatcaaacctagccatattattaagagtccaacatggcaagagttccagcatcaattgaaggatccaaggtacatggaacactttgcacaacttgatgcacagtttgctcggcatttcatggctacaaacagcggcaaaagtattctggcgaaagatgatagtacatctcagaaaaaggatgaagatgtcaagatagtacctgatgaaaaagatacagacaatgatgttgagcccacgcgagatgatgaaattgttaataaggaccaagaaggtgaagcttcgaaaaactccagaagctccgcttctggaggtggacagtcatcatccagtcgatcggattctggagatggaagttcgaaacaaaagcctccaaaggatgtaccagaagtatacccgcaaatgctagcattaccaatagccagacggcccttatttccagggttctacaaggcggttgtgatatcggacgaaagagttatgaaggcaatcaaggaaatgttagaccgccagcaaccctacattggcgctttcatgttgaagaactcggaagaagatactgatgtaatcacagataaaaatgatgtatacgatgttggtgttctggctcaaataactagcgctttcccgagtaaagacgaaaagacgggcactgaaacaatgactgctcttttatatcctcacaggagaataaaaattgatgaattatttccaccaaacgaggaaaaggaaaaatcaaaagaacaagcaaaggatacggatactgaaacgaccgtcgttgaagacgctaacaacccagaagaccaagaaagcaccagccctgctacgcctaagttggaggatattgtggtggagaggataccagactcagaattgcaacatcataagagagtagaagccactgaagaagagtctgaagaattagacgatattcaagaaggtgaggacattaaccccacagaattcttaaaaaattataatgtttcccttgtcaatgtgttgaatttagaagatgaaccgtttgatagaaagtcacccgttattaatgcgctaacatcagaaatattgaaggtatttaaagaaatttctcaattgaacacgatgttcagagaacaaattgcaactttttctgcttcaattcaatctgcgaccacgaacatttttgaggaaccagctagattggcagattttgccgctgctgtttctgccggcgaagaagacgaattacaagacatactgtcatctttaaacattgagcacagactagaaaagtcgctactagtccttaagaaagaattgatgaatgccgaattacagaacaaaatctccaaagatgtagagacaaagattcaaaagagacaaagagaatactatttgatggaacaattaaagggcatcaaaagagaattaggtattgacgacggccgtgacaaattgattgacacttataaagaaagaatcaagtcattaaaattgcctgatagcgttcaaaaaattttcgatgatgagataactaaattaagtaccttggagacttctatgtccgaatttggcgttatcagaaactatttggattggttaacatcgatcccatggggaaaacattccaaagaacagtattccattccgagagcaaagaaaattttagatgaagatcattatggtatggtagatgtcaaggatcgtatcttggagtttattgccgtcggtaaactattgggtaaagtcgatggtaaaatcatatgtttcgtaggacccccaggtgttggtaaaacgtccataggtaaatctatcgctagagctcttaacaggaaattcttccgattttctgtaggcggtatgacggacgtggcagaaataaaaggtcataggagaacgtatattggtgccttacctggcagagtagttcaagcattaaagaagtgccaaactcaaaatcctttgattttgatagatgaaatcgataagattggacacggcggcatacacggcgatccgtccgcggcattgttagaagtattggaccctgaacaaaacaacagcttcttggataactacttggatattcctattgacttatcaaaagtgcttttcgtttgcactgctaactctttggaaactattccaagacctttactggatcgtatggaagtcattgagttgacaggatatgttgctgaagacaaggttaagattgccgagcagtatttagttccaagtgccaagaaaagcgctggtctagaaaactctcatgttgatatgacagaagatgcaataacagcgttaatgaagtactactgtagagaaagtggtgtaaggaatttgaaaaaacacatcgagaaaatataccgtaaagcagccctacaagtggtaaagaagttgagtattgaagattccccaacgtcatcagccgacagcaagcctaaagaaagcgtttcttccgaagaaaaggcggaaaataacgccaaaagctcatcggagaagactaaggacaataattcggaaaagacaagcgatgacattgaagccttaaagacctctgaaaagatcaatgtttccatatcccagaaaaacctaaaagattacgttgggcctccagtctacactacagaccggttatacgaaacaactccaccaggggtagttatggggttggcgtggactaatatgggaggttgctcactttatgtagaatctgtccttgaacaacctttacacaactgcaagcatccaacatttgaaaggaccgggcaactgggagatgttatgaaggaatcatcaaggcttgcttattcattcgccaagatgtatttagcacaaaaattccctgagaacagattttttgaaaaggcgtctatccacttgcattgtcctgaaggtgctacccctaaagatggtccatctgcaggtgtcactatggccacttccttcctttccctagcattgaataagtcgattgacccaacggttgcgatgaccggtgaattgacacttaccggtaaagttttacgtatcggtgggttgagagaaaaagctgtggccgctaaaagatctggtgccaagactattattttccctaaagataacttaaatgattgggaggaacttccagacaatgtaaaggaagggttggaacctttagctgctgattggtataatgatatattccaaaaattattcaaggatgtgaatacgaaagaaggtaattcagtatggaaggctgaatttgagattttggatgctaaaaaggaaaaggactaa

SEQ ID NO: 358 - DNA, 3402 bp, Artificial Sequence
  Description of Artificial Sequence: Synthetic polynucleotide
atgttgagaacaagaaccacaaagacccttagcacagtggcgaggaccacaagagctatccaatattacagatctatcgctaagactgctgcagtttctcaaagaaggttcgcatctaccttgaccgtgcgtgacgtagagaatatcaaacctagccatattattaagagtccaacatggcaagagttccagcatcaattgaaggatccaaggtacatggaacactttgcacaacttgatgcacagtttgctagacatttcatggctacaaacagcggcaaaagtattttggcgaaagatgatagtacatctcagaaaaaggatgaagatgtcaagatagtacctgatgaaaaagatacagacaatgatgttgagcccacgagggatgatgaaattgttaataaggaccaagaaggtgaagcttccaaaaactccagaagctccgcttctggaggtggacagtcttcttccagtaggtctgattctggagatggaagttctaaacaaaagcctccaaaggatgtaccagaagtatacccgcaaatgttagcattaccaatagccagaagacccttatttccagggttctacaaggcggttgtgatatctgacgaaagagttatgaaggcaatcaaggaaatgttagaccgccagcaaccctacattggcgctttcatgttgaagaactctgaagaagatactgatgtaatcacagataaaaatgatgtatacgatgttggtgttttggctcaaataactagcgctttcccgagtaaagacgaaaagacgggcactgaaacaatgactgctcttttatatcctcacaggagaataaaaattgatgaattatttccaccaaacgaggaaaaggaaaaatctaaagaacaagcaaaggatacggatactgaaacgaccgtcgttgaagacgctaacaacccagaagaccaagaaagcaccagccctgctacgcctaagttggaggatattgtggtggagaggataccagactctgaattgcaacatcataagagagtagaagccactgaagaagagtctgaagaattagacgatattcaagaaggtgaggacattaaccccacagaattcttaaaaaattataatgtttcccttgtcaatgtgttgaatttagaagatgaaccgtttgatagaaagtctcccgttattaatgcgttaacaagtgaaatattgaaggtatttaaagaaatttctcaattgaacacgatgttcagagaacaaattgcaactttttctgcttccattcaatctgcgaccacgaacatttttgaggaaccagctagattggcagattttgccgctgctgtttctgccggcgaagaagacgaattacaagacatattatcttctttaaacattgagcacagattagaaaagtctttattggtccttaagaaagaattgatgaatgccgaattacagaacaaaatctccaaagatgtagagacaaagattcaaaagagacaaagagaatactatttgatggaacaattaaagggcatcaaaagagaattaggtattgacgacggccgtgacaaattgattgacacttataaagaaagaatcaagtctttaaaattgcctgatagcgttcaaaaaattttcgatgatgagataactaaattaagtaccttggagacttctatgtccgaatttggcgttatcagaaactatttggattggttaacatctatcccatggggaaaacattccaaagaacagtattccattccgagagcaaagaaaattttagatgaagatcattatggtatggtagatgtcaaggatcgtatcttggagtttattgccgtcggtaaacttttgggtaaagtcgatggtaaaatcatatgtttcgtaggacccccaggtgttggtaaaacgtccataggtaaatctatcgctagagctcttaacaggaaattcttcagattttctgtaggcggtatgacggacgtggcagaaataaaaggtcataggagaacgtatattggtgccttacctggcagagtagttcaagcattaaagaagtgccaaactcaaaatcctttgattttgatagatgaaatcgataagattggacacggcggcatacacggcgatccgtccgcggcattgttagaagtattggaccctgaacaaaacaacagcttcttggataactacttggatattcctattgacttatccaaagtgcttttcgtttgcactgctaactctttggaaactattccaagacctttattagatcgtatggaagtcattgagttgacaggatatgttgctgaagacaaggttaagattgccgagcagtatttagttccaagtgccaagaaaagcgctggtttggaaaactctcatgttgatatgacagaagatgcaataacagcgttaatgaagtactactgtagagaaagtggtgtaaggaatttgaaaaaacacatcgagaaaatataccgtaaagcagccttgcaagtggtaaagaagttgagtattgaagattccccaacgtcttctgccgacagcaagcctaaagaaagcgtttcttccgaagaaaaggcggaaaataacgccaaaagctcctctgagaagactaaggacaataattctgaaaagacaagcgatgacattgaagccttaaagacctctgaaaagatcaatgtttccatatcccagaaaaacttgaaagattacgttgggcctccagtctacactacagacagattatacgaaacaactccaccaggggtagttatggggttggcgtggactaatatgggaggttgcagcctttatgtagaatctgtccttgaacaacctttacacaactgcaagcatccaacatttgaaaggaccgggcaattaggagatgttatgaaggaatcttccaggcttgcttattctttcgccaagatgtatttagcacaaaaattccctgagaacagattttttgaaaaggcgtctatccacttgcattgtcctgaaggtgctacccctaaagatggtccatctgcaggtgtcactatggccacttccttcctttccttggcattgaataagtctattgacccaacggttgcgatgaccggtgaattgacacttaccggtaaagttttacgtatcggtgggttgagagaaaaagctgtggccgctaaaagatctggtgccaagactattattttccctaaagataacttaaatgattgggaggaacttccagacaatgtaaaggaagggttggaacctttagctgctgattggtataatgatatattccaaaaattattcaaggatgtgaatacgaaagaaggtaattctgtatggaaggctgaatttgagattttggatgctaaaaaggaaaaggactga

SEQ ID NO: 359 - DNA, 435 bp, Saccharomyces cerevisiae
atgaataccaacgagtccgaacatgttagcacaagcccagaggatactcaggagaacggtggaaacgctagctccagcggcagtttgcagcaaatttccacgctaagagagcaggacagatggctacccatcaacaatgtagcgcgactcatgaagaatactctcccaccgagtgctaaggtatcgaaagatgcgaaagagtgcatgcaggagtgtgtcagtgagctcatttcttttgtgactagcgaggccagcgatcgatgcgctgctgacaaaagaaagacgataaacggggaagacattctcatatcattgcacgccttaggattcgagaactatgcagaggtgttgaaaatctacttggctaaatacaggcaacaacaggcgctgaagaatcaactaatgtatgagcaggacgacgaagaggtgccttga

SEQ ID NO: 360 - DNA, 435 bp, Artificial Sequence
  Description of Artificial Sequence: Synthetic polynucleotide
atgaataccaacgagtccgaacatgttagcacaagcccagaggatactcaggagaacggtggaaacgctagctccagcggcagtttgcagcaaatttccacgttgagagagcaggacagatggttgcccatcaacaatgtagcgcgcctcatgaagaatactctcccaccgagtgctaaggtatccaaagatgcgaaagagtgcatgcaggagtgtgtcagtgagctcatttcttttgtgactagcgaggccagcgatcgttgcgctgctgacaaaagaaagacgataaacggggaagacattctcatatctttgcacgccttaggattcgagaactatgcagaggtgttgaaaatctacttggctaaatacaggcaacaacaggcgttaaagaatcaattgatgtatgagcaggacgacgaagaggtgccttga

SEQ ID NO: 361 - DNA, 1725 bp, Saccharomyces cerevisiae
atggcgaaaaaaaactcacaattgccctctactagtgagcagatcttggaaaggtccacaacaggagctaccttcctcatgatgggccaacttttcaccaaactggtaacgttcatactaaataatttgttgatcaggtttctgtcgcccagaattttcggtatcacggcctttctagaatttatacagggcacagtgttattttttagcagagatgcgattcgtctgtcgacgttgagaatctcagactccggtaatggaataatcgatgatgacgacgaggaggagtaccaggaaactcattacaagtctaaagttttgcaaaccgcagtcaattttgcttacattccgttttggatcgggtttccactgtccattggtcttatcgcctggcagtacagaaacatcaacgcgtatttcatcactcttccattcttcaggtggtcgatttttcttatctggctgagtatcatcgtggagctgttaagcgagccattcttcatcgtcaaccagtttatgttgaactatgccgcaaggtcaagatttgaaagcatcgcggtgactacaggatgtattgtcaattttatagttgtttatgccgttcagcaatcccgctacccaatgggggttgtcacatcggacattgacaaagaaggcatcgccatattggcatttgccttgggaaagttagcacattcgatcaccctgctagcatgttactactgggactatctcaagaatttcaaaccaaagaaattgttcagtaccaggctaacgaagataaaaacgcgtgaaaataacgaattgaagaaaggctacccaaagagcacatcttattttttccaaaacgacattttacagcacttcaaaaaagtttattttcaactatgttttaagcatttgttgacagagggtgataagttgattatcaattctttatgtactgtggaagaacaaggcatttacgctctattgtcgaactatggatcgctactaacaagattattatttgcgccgatcgaagaatctctgcggttatttttggcccgtttattatcctcgcataaccctaaaaatttaaaactatctattgaagtcctggtgaatttaacaaggttttacatatacttatcgttaatgatcattgtatttgggcctgccaattcatcctttttattgcagttcttgattggctcgaaatggtccactacttccgttttggacactataagagtctactgcttttacatcccatttttatcgcttaatggtatttttgaagcttttttccagagtgtagccactggtgaccaaattttgaaacattcatattttatgatggccttttctggtattttcctgctcaattcctggcttcttattgaaaaactcaaactatcaatcgaaggcttgatattgagtaacatcattaacatggtgttgagaatattgtattgtggagttttcttgaataaatttcatagggaactgtttacagattcctcttttttcttcaattttaaggatttcaaaacagttattattgctggctcaacgatctgtctacttgactggtggtttattgggtacgttaaaaatttacaacaatttgttgttaacgtattattcgcaatgggattgttagcgttaattttggtcaaggagcgccaaaccatacaatcttttattaacaagagggcggtttccaattctaaagatgtataa

SEQ ID NO: 362 - DNA, 1725 bp, Artificial Sequence
  Description of Artificial Sequence: Synthetic polynucleotide
atggcgaaaaaaaactctcaattgccctctactagtgagcagatcttggaaaggtccacaacaggagctaccttcctcatgatgggccaacttttcaccaaattagtaacgttcatattgaataatttgttgatcaggtttttatctcccagaattttcggtatcacggcctttttggaatttatacagggcacagtgttattttttagcagagatgcgattcgtttatctacgttgagaatcagtgactccggtaatggaataatcgatgatgacgacgaggaggagtaccaggaaactcattacaagtctaaagttttgcaaaccgcagtcaattttgcttacattccgttttggatcgggtttccattgtccattggtcttatcgcctggcagtacagaaacatcaacgcgtatttcatcactcttccattcttcaggtggtctatttttcttatctggttgagtatcatcgtggagttattaagcgagccattcttcatcgtcaaccagtttatgttgaactatgccgcaaggagcagatttgaaagcatcgcggtgactacaggatgtattgtcaattttatagttgtttatgccgttcagcaatcccgctacccaatgggggttgtcacaagtgacattgacaaagaaggcatcgccatattggcatttgccttgggaaagttagcacattctatcaccttattggcatgttactactgggactatctcaagaatttcaaaccaaagaaattgttcagtaccaggttgacgaagataaaaacgcgtgaaaataacgaattgaagaaaggctacccaaagagcacatcttattttttccaaaacgacattttacagcacttcaaaaaagtttattttcaattatgttttaagcatttgttgacagagggtgataagttgattatcaattctttatgtactgtggaagaacaaggcatttacgctttattgtctaactatggatctttattaacaagattattatttgcgccgatcgaagaatctttaagattatttttggcccgtttattatcctctcataaccctaaaaatttaaaattatctattgaagtcttggtgaatttaacaaggttttacatatacttatctttaatgatcattgtatttgggcctgccaattcttcctttttattgcagttcttgattggctctaaatggtccactacttccgttttggacactataagagtctactgcttttacatcccatttttatctcttaatggtatttttgaagcttttttccagagtgtagccactggtgaccaaattttgaaacattcttattttatgatggccttttctggtattttcttactcaattcctggcttcttattgaaaaactcaaattatctatcgaaggcttgatattgagtaacatcattaacatggtgttgagaatattgtattgtggagttttcttgaataaatttcatagggaattatttacagattcctcttttttcttcaattttaaggatttcaaaacagttattattgctggctctacgatctgtttgcttgactggtggtttattgggtacgttaaaaatttacaacaatttgttgttaacgtattattcgcaatgggattgttagcgttaattttggtcaaggagcgccaaaccatacaatcttttattaacaagagggcggtttccaattctaaagatgtatga

SEQ ID NO: 363 - DNA, 1563 bp, Saccharomyces cerevisiae
atgtcatcaagcgaaaacacgttactggatggaaagtcagagaacacaatacgatttttaactttcaatgtcaatggtataagaaccttttttcattatcaaccattttctcaaatgaatcaatcccttagatctgttttcgacttttttcgagcagacataataacattccaagagctcaagacggaaaaattgtctatctctaagtgggggagagttgatggtttttattcttttatttctatccctcaaaccagaaagggatattctggcgttggctgctggattagaattccggaaaagaaccacccactataccatgcattacaagtcgttaaggcagaagaaggtataacgggttacttgacaataaaaaatggtaagcattcagcaatctcctatagaaacgacgtaaatcaaggaattggtggttacgattctttagatcccgatttagatgagaaaagtgcactggaactagattcagaaggcagatgtgttatggttgaactggcatgtggaatagttattatcagtgtatattgtcccgcaaattcgaactcatcggaggagggtgagatgtttagattaaggttcttgaaagttttattaagaagagttcggaatttggacaaaattgggaagaagattgtgctaatgggcgacgtaaatgtttgccgggatcttatagacagtgccgatacattagaacaattctcaattccaataacagatcccatgggtggaacaaagttagaagcacaatatagggataaagcaatccaatttattatcaatccggacacgccacatcggaggatatttaatcaaatattggctgattcacttttaccagacgcgagtaaaagggggatactgatagacactacgaggctaattcaaacaagaaatcgacttaaaatgtatacagtctggaatatgttaaaaaatttaagaccttcgaattatggctcacggatagattttatcctagtgtccttaaagcttgaacgatgcataaaagcagctgacattcttccggatatattgggctctgaccattgtcctgtgtattctgatttagatatactggacgacagaattgaacctggtacgacacaagttcccataccaaaattcgaagcaaggtacaaatataatttaagaaaccataatgttttagagatgtttgccaaaaaggatacgaataaagaatctaataaacaaaaatattgtgtatcaaaagtcatgaataccaaaaaaaacagcaacatcaaaaacaaatcgctcgactcatttttccagaaggtaaatggagaaaaagatgacaggattaaagaatcctctgaaattccacagcaagctaaaaaaagaatctccacgccaaagttgaatttcaaggatgtctttggaaagcctcccctgtgcaggcatggggaggaatccatgctgaaaacatcgaaaacttcggccaatccaggtagaaagttctggatttgcaagagatctcggggtgattcaaataatacagaatcatcttgtgggttttttcagtgggtttaa

SEQ ID NO: 364 - DNA, 1563 bp, Artificial Sequence
  Description of Artificial Sequence: Synthetic polynucleotide
atgtcttctagcgaaaacacgttattagatggaaagagtgagaacacaataagatttttaactttcaatgtcaatggtataagaaccttttttcattatcaaccattttctcaaatgaatcaatcccttagatctgttttcgacttttttagagcagacataataacattccaagagctcaagacggaaaaattgtctatctctaagtgggggagagttgatggtttttattcttttatttctatccctcaaaccagaaagggatattctggcgttggctgctggattagaattccggaaaagaaccacccattgtaccatgcattacaagtcgttaaggcagaagaaggtataacgggttacttgacaataaaaaatggtaagcattctgcaatctcctatagaaacgacgtaaatcaaggaattggtggttacgattctttagatcccgatttagatgagaaaagtgcattggaattagattctgaaggcagatgtgttatggttgaattggcatgtggaatagttattatcagtgtatattgtcccgcaaatagcaactcttctgaggagggtgagatgtttagattaaggttcttgaaagttttattaagaagagttagaaatttggacaaaattgggaagaagattgtgttgatgggcgacgtaaatgtttgcagagatcttatagacagtgccgatacattagaacaattctccattccaataacagatcccatgggtggaacaaagttagaagcacaatatagggataaagcaatccaatttattatcaatccggacacgccacatagaaggatatttaatcaaatattggctgattctcttttaccagacgcgagtaaaagggggatattaatagacactacgaggttgattcaaacaagaaatagacttaaaatgtatacagtctggaatatgttaaaaaatttaagaccttccaattatggctctagaatagattttatcttagtgtccttaaagcttgaaagatgcataaaagcagctgacattcttccggatatattgggctctgaccattgtcctgtgtattctgatttagatatattggacgacagaattgaacctggtacgacacaagttcccataccaaaattcgaagcaaggtacaaatataatttaagaaaccataatgttttagagatgtttgccaaaaaggatacgaataaagaatctaataaacaaaaatattgtgtatccaaagtcatgaataccaaaaaaaacagcaacatcaaaaacaaatctctcgactcttttttccagaaggtaaatggagaaaaagatgacaggattaaagaatcctctgaaattccacagcaagctaaaaaaagaatctccacgccaaagttgaatttcaaggatgtctttggaaagcctcccctttgcaggcatggggaggaatccatgttgaaaacaagtaaaacttctgccaatccaggtagaaagttctggatttgcaagagatctcgtggtgattctaataatacagaaagctcttgtgggttttttcagtgggtttga

SEQ ID NO: 365 - DNA, 402 bp, Saccharomyces cerevisiae
atggggaaaaagacttttagagaatggcaatatttcaagttatcaattacttcattcgatcaagatgtggacgatgcacatgctattgatcaaatgacatggaggcaatggttaaataacgcattgaaacgtagttatggtatttttggtgaaggtgtagaatattcattcctgcatgttgacgataagctggcttacatcagagtaaatcatgcggataaagatacattttcttcgtccatcagtacatacatatctactgatgaactcgtcggttcaccattaacagtgtcaattctacaagaatcttccagtttgagacttctggaggttactgacgatgaccgcctatggctgaaaaaagtaatggaagaagaagaacaagactgtaaatgtatatag

SEQ ID NO: 366 - DNA, 402 bp, Artificial Sequence
  Description of Artificial Sequence: Synthetic polynucleotide
atggggaaaaagacttttagagaatggcaatatttcaagttatccattacttctttcgatcaagatgtggacgatgcacatgctattgatcaaatgacatggaggcaatggttaaataacgcattgaaacgtagttatggtatttttggtgaaggtgtagaatattctttcttacatgttgacgataagttggcttacatcagagtaaatcatgcggataaagatacattttcttcttccatcagtacatacatatctactgatgaactcgtcggttctccattaacagtgtccattttacaagaatcttccagtttgagacttttggaggttactgacgatgaccgcttatggttgaaaaaagtaatggaagaagaagaacaagactgtaaatgtatatga

SEQ ID NO: 367 - DNA, 4740 bp, Saccharomyces cerevisiae
atgatattacttcattttgtctattctctttgggccttacttctcattcctttaactaatgccgaagaattcacccccaaagtgacaaagactatcgcgcaagattcatttgatatattaagctttgatgattccaacactttaattagaaaacaagacacctccgttactataagctttgacgatggtgaaacatgggaaaaagttgaaggcattgaaggcgaaatcacttggatatacatcgaccccttcaatagacatgacagagccgttgcaacggcaatgaatgggtcgtacctttatataaccaatgatcaaggtaagtcatgggagcgtataacgctacctgactccggagaaagtatttcacctcgtgaatgctatatagaaacccatcccttgaataagaactattttcttgcaaagtgcaactattgtgagaaaacagaagtaaacaatgacaatgaagagaattcgggggacgaagagggacaatttgaaatatttaatattacacgttgcacagacaaggtttttgcaagtaatgatggtggaaaatccttttctgagatcaagtcttctctagaaaggaacgaaaatagtcctatcagcatttctgattgtggctttgccaagaccagcaaagattctgaccttgaaagtagtgatacctcaataatctgtctttttcaaaatatgcagcttattatggatgagtttagttctccttacaccgaaagtaaattggtcctaactacggactggggcaaatcactaaaagaatttgaccaatttaaagataaggtcgtcaatggttacaggatattgaaatctcacatggttgtcttaacccagggcgacagatataatgatatgtcttccatggatgtgtgggtatcaaatgatctgtcaaactttaaaatggcttacatgcctactcagttaaggcattctatgcaaggagaaatatatgaggacgctatgggaagaattatcttgcccatgagtagggaaagaagtgatcaagaggaggataagggcatcgtgtctgaaattttaatttccgactcacaagggttaaaattttcccccatcccatggaccgcaaatgaggtgtttggttatattaatttttatcaacctacttacttgaaaggaacgatgattgcctcactttaccctctatctaggcgtcgtaaccgtaaaggaaaagccaaaggagtaaagagtaagggggtaaccaaaatatctgttgataatggcctcacatggacaatgttaaaagttgttgatccagataacgcagactcattcgactgtgatattactgattttgagaattgttcgcttcaaaatatgttttacacacgggagggttccactccaaccgccggaattctaatgacaacaggtattgttggcgatggtagtgtcttcgactggggagatcaaagaacctttatttctagggatggtggcttaacatggaaactcgcctttgattttccttgtttatacgctgttggtgattacggaaatgttattgtggctataccgtataatgcggatgaagacgacgatcctcaatccgaattttattactctttagaccaaggtaaaacttggaccgaatatcagctagaaactactatctacccaaatgaagtaatgaatacaacgcccgacggatctggagctaaatttattctaaatgggtttactttggcgcatatggatggtacaacgaatttcatctatgcaattgatttttcaacagcctttaatgataagacatgcgaagaaaatgatttcgaggattggaatttagctgaggggaagtgtgtcaatggagtcaagtacaagatcagaagaagaaaacaggacgctcagtgcttggtgaagaaagtttttgaagacttacaattatttgagactgcttgtgacaagtgtaccgaggctgattacgaatgcgcgtttgaatttgttagggacgcgaccgggaaatgcgtaccagactacaacctaatcgttctctctgacgtatgtgataagacaaagaaaaaaactgtgcctgtaaaaccattgcaactagttaaaggtgataaatgtaaaaaaccaatgacagtcaaatcagtggatatttcgtgtgagggagttccaaagaagggaacgaatgataaagaaatagtggttacagaaaacaaatttgatttcaagattcaattctatcaatactttgacacagtcaccgacgaatccctcctcatgatcaattcaagaggagaagcttatatatctcatgatggtggacaaacaataaaaaggttcgacagtaatggtgaaacaattattgaagttgtgtttaatccatactacaattcttcagcttatctgtttggttccaaaggtagcattttctctacccatgataggggatactcttttatgactgctaaattgcccgaggctaggcagttaggtatgccattagactttaacgctaaggcacaggatacatttatctattatggtggtaagaattgtgagtcaatcttaagtccggaatgtcatgcggtagcatacctgaccaatgatgggggcgaaacgtttacggaaatgcttgataatgcaattcattgtgagtttgcgggctcacttttcaaatatccgtcaaatgaggatatggttatgtgtcaagtgaaggaaaagtcttcgcagacaagaagcttagtttcttctactgattttttccaggatgataaaaataccgtctttgaaaatattatcggctacttatccactggtggctatatcatcgttgctgttcctcatgagaacaacgaattgagagcatacgtaactatcgatggtactgagtttgccgaggcaaaattcccatatgatgaagatgttgggaagcaagaggcattcactatattagagtctgagaaaggatcgatattcttacatttagcaacaaacttagtaccaggacgcgattttggcaatcttttgaaatccaactcaaatggtacttcttttgtcacgttggagcatgccgttaatagaaacacattcggctatgttgactttgaaaaaattcaaggtctcgaaggcattattctcaccaacatcgtttcaaatagtgacaaggtcgccgagaataaagaagacaaacaattgaagacgaagatcacctttaatgaaggttcagattggaactttttgaaacctccgaagagggattcagaaggaaaaaagttttcttgcagctccaaatcactggatgagtgttcattgcacttacatggctatactgaacgtaaggatattagagatacatattcttccggttctgcattaggaatgatgttcggcgttggcaacgttggtcctaaccttttaccatataaagaatgttccaccttcttcaccaccgatggtggcgaaacgtgggctgaagttaagaagactcctcaccaatgggaatacggtgaccacggtgggattttagttttagttcctgaaaactcagaaactgattctatttcctattctaccgattttggtaaaacatggaaagattataaattctgcgctgataaggttttagtaaaggatataaccactgttcccagggattctgctttgagatttttgctgtttggagaggcagcagatattggaggcagctcatttagaacgtacacaattgattttagaaacatcttcgaaagacaatgtgatttcgacatcactggtaaggaaagcgcagattataaatactctcctctgggttccaaaagcaattgcctatttggtcaccaaaccgagtttttacgtaaaaccgatgaaaattgttttattgggaatattccactttctgaattttcaagaaatatcaaaaactgttcttgtacaagacaagatttcgagtgtgattacaacttttacaaagctaacgatggtacttgtaaattagtcaaaggactaagcccagcaaatgctgcagacgtttgtaaaaaagagccagatttaatcgaatattttgaatcgtcaggctacagaaagatccctctatcaacctgtgagggtggcctgaaattggatgctccctcatcaccacatgcttgcccaggaaaagaaaaagaattcaaggaaaagtactcagtaagtgccggtccctttgcatttattttcatttcaattcttttaataattttctttgccgcatggtttgtatatgacagaggtatcagaagaaatgggggatttgcaaggtttggagaaattaggctaggtgacgatggtttaatagaaaacaataatactgacagagttgtcaataacattgtgaaatcaggattttacgttttctcaaatatcgggtctcttttacagcacacaaaaactaatatagcgcatgctatctccaaaattagaggaaggtttggaaacagaacaggtccaagctactcatccctgatccatgatcaatttttggatgaagcagatgacctgcttgctggccacgatgaagacgccaatgacttatccagtttcatggatcagggtagtaattttgaaatcgaagaagatgatgttccaacacttgaagaagagcatacatcatatacagatcaacctacgaccaccgatgttccagatacattaccagaaggaaatgaggaaaacatcgacaggcctgattctacagcgccatctaacgaaaaccagtag

SEQ ID NO: 368 - DNA, 4740 bp, Artificial Sequence
  Description of Artificial Sequence: Synthetic polynucleotide
atgatattacttcattttgtctattctctttgggccttacttctcattcctttaactaatgccgaagaattcacccccaaagtgacaaagactatcgcgcaagattcttttgatatattaagctttgatgattccaacactttaattagaaaacaagacacctccgttactataagctttgacgatggtgaaacatgggaaaaagttgaaggcattgaaggcgaaatcacttggatatacatcgaccccttcaatagacatgacagagccgttgcaacggcaatgaatgggtcttacctttatataaccaatgatcaaggtaagtcttgggagcgtataacgttacctgactccggagaaagtatttctcctcgtgaatgctatatagaaacccatcccttgaataagaactattttcttgcaaagtgcaactattgtgagaaaacagaagtaaacaatgacaatgaagagaatagtggggacgaagagggacaatttgaaatatttaatattacacgttgcacagacaaggtttttgcaagtaatgatggtggaaaatccttttctgagatcaagtcttctttggaaaggaacgaaaatagtcctatcagcatttctgattgtggctttgccaagaccagcaaagattctgaccttgaaagtagtgataccagtataatctgtctttttcaaaatatgcagcttattatggatgagtttagttctccttacaccgaaagtaaattggtcttgactacggactggggcaaatctttgaaagaatttgaccaatttaaagataaggtcgtcaatggttacaggatattgaaatctcacatggttgtcttaacccagggcgacagatataatgatatgtcttccatggatgtgtgggtatctaatgatttatctaactttaaaatggcttacatgcctactcagttaaggcattctatgcaaggagaaatatatgaggacgctatgggaagaattatcttgcccatgagtagggaaagaagtgatcaagaggaggataagggcatcgtgtctgaaattttaatttccgactctcaagggttaaaattttcccccatcccatggaccgcaaatgaggtgtttggttatattaatttttatcaacctacttacttgaaaggaacgatgattgcctctctttaccctttatctaggcgtcgtaaccgtaaaggaaaagccaaaggagtaaagagtaagggggtaaccaaaatatctgttgataatggcctcacatggacaatgttaaaagttgttgatccagataacgcagactctttcgactgtgatattactgattttgagaattgttctcttcaaaatatgttttacacaagagagggttccactccaaccgccggaattttgatgacaacaggtattgttggcgatggtagtgtcttcgactggggagatcaaagaacctttatttctagggatggtggcttaacatggaaactcgcctttgattttccttgtttatacgctgttggtgattacggaaatgttattgtggctataccgtataatgcggatgaagacgacgatcctcaatccgaattttattactctttagaccaaggtaaaacttggaccgaatatcagttagaaactactatctacccaaatgaagtaatgaatacaacgcccgacggatctggagctaaatttattttgaatgggtttactttggcgcatatggatggtacaacgaatttcatctatgcaattgatttttctacagcctttaatgataagacatgcgaagaaaatgatttcgaggattggaatttagctgaggggaagtgtgtcaatggagtcaagtacaagatcagaagaagaaaacaggacgctcagtgcttggtgaagaaagtttttgaagacttacaattatttgagactgcttgtgacaagtgtaccgaggctgattacgaatgcgcgtttgaatttgttagggacgcgaccgggaaatgcgtaccagactacaacttgatcgttctctctgacgtatgtgataagacaaagaaaaaaactgtgcctgtaaaaccattgcaattggttaaaggtgataaatgtaaaaaaccaatgacagtcaaatctgtggatattagttgtgagggagttccaaagaagggaacgaatgataaagaaatagtggttacagaaaacaaatttgatttcaagattcaattctatcaatactttgacacagtcaccgacgaatccctcctcatgatcaattctagaggagaagcttatatatctcatgatggtggacaaacaataaaaaggttcgacagtaatggtgaaacaattattgaagttgtgtttaatccatactacaattcttctgcttatttatttggttccaaaggtagcattttctctacccatgataggggatactcttttatgactgctaaattgcccgaggctaggcagttaggtatgccattagactttaacgctaaggcacaggatacatttatctattatggtggtaagaattgtgagagtatcttaagtccggaatgtcatgcggtagcatacttgaccaatgatgggggcgaaacgtttacggaaatgcttgataatgcaattcattgtgagtttgcgggctctcttttcaaatatccgtccaatgaggatatggttatgtgtcaagtgaaggaaaagtcttctcagacaagaagcttagtttcttctactgattttttccaggatgataaaaataccgtctttgaaaatattatcggctacttatccactggtggctatatcatcgttgctgttcctcatgagaacaacgaattgagagcatacgtaactatcgatggtactgagtttgccgaggcaaaattcccatatgatgaagatgttgggaagcaagaggcattcactatattagagtctgagaaaggatccatattcttacatttagcaacaaacttagtaccaggacgcgattttggcaatcttttgaaatccaacagtaatggtacttcttttgtcacgttggagcatgccgttaatagaaacacattcggctatgttgactttgaaaaaattcaaggtctcgaaggcattattctcaccaacatcgtttctaatagtgacaaggtcgccgagaataaagaagacaaacaattgaagacgaagatcacctttaatgaaggttctgattggaactttttgaaacctccgaagagggattctgaaggaaaaaagttttcttgcagctccaaatctttagatgagtgttctttgcacttacatggctatactgaacgtaaggatattagagatacatattcttccggttctgcattaggaatgatgttcggcgttggcaacgttggtcctaaccttttaccatataaagaatgttccaccttcttcaccaccgatggtggcgaaacgtgggctgaagttaagaagactcctcaccaatgggaatacggtgaccacggtgggattttagttttagttcctgaaaactctgaaactgattctatttcctattctaccgattttggtaaaacatggaaagattataaattctgcgctgataaggttttagtaaaggatataaccactgttcccagggattctgctttgagatttttgttatttggagaggcagcagatattggaggcagctcctttagaacgtacacaattgattttagaaacatcttcgaaagacaatgtgatttcgacatcactggtaaggaaagcgcagattataaatactctcctttaggttccaaaagcaattgcttatttggtcaccaaaccgagtttttacgtaaaaccgatgaaaattgttttattgggaatattccactttctgaattttccagaaatatcaaaaactgttcttgtacaagacaagatttcgagtgtgattacaacttttacaaagctaacgatggtacttgtaaattagtcaaaggattaagcccagcaaatgctgcagacgtttgtaaaaaagagccagatttaatcgaatattttgaatcttctggctacagaaagatccctttatctacctgtgagggtggcttgaaattggatgctccctcttctccacatgcttgcccaggaaaagaaaaagaattcaaggaaaagtacagtgtaagtgccggtccctttgcatttattttcatttccattcttttaataattttctttgccgcatggtttgtatatgacagaggtatcagaagaaatgggggatttgcaaggtttggagaaattaggcttggtgacgatggtttaatagaaaacaataatactgacagagttgtcaataacattgtgaaaagtggattttacgttttcagtaatatcgggtctcttttacagcacacaaaaactaatatagcgcatgctatctccaaaattagaggaaggtttggaaacagaacaggtccaagctactcttccttaatccatgatcaatttttggatgaagcagatgacttacttgctggccacgatgaagacgccaatgacttatccagtttcatggatcagggtagtaattttgaaatcgaagaagatgatgttccaacacttgaagaagagcatacatcttatacagatcaacctacgaccaccgatgttccagatacattaccagaaggaaatgaggaaaacatcgacaggcctgattctacagcgccatctaacgaaaaccagtga

SEQ ID NO: 369 - DNA, 1062 bp, Saccharomyces cerevisiae
atgccaaagagaattgtatacaatatatccagtgacttccagttgaagtcgttactgggagagggtgcatacggtgtggtatgttctgcaacgcataagcccacgggagaaatcgtggcaataaaaaagatcgaaccattcgataagcctttgttcgcattacgtacgctgcgtgaaataaagatcctgaagcacttcaagcacgaaaatatcataacaatcttcaacattcaacgccctgactcgttcgaaaacttcaatgaggtctacataattcaagagctaatgcagacagatttacaccgtgtaatctccacccagatgctgagtgacgatcatatacaatattttatataccaaaccttgagagcagtgaaagtgctgcatggttcgaacgtcatccatcgtgatttaaagccctccaaccttctcataaactccaactgtgacttgaaagtatgtgatttcggtttagcaagaatcattgacgagtcagccgcggacaattcagagcccacaggtcagcaaagcggcatgaccgagtatgtggccacacgttggtacagggcgccagaggtgatgttaacctctgccaaatactcaagggccatggacgtgtggtcctgcggatgtattctcgctgaacttttcttaagacggccaatcttccctggcagagattatcgccatcaactactactgatattcggtatcatcggtacacctcactcagataatgatttgcggtgtatagagtcacccagggctagagagtacataaagtcgcttcccatgtaccctgccgcgccactggagaagatgttccctcgagtcaacccgaaaggcatagatcttttacagcgtatgcttgtttttgaccctgcgaagaggattactgctaaggaggcactggagcatccgtatttgcaaacataccacgatccaaacgacgaacctgaaggcgaacccatcccacccagcttcttcgagtttgatcactacaaggaggcactaacgacgaaagacctcaagaaactcatttggaacgaaatatttagttag

SEQ ID NO: 370 - DNA, 1062 bp, Artificial Sequence
  Description of Artificial Sequence: Synthetic polynucleotide
atgccaaagagaattgtatacaatatatccagtgacttccagttgaagtctttattaggagagggtgcatacggtgtggtatgttctgcaacgcataagcccacgggagaaatcgtggcaataaaaaagatcgaaccattcgataagcctttgttcgcattacgtacgttgcgtgaaataaagatcttgaagcacttcaagcacgaaaatatcataacaatcttcaacattcaacgccctgactctttcgaaaacttcaatgaggtctacataattcaagagttgatgcagacagatttacaccgtgtaatctccacccagatgttaagtgacgatcatatacaatattttatataccaaaccttgagagcagtgaaagtgttacatggttccaacgtcatccatcgtgatttaaagccctccaaccttctcataaactccaactgtgacttgaaagtatgtgatttcggtttagcaagaatcattgacgagtctgccgcggacaattctgagcccacaggtcagcaaagcggcatgaccgagtatgtggccacacgttggtacagggcgccagaggtgatgttaacctctgccaaatactctagggccatggacgtgtggtcctgcggatgtattctcgctgaacttttcttaagaagaccaatcttccctggcagagattatcgccatcaattattattgatattcggtatcatcggtacacctcacagtgataatgatttgagatgtatagagtctcccagggctagagagtacataaagtctcttcccatgtaccctgccgcgccattggagaagatgttccctcgtgtcaacccgaaaggcatagatcttttacagcgtatgcttgtttttgaccctgcgaagaggattactgctaaggaggcattagagcatccgtatttgcaaacataccacgatccaaacgacgaacctgaaggcgaacccatcccacccagcttcttcgagtttgatcactacaaggaggcattgacgacgaaagacctcaagaaactcatttggaacgaaatatttagttga

SEQ ID NO: 371 - DNA, 1581 bp, Saccharomyces cerevisiae
atgacaatttctaatttgttaaagcagagagttaggtatgctccctatctgaaaaaagttaaggaagctcacgagcttattccattgttcaagaatggtcagtaccttgggtggtccggttttacaggagtgggtactcccaaggcagtgccggaggcactgatagatcacgtggagaagaacaatttacaagggaagttgagattcaacctttttgttggagcttctgctggtccagaggaaaaccgttgggctgaacacgacatgatcattaagagagcccctcatcaagtagggaaacccattgcaaaggcaattaaccagggtagaattgagttctttgataaacatctgtccatgttccctcaggatctgacatacgggttctacaccagggaaagaaaagacaacaaaatccttgattatactataatcgaggcaacggccattaaagaggacgggtctatcgtcccaggtccctctgtcggtggttctccagaattcattacagtcagtgataaagtgattattgaggttaacacggctacgccttcgttcgagggtattcacgatatagacatgcccgtgaacccacctttcaggaaaccatacccatatctgaaagtggacgacaagtgtggtgttgactccatcccggttgatcctgaaaaggttgttgcgattgtggagtccaccatgagggaccaggtcccaccaaatacgccctctgacgacatgtccagggctattgcaggtcatttggtcgagtttttcagaaacgaggtaaaacatggtaggctacctgaaaacctgctgcctttacaaagtggtataggtaacattgctaacgctgtcattgaagggcttgctggcgcccaattcaagcacttgactgtatggacggaagtgctgcaggactcgttcttggatcttttcgagaacggatctttggactacgccactgctacttccgtgagattgactgaaaagggtttcgacagagcctttgcaaactgggaaaatttcaaacacagattgtgtttgagatctcaagttgtctcgaacaatccggaaatgatccgtagattgggtgtcatcgccatgaataccccagtagaagttgacatttacgcgcacgccaattctacaaatgtgaatggttcccgtatgttgaacgggttgggtggatctgctgatttcttgagaaatgcaaagttgtccatcatgcatgccccctctgcaagaccaactaaagtagaccctaccggtatctctaccattgttcctatggcctctcatgtagatcaaactgagcatgacctggacatcttggtcactgaccaaggtttggcggatctaagaggtctatcgcctaaggaaagagcccgtgaaatcatcaacaagtgtgctcatcccgattatcaagctttgttgaccgattacttggacagagcagagcattacgctaaaaagcacaattgcttgcatgaaccacacatgctaaagaatgctttcaagttccacaccaacttagctgaaaagggtacaatgaaggtcgacagctgggaaccagttgactag

SEQ ID NO: 372 - DNA, 1581 bp, Artificial Sequence
  Description of Artificial Sequence: Synthetic polynucleotide
atgacaatttctaatttgttaaagcagagagttaggtatgctccctatttgaaaaaagttaaggaagctcacgagcttattccattgttcaagaatggtcagtaccttgggtggtccggttttacaggagtgggtactcccaaggcagtgccggaggcattaatagatcacgtggagaagaacaatttacaagggaagttgagattcaacctttttgttggagcttctgctggtccagaggaaaaccgttgggctgaacacgacatgatcattaagagagcccctcatcaagtagggaaacccattgcaaaggcaattaaccagggtagaattgagttctttgataaacatttgtccatgttccctcaggatttaacatacgggttctacaccagggaaagaaaagacaacaaaatccttgattatactataatcgaggcaacggccattaaagaggacgggtctatcgtcccaggtccctctgtcggtggttctccagaattcattacagtcagtgataaagtgattattgaggttaacacggctacgccttctttcgagggtattcacgatatagacatgcccgtgaacccacctttcaggaaaccatacccatatttgaaagtggacgacaagtgtggtgttgactccatcccggttgatcctgaaaaggttgttgcgattgtggagtccaccatgagggaccaggtcccaccaaatacgccctctgacgacatgtccagggctattgcaggtcatttggtcgagtttttcagaaacgaggtaaaacatggtaggttgcctgaaaacttattgcctttacaaagtggtataggtaacattgctaacgctgtcattgaagggcttgctggcgcccaattcaagcacttgactgtatggacggaagtgttacaggactctttcttggatcttttcgagaacggatctttggactacgccactgctacttccgtgagattgactgaaaagggtttcgacagagcctttgcaaactgggaaaatttcaaacacagattgtgtttgagatctcaagttgtctccaacaatccggaaatgatccgtagattgggtgtcatcgccatgaataccccagtagaagttgacatttacgcgcacgccaattctacaaatgtgaatggttcccgtatgttgaacgggttgggtggatctgctgatttcttgagaaatgcaaagttgtccatcatgcatgccccctctgcaagaccaactaaagtagaccctaccggtatctctaccattgttcctatggcctctcatgtagatcaaactgagcatgacttggacatcttggtcactgaccaaggtttggcggatttgagaggtttatctcctaaggaaagagcccgtgaaatcatcaacaagtgtgctcatcccgattatcaagctttgttgaccgattacttggacagagcagagcattacgctaaaaagcacaattgcttgcatgaaccacacatgttgaagaatgctttcaagttccacaccaacttagctgaaaagggtacaatgaaggtcgacagctgggaaccagttgactga

SEQ ID NO: 373 - DNA, 2685 bp, Saccharomyces cerevisiae
atgagtgagggacaaattccaagctcagatgtgttaggctcgcaattgggtgttggtgtacaaggcgccagtctttactgtccgcaagaaaattacactacgaagaagcaagaaaagccacaatggctaagaccagtagatgatacattggccgaggatgcactagaccttcatatagtggtcaaaagtctgctttgtgatactgccataagatatatttccgacgacaaggttttgcaagaatcagatgccgacgatgatctcataactagcgatattgatgaagatacggacaatcagggggatacatctatagtggtcaatccagtgatacccgtggtaccgaaagatgtccatttttttaagaaagttgacgttggtaatgattctatgtttggtgtgaactgcgatacgccagtttcatttcaagattacattccttcagatttgctgcgcaacttagatgatacattacaagaaagtactaactcttcgaggccgatgcaagacgccttcttttgggatcctactgtggctaatcgactggactctcaatatattcagacagcatcagatttaagaaattatagagacggaaccgaaatcatagcatatgcctcgggtaaaacaggctcagtcctaaatatagcagttctgacacgacaaaatacattgcatttaaaccgacataacaatgtaacgagtatcgaattgcattcacctatcaagagtattaagataccgggggcctctgagtccatcgggcggagatcaaacctggtgggcataatcaccgaaaattctttccaaatctttagaattgaaagtgtccactcaagatcatgtgatgtcatggttagtagttcagaaccactgtattttgttgaaatagacgaccttcaggtggtagattttgcattcaatccttgggacttacaacaattcgcaatcattgatataaaaggtaactggagtatcgggaggataccaaagaatttcaataataataacaaaaggaaactacagttaatagataacctccacggtacgatttttgatccagaagaattatcgtcatggaaaagaatagaatggttttcacacttccaaaaaatactggtctttgataggtccaaaatgattgagatcgactttatgaacaattggcaaacggaagtagtacaagcgaaagcatggtcaaacatacgtgattataagcggatagatgataaaaatggtattttactcacttcaagggaaataatcatcgtaggggcatcagaatcaaatgatccagtgagaagaatatcttggaaacacgatctggatccagatgatactacgctcagaatcactgtacaaaaggttaaaaagcctgaccatattcttctggtggcctttgtatattcgatgcggcataaacgcatctatatgcatgtattttcccataggaaagcaaacttgtttcaatccttaggatgctcaacagttcttgaaattccgggtgggacccccaccggtatagagacaatcttaacactggatcatatagacgatgaatctcggagagaggaggatgcagatgaaaattttgagttagttgtagattttttagtcaaactaaggaactcatccgaggtttattactatgctttatcaaacactcaaaactccgaaccgaacaaacaagaaacccccatcattgtcgaccatcccgaatgggcgtcacttttcaataacgctgatgaacgtgaaaaggagagtatcggtgcactggtttctcaaattaagttgaaggaaagagagcgcatatctcgagtccaaaatttaattgagcatgaaaacagtcacgacgaagataaatatctccaagatttgggatatcgcttatctatagctacaaacgaattgcttgaatcttggcagaagacgaaagatgaaagcatccttagtgggtctttgagccattcaaaattgaaaaaccttttggagaattcagattccttcgcgagtatacctgaattttcttcattactagatcagtttttccagtactatcaggatcaggatgtgacatttattggttttgagaaattgctacatttgtttttacatgaagacgttccgggcttggatatcttttacaacaaattattgcaatgttgggttttggtatccccgcaagcggaactgctgacaaaggagatagtcaaagacattatctggagtttagcgagacttgaaaaaccatcactttttgaaccgattcaaaacgaaatttcacgatcactaagtggtccttaccaggatattatctcctcttgggatatggatgatatcaatgaagaagatgaatctaatgaatttaattttgatagtcaattttcagcaccctttaatggcaggcctccatttaatttaaattcgcaatctcaaattccaacgatcaaatcatcacaaagtagcggactggcaaggaggaaaagaatattaaagacacaatcacaaaaagctactccgttatcacaatccactcaaaacttaagtgtcctgccagattcaatgacaccagcatttactctaatgcagcccccttcctcgcagatatcatttgtgaacgattcacaaccgcgtaattctcaaaaagccaaaaagaagaagaaaaggatccgggggtttggataa

SEQ ID NO: 374 - DNA, 2685 bp, Artificial Sequence
  Description of Artificial Sequence: Synthetic polynucleotide
atgagtgagggacaaattccaagcagtgatgtgttaggctctcaattgggtgttggtgtacaaggcgccagtctttactgtccgcaagaaaattacactacgaagaagcaagaaaagccacaatggttgagaccagtagatgatacattggccgaggatgcattggaccttcatatagtggtcaaaagtttactttgtgatactgccataagatatatttccgacgacaaggttttgcaagaaagtgatgccgacgatgatctcataactagcgatattgatgaagatacggacaatcagggggatacatctatagtggtcaatccagtgatacccgtggtaccgaaagatgtccatttttttaagaaagttgacgttggtaatgattctatgtttggtgtgaactgcgatacgccagtttcttttcaagattacattccttctgatttgttacgcaacttagatgatacattacaagaaagtactaactcttccaggccgatgcaagacgccttcttttgggatcctactgtggctaatagattagactctcaatatattcagacagcatctgatttaagaaattatagagacggaaccgaaatcatagcatatgcctctggtaaaacaggctctgtcttgaatatagcagttttgacaagacaaaatacattgcatttaaacagacataacaatgtaacgagtatcgaattgcattctcctatcaagagtattaagataccgggggcctctgagtccatcgggagaagatctaacttggtgggcataatcaccgaaaattctttccaaatctttagaattgaaagtgtccactccagatcttgtgatgtcatggttagtagttctgaaccattgtattttgttgaaatagacgaccttcaggtggtagattttgcattcaatccttgggacttacaacaattcgcaatcattgatataaaaggtaactggagtatcgggaggataccaaagaatttcaataataataacaaaaggaaattacagttaatagataacctccacggtacgatttttgatccagaagaattatcttcttggaaaagaatagaatggttttctcacttccaaaaaatattggtctttgataggtccaaaatgattgagatcgactttatgaacaattggcaaacggaagtagtacaagcgaaagcatggagcaacatacgtgattataagagaatagatgataaaaatggtattttactcacttctagggaaataatcatcgtaggggcatctgaaagtaatgatccagtgagaagaatatcttggaaacacgatttggatccagatgatactacgctcagaatcactgtacaaaaggttaaaaagcctgaccatattcttttagtggcctttgtatattccatgagacataaacgcatctatatgcatgtattttcccataggaaagcaaacttgtttcaatccttaggatgctccacagttcttgaaattccgggtgggacccccaccggtatagagacaatcttaacattagatcatatagacgatgaatctagaagagaggaggatgcagatgaaaattttgagttagttgtagattttttagtcaaattgaggaactcttccgaggtttattactatgctttatctaacactcaaaactccgaaccgaacaaacaagaaacccccatcattgtcgaccatcccgaatgggcgtcccttttcaataacgctgatgaacgtgaaaaggagagtatcggtgcattggtttctcaaattaagttgaaggaaagagagcgcatatctcgtgtccaaaatttaattgagcatgaaaacagtcacgacgaagataaatatctccaagatttgggatatcgcttatctatagctacaaacgaattgcttgaatcttggcagaagacgaaagatgaaagcatccttagtgggtctttgagccattctaaattgaaaaaccttttggagaattctgattccttcgcgagtatacctgaattttcttctttattagatcagtttttccagtactatcaggatcaggatgtgacatttattggttttgagaaattgttgcatttgtttttacatgaagacgttccgggcttggatatcttttacaacaaattattgcaatgttgggttttggtatccccgcaagcggaattattaacaaaggagatagtcaaagacattatctggagtttagcgagacttgaaaaaccaagtctttttgaaccgattcaaaacgaaatttctagatccttgagtggtccttaccaggatattatctcctcttgggatatggatgatatcaatgaagaagatgaatctaatgaatttaattttgatagtcaattttctgcaccctttaatggcaggcctccatttaatttaaattctcaatctcaaattccaacgatcaaatcttctcaaagtagcggattagcaaggaggaaaagaatattaaagacacaatctcaaaaagctactccgttatctcaatccactcaaaacttaagtgtcttgccagattctatgacaccagcatttactttaatgcagcccccttcctctcagatatcctttgtgaacgattctcaaccgcgtaattctcaaaaagccaaaaagaagaagaaaaggatcagagggtttggatga

SEQ ID NO: 375 - DNA, 1206 bp, Saccharomyces cerevisiae
atggttaaaatgagaagaataacacctacacgcctcctattcacatgcagatatatttcaaacaatgcttctccaccagtgcagcccttgaatgtgcttttctttggtagcgacactttcagtaatttctcattgcaagcactcaatgagttgcgtcaaaataatggaagctgtggtatagtggacaatattcaagtagtaactaggtcgccgaagtggtgcggtagacagaagtctattttgaaatacccgccgatcttcgatatggcagagaagcttcaattgccacgcccaattacatgcgacaccaagcaggaaatgttggcgctaagcaaactgacacccagtcgccaaggaaatccggagaacgacggctccggtgctccgttcaacgcgatcattgcggtttcttttgggaagctcattccgggtgacttgatccgcgcggtgccattggcgctaaacgtccatccttcgctacttcccagacataaaggcagtgcacctatccagcgagctctgctcgagggtgacacttacaccggtgtaactatacagacactgcatccggatcggtttgaccatggtgcaattgtagcgcagacggagccactggcgatcgcaacaatgctgtcaaaagggagagtcaatgattcgacggcagattttaattctgagggcctgcctcggaggactgccatactgatggaccagttgggcgcccttggcgcccaacttttgggccaaacgcttcgtgagaggttatatctaccacagaaccgtgtgcaagcgccaacagcttacaaacccagttacgcccaccgtataacaacagaagataaacgcattcattgggcgcgcgattctgccgccgaactacttaacaaactcgaaacgctcggtcctctgcacgcgttcaaagaagcgacagcggcaagaaaggacgctcaaaattcagtattaaaacgaatattgtttcatgagtgtaaagtgatgagagacgcacgtctagataatggcagtaaaccgggcatgttcaaatatgatgatattaaagactgtattttggtcacctgtcgcggcaacttactactatgtgtgagccgcctccagttcgaaggtttcgccgtagaacgtgctggccagttcatggcgcgcctgcggaaaagatgcggcgccctgagtgaaaagttagttttcctgtaa

SEQ ID NO: 376 - DNA, 1206 bp, Artificial Sequence
  Description of Artificial Sequence: Synthetic polynucleotide
atggttaaaatgagaagaataacacctacacgcctcttgttcacatgcagatatatttccaacaatgcttctccaccagtgcagcccttgaatgtgcttttctttggtagcgacactttcagtaatttcagtttgcaagcactcaatgagttgcgtcaaaataatggaagctgtggtatagtggacaatattcaagtagtaactaggtctccgaagtggtgcggtagacagaagtctattttgaaatacccgccgatcttcgatatggcagagaagcttcaattgccacgcccaattacatgcgacaccaagcaggaaatgttggcgttgagcaaattaacacccagtcgccaaggaaatccggagaacgacggctccggtgctccgttcaacgcgatcattgcggtttcttttgggaagctcattccgggtgacttgatccgcgcggtgccattggcgttgaacgtccatccttctttacttcccagacataaaggcagtgcacctatccagcgtgctttactcgagggtgacacttacaccggtgtaactatacagacattgcatccggatagatttgaccatggtgcaattgtagcgcagacggagccattggcgatcgcaacaatgctttctaaagggagagtcaatgattctacggcagattttaattctgagggcttacctagaaggactgccatattaatggaccagttgggcgcccttggcgcccaacttttgggccaaacgcttcgtgagaggttatatttaccacagaaccgtgtgcaagcgccaacagcttacaaacccagttacgcccaccgtataacaacagaagataaacgcattcattgggcgcgcgattctgccgccgaattgcttaacaaactcgaaacgctcggtcctttacacgcgttcaaagaagcgacagcggcaagaaaggacgctcaaaattctgtattaaaaagaatattgtttcatgagtgtaaagtgatgagagacgcacgtttggataatggcagtaaaccgggcatgttcaaatatgatgatattaaagactgtattttggtcacctgtcgcggcaacttattattatgtgtgagccgcctccagttcgaaggtttcgccgtagaacgtgctggccagttcatggcgcgcttgagaaaaagatgcggcgccttgagtgaaaagttagttttcttatga

SEQ ID NO: 377 - DNA, 2280 bp, Saccharomyces cerevisiae
atgcctgcaccaaaactcacggagaaatttgcctcttccaagagcacacagaaaactacgaattacagttccatcgaggccaaaagcgtcaagacgtcggctgatcaggcatacatctaccaagagcctagcgctaccaagaagatactttactccatcgccacatggctgttgtacaacatcttccactgcttctttagagaaatcagaggccggggcagtttcaaggtaccgcaacagggaccggtgatctttgttgcggctccgcatgctaaccagttcgtcgaccctgtaatccttatgggcgaggtgaagaaatctgtcaacagacgtgtgtccttcttgattgcggagagctcattaaagcaaccccccatagggtttttggctagtttcttcatggccataggcgtggtaaggccgcaggataatttgaaaccggcagaaggtactatccgcgtagatccaacagactacaagagagttatcggccacgacacgcatttcttgactgattgtatgccaaagggtctcatcgggttacccaaatcaatgggatttggagaaatccagtccatagaaagtgacacgagtttgaccctaagaaaagagttcaaaatggccaaaccagagattaaaactgctttactcaccggcactacttataaatatgccgctaaagtcgaccaatcttgcgtttaccatagagtttttgagcatttggcccataacaactgcattgggatctttcctgaaggtgggtcccacgacagaacaaacttgttgcccctgaaagcaggtgtggcgattatggctcttggttgcatggataagcatcctgacgtcaatgttaagattgttccctgcggtatgaattatttccatccacataagttcaggtcgagagcggttgttgaattcggtgaccccattgaaataccgaaggaactagtcgccaagtaccacaacccggaaacgaacagagatgcagtgaaagaattattagataccatatcgaagggtttacaatccgttaccgttacatgttctgattatgaaactttgatggtggttcaaacgataagaagactatatatgacacaatttagcaccaagttaccgttgcccttgattgtggaaatgaacagaagaatggtcaaaggttacgaattctatagaaacgatcctaaaatagcggacttgaccaaagatataatggcatataatgccgccttgagacactataatcttcctgatcaccttgtggaggaggcaaaggtaaatttcgcaaaaaacctcggacttgttttttttagatccatcgggctctgcatcctcttttcgttagccatgccaggtatcattatgttctcacctgtcttcatattagccaagagaatttctcaagaaaaggcccgtaccgctttgtccaagtctacagttaaaataaaggctaacgatgtcattgccacgtggaaaatcttgattgggatgggatttgcgcccttgctttacatcttttggtccgttttaatcacttattacctcagacataaaccatggaataaaatatatgttttttccgggtcttacatctcgtgtgttatagtcacgtattccgccttaatcgtgggtgatattggtatggatggtttcaaatctttgagaccactggttttatctcttacatctccaaagggcttgcaaaagctacaaaaggatcgtagaaatctggcagaaagaataatcgaagttgtaaataactttggaagcgaattattccccgatttcgatagtgccgccctacgtgaagaattcgacgtcatcgatgaagaggaagaagatcgaaaaacctcagaattgaatcgcaggaaaatgctaagaaaacagaaaataaaaagacaagaaaaagattcgtcatcacctatcatcagccaacgtgacaaccacgatgcctatgaacaccataaccaagattccgatggcgtctcattggtcaatagtgacaattccctctctaacattccattattctcttctacttttcatcgtaagtcagagtcttccttagcttcgacatccgttgcaccttcttcttcctccgaatttgaggtagaaaacgaaatcttggaggaaaaaaatggattagcaagtaaaatcgcacaggccgtcttaaacaagagaattggtgaaaatactgccagggaagaggaagaggaagaagaagaggaagaagaagaagaggaagaagaagaagaagggaaagaaggagatgcgtag

SEQ ID NO: 378 - DNA, 2280 bp, Artificial Sequence
  Description of Artificial Sequence: Synthetic polynucleotide
atgcctgcaccaaaactcacggagaaatttgcctcttccaagagcacacagaaaactacgaattacagttccatcgaggccaaaagcgtcaagacgagcgctgatcaggcatacatctaccaagagcctagcgctaccaagaagatactttactccatcgccacatggttattgtacaacatcttccactgcttctttagagaaatcagaggccgtggcagtttcaaggtaccgcaacagggaccggtgatctttgttgcggctccgcatgctaaccagttcgtcgaccctgtaatccttatgggcgaggtgaagaaatctgtcaacagacgtgtgtccttcttgattgcggagagctctttaaagcaaccccccatagggtttttggctagtttcttcatggccataggcgtggtaaggccgcaggataatttgaaaccggcagaaggtactatccgcgtagatccaacagactacaagagagttatcggccacgacacgcatttcttgactgattgtatgccaaagggtctcatcgggttacccaaatctatgggatttggagaaatccagtccatagaaagtgacacgagtttgaccttgagaaaagagttcaaaatggccaaaccagagattaaaactgctttactcaccggcactacttataaatatgccgctaaagtcgaccaatcttgcgtttaccatagagtttttgagcatttggcccataacaactgcattgggatctttcctgaaggtgggtcccacgacagaacaaacttgttgcccttgaaagcaggtgtggcgattatggctcttggttgcatggataagcatcctgacgtcaatgttaagattgttccctgcggtatgaattatttccatccacataagttcaggagcagagcggttgttgaattcggtgaccccattgaaataccgaaggaattggtcgccaagtaccacaacccggaaacgaacagagatgcagtgaaagaattattagataccatatccaagggtttacaatccgttaccgttacatgttctgattatgaaactttgatggtggttcaaacgataagaagattatatatgacacaatttagcaccaagttaccgttgcccttgattgtggaaatgaacagaagaatggtcaaaggttacgaattctatagaaacgatcctaaaatagcggacttgaccaaagatataatggcatataatgccgccttgagacactataatcttcctgatcaccttgtggaggaggcaaaggtaaatttcgcaaaaaacctcggacttgttttttttagatccatcgggctctgcatcctcttttctttagccatgccaggtatcattatgttcagtcctgtcttcatattagccaagagaatttctcaagaaaaggcccgtaccgctttgtccaagtctacagttaaaataaaggctaacgatgtcattgccacgtggaaaatcttgattgggatgggatttgcgcccttgctttacatcttttggtccgttttaatcacttattacctcagacataaaccatggaataaaatatatgttttttccgggtcttacatcagttgtgttatagtcacgtattccgccttaatcgtgggtgatattggtatggatggtttcaaatctttgagaccattagttttatctcttacatctccaaagggcttgcaaaagttacaaaaggatcgtagaaatttggcagaaagaataatcgaagttgtaaataactttggaagcgaattattccccgatttcgatagtgccgccttgcgtgaagaattcgacgtcatcgatgaagaggaagaagataggaaaaccagtgaattgaatcgcaggaaaatgttgagaaaacagaaaataaaaagacaagaaaaagattcttcttctcctatcatcagccaacgtgacaaccacgatgcctatgaacaccataaccaagattccgatggcgtctctttggtcaatagtgacaattccctctctaacattccattattctcttctacttttcatcgtaagagtgagtcttccttagcttctacatccgttgcaccttcttcttcctccgaatttgaggtagaaaacgaaatcttggaggaaaaaaatggattagcaagtaaaatcgcacaggccgtcttaaacaagagaattggtgaaaatactgccagggaagaggaagaggaagaagaagaggaagaagaagaagaggaagaagaagaagaagggaaagaaggagatgcgtga

SEQ ID NO: 379 - DNA, 843 bp, Saccharomyces cerevisiae
atgagcgatagagatcagatagaacctgtcacaaatgcattagatgcagaaagtgattctagtgatgattttgggaatttttcagatgcctcagttgaaaatgacctctataaccagaattctactttaacgacgtcttccgaatctgtagtagataactgcttgaataagatactaccaaagggagaatttgacctggaagaagaaaccataaagaatgactgtttcaagctgagcaaacttattgaagatgaacgaccccatgtcatttatgaacaactcgtacaattagatcctgtgttacagccattcatatggaataaatctcatatacgcagaaacttgctccacattttgagattatcggataataatggctctgagggtgttggtacgaagagggaggaagaaccgttgaatgatgagttgttcaaaaggatatgcgatgcagtggagaaaaatgagcaaacggctactggtctcttcctgagggataatttcaaaattgactatacaccaccaatgactttaaaatctcttcaaaaggaagaggagcgtgagcaagagcagcatataccgcaattgcttatggcagattttactagtatggatgaagaatctttacgccaataccacgatacattgtgtcaatccattgactttttggttagtaaatcaagatcattgaagaaacaacagcgagacctcctaaaggataagacaacttttgaaaatgtagtgacgaatttgacaggacatacccaaagactacagcgagacgaaattgcattgtataacaaaaagcgaaacaaaaagaaaaggttcagttgggtaggatactaa

SEQ ID NO: 380 - DNA, 843 bp, Artificial Sequence
  Description of Artificial Sequence: Synthetic polynucleotide
atgagcgatagagatcagatagaacctgtcacaaatgcattagatgcagaaagtgattctagtgatgattttgggaatttttctgatgcctctgttgaaaatgacctctataaccagaattctactttaacgacgtcttccgaatctgtagtagataactgcttgaataagatattgccaaagggagaatttgacttggaagaagaaaccataaagaatgactgtttcaagttgagcaaacttattgaagatgaaaggccccatgtcatttatgaacaactcgtacaattagatcctgtgttacagccattcatatggaataaatctcatatacgcagaaacttgctccacattttgagattaagtgataataatggctctgagggtgttggtacgaagagggaggaagaaccgttgaatgatgagttgttcaaaaggatatgcgatgcagtggagaaaaatgagcaaacggctactggtctcttcttgagggataatttcaaaattgactatacaccaccaatgactttaaaatctcttcaaaaggaagaggagcgtgagcaagagcagcatataccgcaattgcttatggcagattttactagtatggatgaagaatctttacgccaataccacgatacattgtgtcaatccattgactttttggttagtaaatctagaagtttgaagaaacaacagagagacctcttgaaggataagacaacttttgaaaatgtagtgacgaatttgacaggacatacccaaagattacagagagacgaaattgcattgtataacaaaaagagaaacaaaaagaaaaggttcagttgggtaggatactga

SEQ ID NO: 381 - DNA, 2031 bp, Saccharomyces cerevisiae
atgaattttgatgcggtagcagatcaacagatgactgacagaaggtattttgctctcgaagtagcagaaagcgatgatgccgacagctcattaaattcttcatccatgggaagccccgcagtggatgtaggaagaaaagtttacaaaatcacttcgcacaagggttcagcagaagatgagagtcaatccttttttacttcttcagattctccaacatccaaaacaaggcctgtaggtaaaaccatcgaaaacgatgattactatggtaaaagatcttctacaggttcatcgctcaaacaactcttcaataaaattaatattaatgataccgctcactcttcaaacaaagaaaatgtatctcagtcggtgctatcggaaaacaagctgctctctccatctaaaaggttgtcgaagcaaggtcttacaaaggtgactaactccaagtttcgtacacccttgagacctatttcaaaccaatcgactttatcaagggatgagcctgttaaagattttagatcacttaagtttcggagcggtagtgatttcaaatgctggggtgacgagaagacaagttctcatgttcattcatccagtgtgaactcagttaattcctttacttctaccacctcttcttcaaagtggaagttctggaaaaatgataacctattgtcgaggtcgctatcttccagatctgtgaatgaccaagatccgaactttgttcagccaaaaccaaccaattcgttacaaaagaagtcttcaatttcaagttttcacaattctatttttggtggtggcaaacacacagagaagaagaggaattctggatttattatgcccgatcatcagagcacgaaggagctaaaccacaaacattcatcatcgaacctttcctttagaagtttgaagcataaaacatcacattcttcactaaataagctcaaagtaaggcgtaaaggaaatacacaagaactgaatcatccgatcaaaaaaacttgccaaatatcattgcctgttccagaccaagtctcaaaggacaagattcaactgaaattgaaaaattcaacatcattggcatccttatcttcagaagtcactcccataaacactttggactacaatgattcaattttgcaacaaatattacaactttgtgatgttaagtatatattacatgatctacgtgaagctcagtcattaggcttgtttacgttgaatactagatcggttcagctgtctcataacttttggcaaacttatcatagcgatatgcaaacttcactcatttgcaagaaagtatgtctaggggctctaagtgatttgactacttcaaacttgatatccttacatgaattgaaatcattacggttaatacaaggaactagcggtgtcgccaatttactgcaagcttatgttgtgccctcaaatcaatgtgaaaatgaccaaaacttgatactgtacttatttttcaaataccagggaactcctctatcaaggtgctctaacattgattactctcaagcattgtctattttctggcagtgcagcagtattttatatgttgctgaatccaaatttcagctcgaacacaggaatctaactttggaccatattttgatagactctaaagggaatgttactttaattgatatgaagtgctgtcgtttcttgaatatagacaacaataaggcttcctatacaagattagaccatcattatttcttccaaggccgggggactcttcaattcgagatatatgaactgatgagaagcatgctgcctcagccaatatcctgggctacatttgaaccaagaacaaacctattatggttatatcacctaagtagcagcctgctaaaaatggccaaaaaagccgtagtcagcggcgctttgaaccgggaagaaaatatcttaatcgagttgacgcacttactcgatcctgctcgaaaacattccaaaacaattttcaaaaaggaacttgttataagaacttgcggtgatttgttatctttgaagggagaaataatgcagtaa

SEQ ID NO: 382 - DNA, 2031 bp, Artificial Sequence
  Description of Artificial Sequence: Synthetic polynucleotide
atgaattttgatgcggtagcagatcaacagatgactgacagaaggtattttgctctcgaagtagcagaaagcgatgatgccgacagctctttaaattcttcttccatgggaagccccgcagtggatgtaggaagaaaagtttacaaaatcacttctcacaagggttctgcagaagatgagagtcaatccttttttacttcttctgattctccaacatccaaaacaaggcctgtaggtaaaaccatcgaaaacgatgattactatggtaaaagatcttctacaggttcttctctcaaacaactcttcaataaaattaatattaatgataccgctcactcttccaacaaagaaaatgtatctcagtctgtgttatctgaaaacaagttactctctccatctaaaaggttgtccaagcaaggtcttacaaaggtgactaactccaagtttcgtacacccttgagacctatttccaaccaatctactttatctagggatgagcctgttaaagattttagatctcttaagtttagaagcggtagtgatttcaaatgctggggtgacgagaagacaagttctcatgttcattcttccagtgtgaactctgttaattcctttacttctaccacctcttcttccaagtggaagttctggaaaaatgataaccttttgagtaggtccttatcttccagatctgtgaatgaccaagatccgaactttgttcagccaaaaccaaccaattctttacaaaagaagtcttccatttccagttttcacaattctatttttggtggtggcaaacacacagagaagaagaggaattctggatttattatgcccgatcatcagagcacgaaggagttgaaccacaaacattcttcttccaacctttcctttagaagtttgaagcataaaacatctcattcttctttgaataagctcaaagtaaggcgtaaaggaaatacacaagaattgaatcatccgatcaaaaaaacttgccaaatatctttgcctgttccagaccaagtctccaaggacaagattcaattgaaattgaaaaattctacatctttggcatccttatcttctgaagtcactcccataaacactttggactacaatgattctattttgcaacaaatattacaactttgtgatgttaagtatatattacatgatttacgtgaagctcagtctttaggcttgtttacgttgaatactagatctgttcagctttctcataacttttggcaaacttatcatagcgatatgcaaacttctctcatttgcaagaaagtatgtttaggggctttaagtgatttgactacttctaacttgatatccttacatgaattgaaatctttaagattaatacaaggaactagcggtgtcgccaatttattacaagcttatgttgtgccctccaatcaatgtgaaaatgaccaaaacttgatattatacttatttttcaaataccagggaactcctttatctaggtgctctaacattgattactctcaagcattgtctattttctggcagtgcagcagtattttatatgttgctgaatccaaatttcagctcgaacacaggaatttaactttggaccatattttgatagactctaaagggaatgttactttaattgatatgaagtgctgtcgtttcttgaatatagacaacaataaggcttcctatacaagattagaccatcattatttcttccaaggcagagggactcttcaattcgagatatatgaattgatgagaagcatgttgcctcagccaatatcctgggctacatttgaaccaagaacaaacttattatggttatatcacttaagtagcagcttgttgaaaatggccaaaaaagccgtagtcagcggcgctttgaacagagaagaaaatatcttaatcgagttgacgcacttactcgatcctgctagaaaacattccaaaacaattttcaaaaaggaacttgttataagaacttgcggtgatttgttatctttgaagggagaaataatgcagtga

SEQ ID NO: 383 - DNA, 240 bp, Saccharomyces cerevisiae
atgaaaatgaacccttgtactgttatcctctgtaagtcgttatttttcttttgcctttttcaggttgactgctactgtaatcgtaagaatattcaaaatcaatcatctcgcatcgcaacaaaaataaaacgaagttactggtttaggtggcagaaacatataatattggcgaacattcataaaataattaaggcttaccaacgaagcataataaaattgccagtaaccaaaggtctctga

SEQ ID NO: 384 - DNA, 240 bp, Artificial Sequence
  Description of Artificial Sequence: Synthetic polynucleotide
atgaaaatgaacccttgtactgttatcctctgtaagtctttatttttcttttgcctttttcaggttgactgctactgtaatcgtaagaatattcaaaatcaatcttctcgcatcgcaacaaaaataaaaagaagttactggtttaggtggcagaaacatataatattggcgaacattcataaaataattaaggcttaccaaagaagcataataaaattgccagtaaccaaaggtctctga

SEQ ID NO: 385 - DNA, 2523 bp, Saccharomyces cerevisiae
atgaaagtggtaaagtttccatggttggctcaccgtgaagaatcgcgaaaatatgaaatatacacagtcgatgttagccacgatgggaaaaggttggccacaggcggcctagatggcaagattaggatatggtccatagattccattttgcgttgcatggaactagaatctctaactcctgagatacctcttccgcaagacttgcagatgccgttatgtagcatgagtaggcataccggctcgataacatgtgtcaaattctcaccggatggaaagtaccttgcaagtggatccgatgatcgaattttactgatatgggctcttgacgaggagcaaagctcacaacccgcctttggttctgagcatgagagagagcattggacagttcgtaaaagattggttgcacacgataacgacatacaagacatttgctgggcgccagactccagcatactagtgacagttggtttagatagatctgtcatagtctggaacggttctacatttgaaaaactgaagagatttgacgtacatcaatcacttgttaagggcgttgtttttgatcccgctaataagtattttgcgactacatctgatgatagaaccatgaagatatttagatatcacaagacgggggatatttcttttacaatagagcatataatcaccgagccattcaaagaatcacccttgactacttattttagaaggccatcgtggtctcccgatgggcaacatattgcagttccgaacgccactaatgggcccgtaagttctgtggcaattgtaaatagaggaacttgggatacaaatgttagtttaattggtcatgatgcacctacagaagtcgcaaggtttaatcctagattgtttgagagaaatgcgggtgtcaagcaaaaaaaagacgatgacccagaaaatgctctagtggggcaaaacgatgataaagttcaccattttgataaaaacatcgactctgttgtggcaacagctgggcaagataaatccttagcggtctggagtacaagtagaccaaggccaatattagttgctttcgatatcgcaaataaatcaattactgatatgtcttggaatccagacggctctttattatttgttgcgtcattagactcttcaatcaccttgtttaaattcgaaaataatgaactaggcaagccaattcctttggaaaaaaatatggagcagttatataggtacggtgttgacaaggactcattagatttccctgaaagtatcaaccaactgttactcgaagatcagacaaaatcatttaagcatacaaaaatttcaacatcgaaactaggtgaaaaccacccgacacttgcaacaaattcagcttcaaatcaaaaagataacaatgatgcttctgtctctagaagtgaacatataaatatcttgattccaaagaggaaaaaggatgctatactgaataaagccgtaactcttaaaagcggtaaaaagcgtgtggcaccgacattgatatcgacttcatcatcttctcccttttctaatggaatcaaaaagcctacattggatagtaaaaggattgaaaataatgtaaaatcatccaccaagaccattaacagtaaaaatacattgctaaatgtgccagaaggcgttgaaaagaaaattagtatctcatcgttcccattgccaaggttgggcatacattctttgattatgggtacaaaagaaaggagtgcatggaaaatctcaaattcagagctggagaatgatgatgcagataatgcgggtggtaagggttcagatggtacgagcaacagtattgacgacattgcagttctctcagaggaagaaaatgactttcataggatgactttgaacgccaagctaacccaggagaagatctggagcgaagagccgacaacacgatgccttctgcagtccgatgtcataccagacacagatgttgtcgttcttgaggggggtagtttagacgatatagccgttttagaaataagaaacggtgttgagagatcaatacaatttgattctgaagcacttttagataatcctaccagaatcttaggctatcaaggaggtaaaagaaccatcgagacctttattccagaagttatcatttgtgcaataggatcaaaagattgtaagtgctggtgcctagcttcagctaatggctctatttacatactttcatacaatggacagcagagaatcccaaaaatttgcctaggacataaagttattaaaatggtaacatcaagcaaatacctccttgttctaactgaaagaggtttattttttgcatgggacttgctggatttaaaattagtactgcgaaatgtacctatattaccaattttgaacggtcagccaattcatggaaacaaggtaagaatcaacaaggttattaaatgctttcgtttggatggttctagttgtgatttgcttttagaggttggcgatcctaaaaatgtgtataaatggactaaggatctgggttgttggtcgttatataaataa

SEQ ID NO: 386 - DNA, 2523 bp, Artificial Sequence
  Description of Artificial Sequence: Synthetic polynucleotide
atgaaagtggtaaagtttccatggttggctcaccgtgaagaatctagaaaatatgaaatatacacagtcgatgttagccacgatgggaaaaggttggccacaggcggcttggatggcaagattaggatatggtccatagattccattttgcgttgcatggaattggaatctttgactcctgagatacctcttccgcaagacttgcagatgccgttatgtagcatgagtaggcataccggctctataacatgtgtcaaattcagtccggatggaaagtaccttgcaagtggatccgatgatagaattttattgatatgggctcttgacgaggagcaaagctctcaacccgcctttggttctgagcatgagagagagcattggacagttcgtaaaagattggttgcacacgataacgacatacaagacatttgctgggcgccagactccagcatattggtgacagttggtttagatagatctgtcatagtctggaacggttctacatttgaaaaattgaagagatttgacgtacatcaatctcttgttaagggcgttgtttttgatcccgctaataagtattttgcgactacatctgatgatagaaccatgaagatatttagatatcacaagacgggggatatttcttttacaatagagcatataatcaccgagccattcaaagaaagtcccttgactacttattttagaaggccatcttggtctcccgatgggcaacatattgcagttccgaacgccactaatgggcccgtaagttctgtggcaattgtaaatagaggaacttgggatacaaatgttagtttaattggtcatgatgcacctacagaagtcgcaaggtttaatcctagattgtttgagagaaatgcgggtgtcaagcaaaaaaaagacgatgacccagaaaatgctttggtggggcaaaacgatgataaagttcaccattttgataaaaacatcgactctgttgtggcaacagctgggcaagataaatccttagcggtctggagtacaagtagaccaaggccaatattagttgctttcgatatcgcaaataaatccattactgatatgtcttggaatccagacggctctttattatttgttgcgtctttagactcttctatcaccttgtttaaattcgaaaataatgaattaggcaagccaattcctttggaaaaaaatatggagcagttatataggtacggtgttgacaaggactctttagatttccctgaaagtatcaaccaattattactcgaagatcagacaaaaagttttaagcatacaaaaatttctacaagtaaattgggtgaaaaccacccgacacttgcaacaaattctgcttctaatcaaaaagataacaatgatgcttctgtctctagaagtgaacatataaatatcttgattccaaagaggaaaaaggatgctatattgaataaagccgtaactcttaaaagcggtaaaaagcgtgtggcaccgacattgatatctacttcttcttcttctcccttttctaatggaatcaaaaagcctacattggatagtaaaaggattgaaaataatgtaaaatcttccaccaagaccattaacagtaaaaatacattgttgaatgtgccagaaggcgttgaaaagaaaattagtatctcttctttcccattgccaaggttgggcatacattctttgattatgggtacaaaagaaaggagtgcatggaaaatctctaattctgagttagagaatgatgatgcagataatgcgggtggtaagggttctgatggtacgagcaacagtattgacgacattgcagttctcagtgaggaagaaaatgactttcataggatgactttgaacgccaagttgacccaggagaagatctggagcgaagagccgacaacaaggtgccttttacagtccgatgtcataccagacacagatgttgtcgttcttgaggggggtagtttagacgatatagccgttttagaaataagaaacggtgttgagagaagtatacaatttgattctgaagcacttttagataatcctaccagaatcttaggctatcaaggaggtaaaagaaccatcgagacctttattccagaagttatcatttgtgcaataggatctaaagattgtaagtgctggtgccttgcttctgctaatggctctatttacatactttcttacaatggacagcagagaatcccaaaaatttgcttaggacataaagttattaaaatggtaacatctagcaaatacctccttgttttaactgaaagaggtttattttttgcatgggacttgttggatttaaaattagtattgagaaatgtacctatattaccaattttgaacggtcagccaattcatggaaacaaggtaagaatcaacaaggttattaaatgctttcgtttggatggttctagttgtgatttgcttttagaggttggcgatcctaaaaatgtgtataaatggactaaggatttaggttgttggtctttatataaatga

SEQ ID NO: 387 - DNA, 3735 bp, Saccharomyces cerevisiae
atgactgtgtttctgggcatctatagggccgtctatgcctatgagccgcagacaccagaagaactggccatccaagaagacgatctgttgtacctcttacagaagtcagacattgacgattggtggacagtaaagaaaagagtcattggttccgatagcgaagaaccggtgggtctagtgccctccacttacattgaagaagctcctgttttgaagaaggtaagagccatttatgattatgaacaggtgcaaaatgctgatgaagaattgacgtttcatgaaaatgacgtttttgatgtattcgatgataaagatgctgattggctgttggttaagtctaccgtttccaatgaattcggcttcattccaggcaattacgtcgaaccagagaatgggtccacttccaagcaggaacaggctcccgctgccgctgaagctcctgcagctactcctgcagccgctcctgcttctgctgccgtactacccaccaactttttaccacctcctcaacacaatgatagagctcgtatgatgcaaagtaaagaagaccaagctccagatgaggatgaagagggccctcctcctgccatgcctgcaagaccaacggctactaccgaaactactgatgccaccgctgcggctgttcgatctcgtacaagactatcatacagcgataacgataatgacgatgaagaggatgattactattacaacagcaacagcaacaacgttggaaatcacgaatacaatacagagtatcactcttggaacgttaccgaaatcgagggaaggaaaaagaagaaggccaagctatcaatcggtaacaacaagataaacttcataccccaaaaggggactcctcatgagtggtcaattgataaattggtctcttatgataacgaaaagaaacacatgttcttggaatttgttgatccatatagaagccttgaattacacactggtaataccaccacatgtgaagagatcatgaacattattggtgaatataaaggtgcttcccgtgatcctgggttgagagaagtcgaaatggcttccaaatccaaaaagagaggtattgttcaatatgacttcatggctgaatcacaggacgaattaaccataaaatcaggcgataaagtctacattttagatgataaaaaatctaaggactggtggatgtgccaactggttgattcagggaaaagcggtctcgttcctgcacagtttattgagcctgttcgtgacaaaaaacatactgaatctacagcaagcggtatcatcaagtctatcaagaaaaacttcaccaaatctccatctaggtcgagatctagatcaagatctaaatccaatgccaatgccagttggaaagatgatgaactacaaaacgatgttgtaggtagtgctgccggtaaaaggtcaagaaaaagttcattgtcctctcacaaaaaaaactcttcggcgaccaaagatttccccaatccaaaaaaatcgcgtctatgggttgatagaagtggtactttcaaagtggatgcagaattcattggatgtgctaaggggaaaatccacttgcacaaggctaatggtgtcaagattgctgtcgccgctgataaactatccaatgaagatttagcgtatgtggaaaaaattactgggttctccttagagaaatttaaggcgaatgatgggtctagttcccgtggcactgattcaagagactctgaaagagaaagaagaaggagattgaaggagcaggaggaaaaagaacgcgataggagattgaaagagcgtgaattatacgaattgaaaaaagccagagaactcctagatgaagaaagatcaaggttgcaagaaaaggaattgcctccaataaaaccaccaagaccaacctctactacctccgttccaaatacgacgtccgtaccaccagccgaaagcagcaataacaacaactccagtaacaaatatgattggttcgaatttttcttgaattgcggcgttgatgtaagcaattgtcaaagatatacaataaattttgatagagaacagcttactgaagacatgatgcctgacatcaataactcaatgttaagaaccttgggtctgcgcgaaggtgatattgttagagtaatgaaacatcttgacaagaaatttggaagagaaaatattgcatcaattcctacaaatgccactggaaatatgttttcacaacctgatggttcattgaacgttgctacaagtccggaaacctcactgcctcagcaattgttgccacaaacaacaagtcctgctcaaacagctccttccacatcagctgagacagatgatgcttggactgttaaaccggcttctaagtctgaatctaatttactctctaagaaatcagaatttactggttccatgcaggatttattagacttgcaacctttagaacctaaaaaggcagctgcctcgacacctgaaccaaacctaaaagatttggaacccgtgaaaactggcggcaccactgttcctgctgctccggtttcatctgctccggtttcatctgctcccgctccattggatccattcaaaaccggtggcaacaatatcttacccttatctactggctttgtgatgatgccaatgattactgggggcgatatgctgcctatgcaaagaaccggcggcttcgttgtaccacaaacaacttttggtatgcaatcgcaagttactggtggtatcctacctgttcaaaagacaggaaatgggttaattcctatctctaacactggcggcgcaatgatgccacaaactacgttcggcgcagcagctaccgtcttacctctgcaaaaaactggaggtggcctaataccaattgccaccacaggaggtgcgcaattcccgcaaacttcattcaatgttcaggggcaacaacaacttccaacaggttcaatattacctgtccaaaaaactgctaatggattaatttcagctaatactggtgtctcaatgccaactgtacaaagaacaggcggcactatgattccacaaacatcatttggcgtttcacagcaattaacaggtggtgcaatgatgacccaacctcaaaatacagggagtgccatgatgcctcaaacatccttcaatgctgtaccacaaattactggaggagcaatgatgcctcaaacgtccttcaatgctttaccacaagttacagggggagcaatgatgcctttgcagagaactggtggtgctttgaatacatttaatactggaggcgccatgattccccagacttcgttcagctctcaagctcaaaacactggcgggttccggccgcaatcccaattcggtttgactttacaaaaaaccggaggtattgcgccattaaaccagaaccagttcactggtggagccatgaatactttaagtacagggggcgttcttcaacaacagcaaccacaaacgatgaataccttcaatactggtggtgttatgcaagagctccaaatgatgactactttcaatactggtggtgctatgcaacaaccacagatgatgaacacattcaacaccgatggaattatgcaacaaccacagatgatgaacacttttaacactgggggtgctatgcaacaaccacaacaacaagcattacagaaccaacctactggatttgggtttggtaatggacctcaacaatcaaggcaagccaacatattcaatgctactgcatcaaatccgtttggattctag

SEQ ID NO: 388 - DNA, 3735 bp, Artificial Sequence
  Description of Artificial Sequence: Synthetic polynucleotide
atgactgtgtttttgggcatctatagggccgtctatgcctatgagccgcagacaccagaagaattggccatccaagaagacgatttattgtacctcttacagaagagtgacattgacgattggtggacagtaaagaaaagagtcattggttccgatagcgaagaaccggtgggtttagtgccctccacttacattgaagaagctcctgttttgaagaaggtaagagccatttatgattatgaacaggtgcaaaatgctgatgaagaattgacgtttcatgaaaatgacgtttttgatgtattcgatgataaagatgctgattggttattggttaagtctaccgtttccaatgaattcggcttcattccaggcaattacgtcgaaccagagaatgggtccacttccaagcaggaacaggctcccgctgccgctgaagctcctgcagctactcctgcagccgctcctgcttctgctgccgtattgcccaccaactttttaccacctcctcaacacaatgatagagctcgtatgatgcaaagtaaagaagaccaagctccagatgaggatgaagagggccctcctcctgccatgcctgcaagaccaacggctactaccgaaactactgatgccaccgctgcggctgttagatctcgtacaagattatcttacagcgataacgataatgacgatgaagaggatgattactattacaacagcaacagcaacaacgttggaaatcacgaatacaatacagagtatcactcttggaacgttaccgaaatcgagggaaggaaaaagaagaaggccaagttatctatcggtaacaacaagataaacttcataccccaaaaggggactcctcatgagtggtctattgataaattggtctcttatgataacgaaaagaaacacatgttcttggaatttgttgatccatatagaagccttgaattacacactggtaataccaccacatgtgaagagatcatgaacattattggtgaatataaaggtgcttcccgtgatcctgggttgagagaagtcgaaatggcttccaaatccaaaaagagaggtattgttcaatatgacttcatggctgaatctcaggacgaattaaccataaaatctggcgataaagtctacattttagatgataaaaaatctaaggactggtggatgtgccaattggttgattctgggaaaagcggtctcgttcctgcacagtttattgagcctgttcgtgacaaaaaacatactgaatctacagcaagcggtatcatcaagtctatcaagaaaaacttcaccaaatctccatctaggagcagatctagatctagatctaaatccaatgccaatgccagttggaaagatgatgaattacaaaacgatgttgtaggtagtgctgccggtaaaaggagcagaaaaagttctttgtcctctcacaaaaaaaactcttctgcgaccaaagatttccccaatccaaaaaaatctcgtttatgggttgatagaagtggtactttcaaagtggatgcagaattcattggatgtgctaaggggaaaatccacttgcacaaggctaatggtgtcaagattgctgtcgccgctgataaactttccaatgaagatttagcgtatgtggaaaaaattactgggttctccttagagaaatttaaggcgaatgatgggtctagttcccgtggcactgattccagagactctgaaagagaaagaagaaggagattgaaggagcaggaggaaaaagaacgcgataggagattgaaagagcgtgaattatacgaattgaaaaaagccagagaactcttggatgaagaaagaagtaggttgcaagaaaaggaattgcctccaataaaaccaccaagaccaacctctactacctccgttccaaatacgacgtccgtaccaccagccgaaagcagcaataacaacaactccagtaacaaatatgattggttcgaatttttcttgaattgcggcgttgatgtaagcaattgtcaaagatatacaataaattttgatagagaacagcttactgaagacatgatgcctgacatcaataactccatgttaagaaccttgggtttacgcgaaggtgatattgttagagtaatgaaacatcttgacaagaaatttggaagagaaaatattgcatctattcctacaaatgccactggaaatatgttttctcaacctgatggttctttgaacgttgctacaagtccggaaacctccttacctcagcaattgttgccacaaacaacaagtcctgctcaaacagctccttccacatctgctgagacagatgatgcttggactgttaaaccggcttctaagtctgaatctaatttactctctaagaaaagtgaatttactggttccatgcaggatttattagacttgcaacctttagaacctaaaaaggcagctgcctctacacctgaaccaaacttgaaagatttggaacccgtgaaaactggcggcaccactgttcctgctgctccggtttcttctgctccggtttcttctgctcccgctccattggatccattcaaaaccggtggcaacaatatcttacccttatctactggctttgtgatgatgccaatgattactgggggcgatatgttgcctatgcaaagaaccggcggcttcgttgtaccacaaacaacttttggtatgcaatctcaagttactggtggtatcttacctgttcaaaagacaggaaatgggttaattcctatctctaacactggcggcgcaatgatgccacaaactacgttcggcgcagcagctaccgtcttacctttacaaaaaactggaggtggcttgataccaattgccaccacaggaggtgcgcaattcccgcaaacttctttcaatgttcaggggcaacaacaacttccaacaggttccatattacctgtccaaaaaactgctaatggattaatttctgctaatactggtgtctccatgccaactgtacaaagaacaggcggcactatgattccacaaacatcttttggcgtttctcagcaattaacaggtggtgcaatgatgacccaacctcaaaatacagggagtgccatgatgcctcaaacatccttcaatgctgtaccacaaattactggaggagcaatgatgcctcaaacgtccttcaatgctttaccacaagttacagggggagcaatgatgcctttgcagagaactggtggtgctttgaatacatttaatactggaggcgccatgattccccagacttctttcagctctcaagctcaaaacactggcgggttcaggccgcaatcccaattcggtttgactttacaaaaaaccggaggtattgcgccattaaaccagaaccagttcactggtggagccatgaatactttaagtacagggggcgttcttcaacaacagcaaccacaaacgatgaataccttcaatactggtggtgttatgcaagagctccaaatgatgactactttcaatactggtggtgctatgcaacaaccacagatgatgaacacattcaacaccgatggaattatgcaacaaccacagatgatgaacacttttaacactgggggtgctatgcaacaaccacaacaacaagcattacagaaccaacctactggatttgggtttggtaatggacctcaacaatccaggcaagccaacatattcaatgctactgcatctaatccgtttggattctga

SEQ ID NO: 389 - DNA, 543 bp, Saccharomyces cerevisiae
atgagtggaagtaatatgggatactatgacgtactcgcagggctttcagcgctggaaaagtcatcccaggtagtgttcagtgcgactgagcttcaacagcttacgcaacaatctcatgctaccgacaagggcatagagggcagtgagaatagtaaagcgaaggtatccaagcccaaaagagtagctgtacatggttacctaggcggtaaagtgtcgctcgccgatgcggcacaggtggagtatgaagtaggccattcactgctgggcagttatgtgccacgccagcagttggaagccctgtcaagtgtcgacttttcgcaccatttccaccgcacattagaatgcaaagctgctctagagacacacgatgtttttcttgccggcgcaggacaattgtctctacccttccaatcacacatagagagccccaggaatagcgaggctaaaaggaaaagaaaagtgataatatgcaaacggtgtcaatcacgatttataggttcccataggcggtctcaacttagagaacatgcctgcgtagattaa

SEQ ID NO: 390 - DNA, 543 bp, Artificial Sequence
  Description of Artificial Sequence: Synthetic polynucleotide
atgagtggaagtaatatgggatactatgacgtactcgcagggctttctgcgttagaaaagtcttcccaggtagtgttcagtgcgactgagcttcaacagcttacgcaacaatctcatgctaccgacaagggcatagagggcagtgagaatagtaaagcgaaggtatccaagcccaaaagagtagctgtacatggttacttgggcggtaaagtgagtctcgccgatgcggcacaggtggagtatgaagtaggccattctttattaggcagttatgtgccacgccagcagttggaagccttgagcagtgtcgacttttctcaccatttccaccgcacattagaatgcaaagctgctttggagacacacgatgtttttcttgccggcgcaggacaattgtctttacccttccaatctcacatagagagccccaggaatagcgaggctaaaaggaaaagaaaagtgataatatgcaaaagatgtcaatctagatttataggttcccataggcgttctcaacttagagaacatgcctgcgtagattga

SEQ ID NO: 391 - DNA, 2931 bp, Saccharomyces cerevisiae
atgaaagtgaagaaatcaactagatcaaaagtttcgacagcatgtgtcaattgcagaaaaaggaaaatcaaatgcacaggtaaatatccatgtaccaactgcatttcttacgattgtacgtgtgtattcctaaaaaaacatttaccgcagaaggaggatagttcccagtctttgcctactacagctgttgctccaccctcttcccacgccaatgtagaggcttcagcagatgtacagcatctggacactgcgattaagctagataatcaatattacttcaaactgatgaacgacctgatacagactccagtctctccgagtgcgacgcatgctcctgatacttccaataatcctactaatgataataatattctctttaaagatgattccaaatatcaaaatcaactggttacgtatcaaaatattctgacaaatttgtacgctctgccgccttgtgatgacactcagctcttgattgataaaacgaagtcgcagttgaataacctgattaacagttggaatcccgaaataaactaccccaagctttccagtttctctcctcgcccacaaagatcgatagaaacgtatcttttaaccaacaagtatagaaataaaatacacatgacgaggttctccttttggacagaccaaatggttaaatcacaaagtccagattcatttctagccaccactccactagtagatgaagtatttggtcttttctctccaatacaggctttttcactaagaggtataggatatttaattaaaaaaaatatcgaaaacacgggttcatcgatgttaatagatacaaaggaaactatttatctaatattaagattgtttgatttgtgttatgaacatttgatccaaggttgcatctctatttctaatccattagagaactatcttcaaaaaataaagcaaactcctactacgacggcatctgctagtttgcctacttccccagcacctttatctaacgatttagtcatttctgttattcatcaactacctcagccatttatacaatcgattaccgggtttacgactactcaattgatagaaaatttacatgattcattttcgatgtttcgaatagttactcaaatgtatgctcaacataggaagcgctttgcggaatttttaaaccaagctttctccttgccccatcaagaaaagagtgttttattctcgtcattctgctcatcagaatatcttctatctactctttgttacgcatactacaatgttaccctatatcacatgttggacataaacactttagattacctagagattttagtgtcattgctagaaatccaaaatgaaattgatgagcgttttggatttgaaaaaatgctagaagttgcggttacatgctccactaagatgggattgtctcgttgggagtattatgttggaatagacgaaaatactgccgaacggagaagaaaaatatggtggaaaatatacagtctggaaaagcgttttttaactgatcttggtgatttatccttaataaatgaacatcaaatgaattgtctcttgccgaaggatttcagggacatgggattcattaaccataaagaatttttaacgaaaattggtacgtcctctttatcaccgtcatcgcccaagctaaaaaacttgtcattgtccaggcttattgaatatggtgagttagcgatagcccaaattgttggagattttttttcagagactctttataatgagaaattcacgtctttagaagtatccgttaaacccacaattatcagacaaaagttattggagaaagtttttgaggacattgaatcttttaggttaaaattggccaaaataaagcttcacacctcaagagtttttcaagtagctcactgcaaatatccagaatatccaaaaaacgatctaattgaagcagctaaatttgtaagttaccataaaaatacatggttctccatcttgggtgctgttaacaatcttattgctaggctatctgaagatccagaggtgataactgagcaaagcatgaaatatgcgaatgaaatgtttcaagaatggagggaaattaatcaattcttaatacaggttgatactgattttattgtttgggcatgtttggacttttatgaactgatatttttcgtgatggcttcaaaattttatgtggaagacccgcacatcactttagaggatgttatcaacactttgaaagtttttaagagaataactaacattatttctttttttaataataatttggacgagaaggattatgattgtcaaactttcagggagttttcgagaagttcgagtttggttgccatatccataagaatcatatttttaaaatactgctatgccgaacaaattgatagagccgaattcatcgaacgtttgaaagaagttgaaccgggtctaagtgaccttttgcgtgagttttttgatacccgctcttttatttacaggtacatgttgaaatccgttgaaaaatcaggctttcatttaataattagaaaaatgttagaaagcgactataaatttttgtatagagacaaattggccactggtaatattccagaccaaggaaattcaagccaaatttctcagttgtatgacagtactgctccttcatacaacaatgcttctgcctcagcagcaaactcaccgttgaagttatcgtctttgttgaactctggagaggaatcgtacactcaagacgcatcagaaaatgttccatgtaatctgcggcatcaagatcgatcgttacaacagacaaaaagacaacattctgcgcctagccaaataagcgctaatgagaataatatatacaacttgggtactttagaggagtttgtcagcagtggtgacctgactgatttatatcatactctgtggaatgacaatacttcatatcccttcttatga

SEQ ID NO: 392 - DNA, 2931 bp, Artificial Sequence
  Description of Artificial Sequence: Synthetic polynucleotide
atgaaagtgaagaaatctactagaagtaaagtttctacagcatgtgtcaattgcagaaaaaggaaaatcaaatgcacaggtaaatatccatgtaccaactgcatttcttacgattgtacgtgtgtattcttgaaaaaacatttaccgcagaaggaggatagttcccagtctttgcctactacagctgttgctccaccctcttcccacgccaatgtagaggcttctgcagatgtacagcatttggacactgcgattaagttggataatcaatattacttcaaattaatgaacgacttgatacagactccagtctctccgagtgcgacgcatgctcctgatacttccaataatcctactaatgataataatattctctttaaagatgattccaaatatcaaaatcaattggttacgtatcaaaatattttaacaaatttgtacgctttaccgccttgtgatgacactcagctcttgattgataaaacgaagtctcagttgaataacttgattaacagttggaatcccgaaataaactaccccaagctttccagtttctctcctcgcccacaaagaagtatagaaacgtatcttttaaccaacaagtatagaaataaaatacacatgacgaggttctccttttggacagaccaaatggttaaatctcaaagtccagattcttttttggccaccactccattagtagatgaagtatttggtcttttctctccaatacaggctttttctttgagaggtataggatatttaattaaaaaaaatatcgaaaacacgggttcttctatgttaatagatacaaaggaaactatttatttgatattaagattgtttgatttgtgttatgaacatttgatccaaggttgcatctctatttctaatccattagagaactatcttcaaaaaataaagcaaactcctactacgacggcatctgctagtttgcctacttccccagcacctttatctaacgatttagtcatttctgttattcatcaattacctcagccatttatacaatctattaccgggtttacgactactcaattgatagaaaatttacatgattctttttccatgtttagaatagttactcaaatgtatgctcaacataggaagcgctttgcggaatttttaaaccaagctttctccttgccccatcaagaaaagagtgttttattctcttctttctgctcttctgaatatcttttatctactctttgttacgcatactacaatgttaccttatatcacatgttggacataaacactttagattacttggagattttagtgtctttgttggaaatccaaaatgaaattgatgagcgttttggatttgaaaaaatgttggaagttgcggttacatgctccactaagatgggattgtctcgttgggagtattatgttggaatagacgaaaatactgccgaaagaagaagaaaaatatggtggaaaatatacagtttagaaaagcgttttttaactgatcttggtgatttatccttaataaatgaacatcaaatgaattgtctcttgccgaaggatttcagggacatgggattcattaaccataaagaatttttaacgaaaattggtacgtcctctttatctccgtcttctcccaagttgaaaaacttgtctttgtccaggcttattgaatatggtgagttagcgatagcccaaattgttggagattttttttctgagactctttataatgagaaattcacgtctttagaagtatccgttaaacccacaattatcagacaaaagttattggagaaagtttttgaggacattgaatcttttaggttaaaattggccaaaataaagcttcacacctccagagtttttcaagtagctcactgcaaatatccagaatatccaaaaaacgatttgattgaagcagctaaatttgtaagttaccataaaaatacatggttctccatcttgggtgctgttaacaatcttattgctaggttatctgaagatccagaggtgataactgagcaaagcatgaaatatgcgaatgaaatgtttcaagaatggagggaaattaatcaattcttaatacaggttgatactgattttattgtttgggcatgtttggacttttatgaattgatatttttcgtgatggcttccaaattttatgtggaagacccgcacatcactttagaggatgttatcaacactttgaaagtttttaagagaataactaacattatttctttttttaataataatttggacgagaaggattatgattgtcaaactttcagggagttttccagaagtagtagtttggttgccatatccataagaatcatatttttaaaatactgctatgccgaacaaattgatagagccgaattcatcgaacgtttgaaagaagttgaaccgggtttgagtgaccttttgcgtgagttttttgatacccgctcttttatttacaggtacatgttgaaatccgttgaaaaatctggctttcatttaataattagaaaaatgttagaaagcgactataaatttttgtatagagacaaattggccactggtaatattccagaccaaggaaatagtagccaaatttctcagttgtatgacagtactgctccttcttacaacaatgcttctgcctctgcagcaaactctccgttgaagttatcttctttgttgaactctggagaggaatcttacactcaagacgcatctgaaaatgttccatgtaatttaagacatcaagatagatctttacaacagacaaaaagacaacattctgcgcctagccaaataagcgctaatgagaataatatatacaacttgggtactttagaggagtttgtcagcagtggtgacttgactgatttatatcatactttatggaatgacaatacttcttatcccttcttatga

SEQ ID NO: 393 - DNA, 7482 bp, Saccharomyces cerevisiae
atggctaaacaaagacaaactactaaatcgtctaagcgatatagatattcttccttcaaggctaggattgacgatttgaagattgaaccggctagaaatttggaaaaaagggtacatgattatgtcgagtcgtcgcattttctcgcttcctttgatcagtggaaagaaattaatttaagtgccaaatttacggagtttgcagcggaaattgagcatgatgttcaaacattaccccaaatactatatcatgataaaaagatttttaattctttggtttcattcattaactttcacgatgagttttctttgcaaccgcttctggacctcttggctcaattttgtcatgatttaggtccagattttcttaaattttatgaagaagctatcaaaactttaataaatctgttagacgctgctatagaatttgagtcatctaatgtttttgagtggggtttcaactgtttggcttatattttcaagtatctctcgaaatttttggttaaaaaactggtactcacatgtgatcttttaattccactattgtctcattctaaggaatatctttcaagattttcagcagaagcattatcttttttagtaagaaagtgtcctgtttctaacttgcgcgagtttgttagatcagtttttgaaaagttagagggagatgatgagcaaactaacctctacgaagggcttctgatattattcacagaatccatgacgtcaacgcaagaaactctgcattcgaaagctaaagctatcatgagcgttcttttgcatgaagctttgaccaaatcatccccggaaagatctgtttcattgctctcagatatttggatgaacattagtaagtacgcctcaatcgaaagtttacttccagtctatgaagttatgtatcaggattttaacgattctctcgatgccaccaatatcgatagaatattaaaagtattgacaacaattgtcttctcggaaagtggtagaaaaattcctgattggaataaaattactatcctaattgaaagaataatgagtcaaagtgaaaattgtgcttcgctttcacaggataaagtggctttcctatttgctttatttattcgtaacagtgacgtgaaaactttaacattattccaccaaaaactttttaactacgctttaacaaatatatctgactgtttccttgaattctttcaatttgctttaaggctaagctatgaaagagtattttcattcaatggattaaaattcctacagttatttttaaagaaaaattggcaatcacaaggaaaaaaaattgcacttttttttctagaagtagatgataagcctgaactgcagaaagtacgggaagtaaatttcccagaagaatttattttatctatcagagatttttttgtcacagcagaaattaatgattcgaatgaccttttcgaaatatattggcgagctataatttttaaatattcgaaattacagaatacagaaattattatcccattgcttgaacgtatcttttcaacttttgcatcaccagataattttacgaaagatatggtcggtacactcttaaaaatatatcgtaaagaagacgacgcttcagggaataatctattaaagactattctggataattacgaaaactataaagaaagtttaaactttttaagaggatggaacaagttagtgagtaatcttcatccttcagaaagcttaaaaggactaatgtcacactatccaagtctactccttagcttgacagataattttatgttgcctgatgggaagattcgttatgaaactttagaattaatgaagacattaatgattttgcagggtatgcaagtacctgacctcctttcttcatgtatggttatcgaggaaatacctcttacactacaaaatgccagagatttaaccattagaatcaagaatgttggtgccgaattcggaaaaaccaaaacagacaagctagtatcctctttctttctcaaatacttatttggccttcttaccgttagattctctccagtttggactggtgtttttgacactcttcctaatgtttacacaaaagatgaagccctcgtttggaaacttgtgctatcattcattaaacttcctgatgaaaatcaaaatttggattactaccagcctcttcttgaagatggtgcaaacaaagttctgtgggattcgagtgtagtgaggttaagggacactattgatacgttctcacatatttggtcaaagtattctactcaaaatacgagcattatatctactactattgaaagaagggggaacaccacctacccaattttaattagaaatcaggctctaaaagttatgctatcgattcctcaagttgctgaaaatcacttcgtcgacatcgcaccttttgtttataatgacttcaagacttacaaagatgaagaggatatggaaaatgaacgtgttattactggttcatggacagaagttgatagaaacgtgtttttaaagactttaagcaagttcaaaaatataaagaatgtttatagtgcaacagaattgcacgatcatctgatggtactgttgggtagccgtaatacagacgttcagaagcttgcgttggacgcacttcttgcatacaaaaatccaacgttgaataaatatagagataatttgaaaaatctactagatgacaccttattcaaggacgagattacgacttttttaaccgaaaatgggtcgcagtctatcaaggctgaggacgaaaaggtagtcatgccttatgtccttagaattttcttcggtcgagcacaagtccccccaactagtggacagaaaagaagccgcaaaatagctgtcatttcagttttgccaaattttaagaagccatatattaatgattttttgagtttggctagtgaaaggctggattataattatttttttgggaacagccatcaaataaatagctcaaaggctaccttgaaaactatcagacggatgactggtttcgttaacattgtaaattctactctgtctgtattaagaacaaattttcctttgcatactaattcagtgctgcagccgttgatctattcaattgctatggcatactatgtcttagatactgagagcacagaggaggtacatttaagaaagatggcaagtaatttaaggcaacaaggtctaaaatgtttaagtagtgtctttgaatttgttggaaatacatttgattggtctacttctatggaagatatttacgccgttgtagttaagcctcgtatttcacatttttcggatgaaaacttacaacaaccctcctctttactaagacttttcctttattgggcacacaatccatctctgtaccagtttttgtattacgatgaatttgcaactgccactgcattgatggacaccatatcaaaccaacacgttaaggaagctgttattggcccaataattgaagcggcggactcaattattagaaatccagtaaatgatgatcactacgtagatttggtgactctcatctgcacatcatgtctgaaaatacttccttcgctatatgtcaaactttctgactcaaactcgatttccacatttttgaatttgctagttagtatcactgagatgggatttattcaagatgatcatgttagaagtcgtttaattagttcattaatatcaatattaaaaggaaagctaaaaaaactgcaggaaaatgatacccaaaaaattttgaaaatattaaagctgatagttttcaactacaattgttcttggagtgatattgaagaactatacactaccatatcttctttgttcaaaacatttgacgagcgaaacctcagggtttccttgacagagctcttcatagaactcggtagaaaagttcctgaattagaaagtatttcgaaattggttgcggacttgaattcatactcctcatcacgtatgcatgaatatgattttcctagaattttatcaactttcaaggggttaattgaagatggttataagtcctacagtgagttagagtggttacctctgttgttcacctttttacattttatcaataataaggaagaacttgcgttaagaacaaacgcatcccacgctataatgaagtttattgacttcattaacgaaaagcctaatcttaatgaagcttcaaaatcgatttctatgctgaaggatatacttttacccaatataaggattggcctcagagactccctagaagaggtacaaagtgagtatgtatcagtgctatcatatatggtaaaaaacacgaaatatttcaccgacttcgaagatatggccattttactgtacaatggtgatgaagaagcagatttttttacaaacgttaatcatattcagcttcatcgtcgtcagagagccattaaaagactaggtgaacatgctcatcaactcaaagataacagtatatcccattatttaattccaatgatcgaacattatgtcttttcggatgatgaaagatacagaaatattggaaatgagacccaaatagccatcggagggttggcgcagcacatgagttggaatcaatacaaagctcttcttagaaggtacatttctatgttgaaaaccaagcctaaccaaatgaagcaagccgtacaattaattgttcaactttctgttccacttagagaaactcttcgtatcgtaagagatggggctgagtcgaaacttactttgagcaaatttccttccaacttagatgaacccagtaattttattaagcaagaattgtatccgactctttcgaaaattcttggcactagagatgacgaaactataattgaaagaatgcctattgcggaggcattagttaatattgttttagggctcacaaatgatgatattactaatttcctccctagtattctaacaaatatttgccaagttttgagaagtaaatccgaagaattaagagatgcagtaagagtaaccttgggtaaaatcagtattatcttgggcgctgagtatcttgtctttgtgataaaggaattaatggctacattaaaacgtggttctcaaattcatgtgttaagttacactgtccactacatattaaagagtatgcacggagtcttaaaacactccgatttggatacctcgtccagtatgattgttaagattataatggaaaatatctttgggttcgctggtgaagaaaaagactctgagaattatcatacaaaagtgaaagaaattaagagtaataaaagctatgatgctggtgaaattctcgcctcaaacatcagcctgacagaatttggaacattactctctcctgtgaaggctttgttgatggtcagaattaatctaagaaatcaaaacaaactgagtgaattattgagacgatatttgttgggtttaaatcataatagtgactctgagtcagaaagtatcctcaagttctgccatcagcttttccaggaatcagaaatgagtaattcccctcaaataccaaagaaaaaagtgaaagaccaagtagatgaaaaagaagactttttcttggtaaatttggagtcgaaatcttataccatcaactcaaacagtttgcttttgaacagcactttacaaaaatttgctttagacttacttaggaacgtaataacgagacaccgctcctttttaactgtctcgcacctagagggttttattccatttttgagagattcgttactttcggaaaatgaaggtgtggtaattagtactttacgtatcctgattacattaattaggctagatttttccgatgaatctagtgaaatcttcaaaaactgtgcgaggaaggtactaaatattatcaaggtttctccttcaacttcaagcgaattatgccaaatgggtttaaagtttctttctgcctttatacgtcacacagattcaacattaaaggatactgctttgagttatgttctagggagggtcttaccagatttaaatgaaccaagcagacaaggccttgcttttaatttcctaaaagcacttgtttcaaaacatatcatgcttccagaactctatgacattgcggatactactagggaaatcatggtcacaaaccactcaaaagaaattagggatgtatccaggagcgtttactaccaatttttaatggaatatgaccaaagtaagggtcgtttagaaaagcagttcaaatttatggtcgacaatttacagtatcctaccgagtccggccgtcagtccgtaatggaattgatcaatttgattattacaaaggctaatcctgctttactatccaaattatcatcttccttctttctggcgctagttaatgtttcttttaatgatgatgcgccaagatgccgtgagatggcttcagtattgatttccaccatgcttccaaagcttgaaaataaggaccttgaaattgttgaaaaatatatagccgcttggctaaaacaggttgataatgcatcctttttaaatcttgggttgagaacttataaggtctacttgaaaagtattgggtttgaacatactattgagctagacgagcttgccatcaagcgtataaggtacattttgagcgatacgtcggtaggatcagaacatcagtgggatttggtatactcagctttaaatacgttctcatcttatatggaagcaacagagagcgtttataaacatggtttcaaagacatatgggatggtattatcacatgtctcttgtatccgcactcatgggtccgtcaatcggcggcaaatcttgttcatcaactcatagccaataaggataagctggagatatcattaaccaatctggaaattcaaaccattgcaacaagaattcttcaccaattaggtgcgccttctattccggagaatcttgcgaacgtctcaataaaaacattagttaatatcagtatcctatggaaggagcaacgcacgccgttcataatggatgtatcaaaacaaactggagaggatctaaaatatactaccgccattgattatatggtaactcgaattggtggtattatcaggtcggatgaacatcgtatggattcttttatgtcgaagaaggcgtgtattcagttattggccttattagttcaagttctggacgaagacgaagtaattgcagaaggggaaaagatattattgccgctatatggttatttagaaacatattactcaagagcagttgatgaagaacaggaagaactacgcactctttcaaacgaatgtttaaaaatactggaagacaaattgcaagtatccgattttacaaaaatatacactgctgtcaaacagaccgtattagaaagaagaaaggaaaggagatctaaaagggcaattctggctgttaacgctccacaaatttctgctgataaaaagttgagaaagcatgcgagatcgagggaaaagagaaagcatgaaaaggatgaaaatgggtattatcaaagacgtaacaaaagaaagagagcctag

SEQ ID NO: 394 - DNA, 7482 bp, Artificial Sequence
  Description of Artificial Sequence: Synthetic polynucleotide
atggctaaacaaagacaaactactaaatcttctaagagatatagatattcttccttcaaggctaggattgacgatttgaagattgaaccggctagaaatttggaaaaaagggtacatgattatgtcgagagttctcattttctcgcttcctttgatcagtggaaagaaattaatttaagtgccaaatttacggagtttgcagcggaaattgagcatgatgttcaaacattaccccaaatactttatcatgataaaaagatttttaattctttggtttctttcattaactttcacgatgagttttctttgcaaccgcttttggacctcttggctcaattttgtcatgatttaggtccagattttcttaaattttatgaagaagctatcaaaactttaataaatttattagacgctgctatagaatttgagtcttctaatgtttttgagtggggtttcaactgtttggcttatattttcaagtatctctctaaatttttggttaaaaaattagtactcacatgtgatcttttaattccattgttgtctcattctaaggaatatctttctagattttctgcagaagcattatcttttttagtaagaaagtgtcctgtttctaacttgcgcgagtttgttagatctgtttttgaaaagttagagggagatgatgagcaaactaacctctacgaagggcttttgatattattcacagaatccatgacgtccacgcaagaaactttacattctaaagctaaagctatcatgagcgttcttttgcatgaagctttgaccaaatcttccccggaaagatctgtttctttgctctctgatatttggatgaacattagtaagtacgccagcatcgaaagtttacttccagtctatgaagttatgtatcaggattttaacgattctctcgatgccaccaatatcgatagaatattaaaagtattgacaacaattgtcttctctgaaagtggtagaaaaattcctgattggaataaaattactatcttgattgaaagaataatgagtcaaagtgaaaattgtgcttctctttctcaggataaagtggctttcttatttgctttatttattcgtaacagtgacgtgaaaactttaacattattccaccaaaaactttttaactacgctttaacaaatatatctgactgtttccttgaattctttcaatttgctttaaggttgagctatgaaagagtattttctttcaatggattaaaattcttacagttatttttaaagaaaaattggcaatctcaaggaaaaaaaattgcacttttttttttggaagtagatgataagcctgaattacagaaagtaagagaagtaaatttcccagaagaatttattttatctatcagagatttttttgtcacagcagaaattaatgattctaatgaccttttcgaaatatattggagagctataatttttaaatattctaaattacagaatacagaaattattatcccattgcttgaacgtatcttttccacttttgcatctccagataattttacgaaagatatggtcggtacactcttaaaaatatatcgtaaagaagacgacgcttctgggaataatttattaaagactattttagataattacgaaaactataaagaaagtttaaactttttaagaggatggaacaagttagtgagtaatcttcatccttctgaaagcttaaaaggattaatgtctcactatccaagtttactccttagcttgacagataattttatgttgcctgatgggaagattcgttatgaaactttagaattaatgaagacattaatgattttgcagggtatgcaagtacctgacctcctttcttcttgtatggttatcgaggaaatacctcttacattacaaaatgccagagatttaaccattagaatcaagaatgttggtgccgaattcggaaaaaccaaaacagacaagttggtatcctctttctttctcaaatacttatttggccttcttaccgttagattctctccagtttggactggtgtttttgacactcttcctaatgtttacacaaaagatgaagccctcgtttggaaacttgtgctttctttcattaaacttcctgatgaaaatcaaaatttggattactaccagcctcttcttgaagatggtgcaaacaaagttttatgggattctagtgtagtgaggttaagggacactattgatacgttctctcatatttggtccaagtattctactcaaaatacgagcattatatctactactattgaaagaagggggaacaccacctacccaattttaattagaaatcaggctttgaaagttatgctttctattcctcaagttgctgaaaatcacttcgtcgacatcgcaccttttgtttataatgacttcaagacttacaaagatgaagaggatatggaaaatgaacgtgttattactggttcttggacagaagttgatagaaacgtgtttttaaagactttaagcaagttcaaaaatataaagaatgtttatagtgcaacagaattgcacgatcatttaatggtacttttgggtagccgtaatacagacgttcagaagcttgcgttggacgcacttcttgcatacaaaaatccaacgttgaataaatatagagataatttgaaaaatttattagatgacaccttattcaaggacgagattacgacttttttaaccgaaaatgggtctcagtctatcaaggctgaggacgaaaaggtagtcatgccttatgtccttagaattttcttcggtagagcacaagtccccccaactagtggacagaaaagaagccgcaaaatagctgtcatttctgttttgccaaattttaagaagccatatattaatgattttttgagtttggctagtgaaaggttagattataattatttttttgggaacagccatcaaataaatagctctaaggctaccttgaaaactatcagaagaatgactggtttcgttaacattgtaaattctactttatctgtattaagaacaaattttcctttgcatactaattctgtgttacagccgttgatctattctattgctatggcatactatgtcttagatactgagagcacagaggaggtacatttaagaaagatggcaagtaatttaaggcaacaaggtttgaaatgtttaagtagtgtctttgaatttgttggaaatacatttgattggtctacttctatggaagatatttacgccgttgtagttaagcctcgtatttctcatttttctgatgaaaacttacaacaaccctcctctttattaagacttttcctttattgggcacacaatccatctttgtaccagtttttgtattacgatgaatttgcaactgccactgcattgatggacaccataagcaaccaacacgttaaggaagctgttattggcccaataattgaagcggcggacagtattattagaaatccagtaaatgatgatcactacgtagatttggtgactctcatctgcacatcttgtttgaaaatacttccttctttgtatgtcaaactttctgactccaactctatttccacatttttgaatttgttggttagtatcactgagatgggatttattcaagatgatcatgttagaagtcgtttaattagttctttaatatccatattaaaaggaaagttgaaaaaattacaggaaaatgatacccaaaaaattttgaaaatattaaagttaatagttttcaactacaattgttcttggagtgatattgaagaattatacactaccatatcttctttgttcaaaacatttgacgagagaaacctcagggtttccttgacagagctcttcatagaactcggtagaaaagttcctgaattagaaagtatttccaaattggttgcggacttgaattcttactcctcttctcgtatgcatgaatatgattttcctagaattttatctactttcaaggggttaattgaagatggttataagtcctacagtgagttagagtggttacctttattgttcacctttttacattttatcaataataaggaagaacttgcgttaagaacaaacgcatcccacgctataatgaagtttattgacttcattaacgaaaagcctaatcttaatgaagcttccaaatccatttctatgttgaaggatatacttttacccaatataaggattggcctcagagactccttagaagaggtacaaagtgagtatgtatctgtgctttcctatatggtaaaaaacacgaaatatttcaccgacttcgaagatatggccattttattgtacaatggtgatgaagaagcagatttttttacaaacgttaatcatattcagcttcatcgtcgtcagagagccattaaaagattaggtgaacatgctcatcaactcaaagataacagtatatcccattatttaattccaatgatcgaacattatgtcttttctgatgatgaaagatacagaaatattggaaatgagacccaaatagccatcggagggttggcgcagcacatgagttggaatcaatacaaagctcttcttagaaggtacatttctatgttgaaaaccaagcctaaccaaatgaagcaagccgtacaattaattgttcaactttctgttccacttagagaaactcttcgtatcgtaagagatggggctgagagtaaacttactttgagcaaatttccttccaacttagatgaacccagtaattttattaagcaagaattgtatccgactctttctaaaattcttggcactagagatgacgaaactataattgaaagaatgcctattgcggaggcattagttaatattgttttagggctcacaaatgatgatattactaatttcctccctagtattttaacaaatatttgccaagttttgagaagtaaatccgaagaattaagagatgcagtaagagtaaccttgggtaaaatcagtattatcttgggcgctgagtatcttgtctttgtgataaaggaattaatggctacattaaaacgtggttctcaaattcatgtgttaagttacactgtccactacatattaaagagtatgcacggagtcttaaaacactccgatttggatacctcttccagtatgattgttaagattataatggaaaatatctttgggttcgctggtgaagaaaaagactctgagaattatcatacaaaagtgaaagaaattaagagtaataaaagctatgatgctggtgaaattctcgcctccaacatcagcttaacagaatttggaacattactctctcctgtgaaggctttgttgatggtcagaattaatttaagaaatcaaaacaaattaagtgaattattgagaagatatttgttgggtttaaatcataatagtgactctgagagtgaaagtatcctcaagttctgccatcagcttttccaggaaagtgaaatgagtaattcccctcaaataccaaagaaaaaagtgaaagaccaagtagatgaaaaagaagactttttcttggtaaatttggagagtaaatcttataccatcaactccaacagtttgcttttgaacagcactttacaaaaatttgctttagacttacttaggaacgtaataacgagacaccgctcctttttaactgtctcccacttagagggttttattccatttttgagagattctttactttctgaaaatgaaggtgtggtaattagtactttacgtatcttgattacattaattaggttagatttttccgatgaatctagtgaaatcttcaaaaactgtgcgaggaaggtattgaatattatcaaggtttctccttccacttccagcgaattatgccaaatgggtttaaagtttctttctgcctttatacgtcacacagattctacattaaaggatactgctttgagttatgttttggggagggtcttaccagatttaaatgaaccaagcagacaaggccttgcttttaatttcttgaaagcacttgtttccaaacatatcatgcttccagaactctatgacattgcggatactactagggaaatcatggtcacaaaccactctaaagaaattagggatgtatccaggagcgtttactaccaatttttaatggaatatgaccaaagtaagggtcgtttagaaaagcagttcaaatttatggtcgacaatttacagtatcctaccgagtccggccgtcagtccgtaatggaattgatcaatttgattattacaaaggctaatcctgctttattatccaaattatcttcttccttctttttggcgttggttaatgtttcttttaatgatgatgcgccaagatgccgtgagatggcttctgtattgatttccaccatgcttccaaagcttgaaaataaggaccttgaaattgttgaaaaatatatagccgcttggttgaaacaggttgataatgcatcctttttaaatcttgggttgagaacttataaggtctacttgaaaagtattgggtttgaacatactattgagttggacgagcttgccatcaagcgtataaggtacattttgagcgatacgtctgtaggatctgaacatcagtgggatttggtatactctgctttaaatacgttcagttcttatatggaagcaacagagagcgtttataaacatggtttcaaagacatatgggatggtattatcacatgtctcttgtatccgcactcttgggtccgtcaaagtgcggcaaatcttgttcatcaactcatagccaataaggataagttggagatatctttaaccaatttggaaattcaaaccattgcaacaagaattcttcaccaattaggtgcgccttctattccggagaatcttgcgaacgtcagtataaaaacattagttaatatcagtatcttatggaaggagcaacgcacgccgttcataatggatgtatccaaacaaactggagaggatttgaaatatactaccgccattgattatatggtaactagaattggtggtattatcaggtctgatgaacatcgtatggattcttttatgtccaagaaggcgtgtattcagttattggccttattagttcaagttttggacgaagacgaagtaattgcagaaggggaaaagatattattgccgttatatggttatttagaaacatattactctagagcagttgatgaagaacaggaagaattacgcactctttccaacgaatgtttaaaaatattggaagacaaattgcaagtatccgattttacaaaaatatacactgctgtcaaacagaccgtattagaaagaagaaaggaaaggagatctaaaagggcaattttggctgttaacgctccacaaatttctgctgataaaaagttgagaaagcatgcgagaagtagggaaaagagaaagcatgaaaaggatgaaaatgggtattatcaaagacgtaacaaaagaaagagagcctga

SEQ ID NO: 395 - DNA, 399 bp, Saccharomyces cerevisiae
atgtccggtggtaaaggtggtaaagctggttcagctgctaaagcttctcaatctagatctgctaaagctggtttaacattcccagttggtagagtgcacagattgctaagaagaggtaactacgcccagagaattggttctggtgctccagtctatctaactgctgtcttagaatatttggctgctgaaattttagaattggctggtaatgctgctagagataacaaaaaaaccagaattattccaagacatttacaattggccatcagaaatgatgatgaattgaacaagctattgggtaatgttaccatcgcccaaggtggtgttttgccaaacattcaccaaaacttgttgccaaagaagtctgccaagactgccaaagcttctcaagaactgtaa

SEQ ID NO: 396 - DNA, 399 bp, Artificial Sequence
  Description of Artificial Sequence: Synthetic polynucleotide
atgtccggtggtaaaggtggtaaagctggttctgctgctaaagcttctcaatctagatctgctaaagctggtttaacattcccagttggtagagtgcacagattgttaagaagaggtaactacgcccagagaattggttctggtgctccagtctatttgactgctgtcttagaatatttggctgctgaaattttagaattggctggtaatgctgctagagataacaaaaaaaccagaattattccaagacatttacaattggccatcagaaatgatgatgaattgaacaagttgttgggtaatgttaccatcgcccaaggtggtgttttgccaaacattcaccaaaacttgttgccaaagaagtctgccaagactgccaaagcttctcaagaattatga

SEQ ID NO: 397 - DNA, 396 bp, Saccharomyces cerevisiae
atgtcctctgccgccgaaaagaaaccagcttccaaagctccagctgaaaagaagccagctgccaagaaaacatcaacctccgtcgatggtaagaagagatctaaggttagaaaggagacctattcctcttatatttacaaagttttgaagcaaactcacccagacactggtatttcccagaagtctatgtctattttgaactctttcgttaacgatatctttgaaagaattgctactgaagcttctaaattggccgcttataacaagaaatccactatttctgctagagaaatccaaacagccgttagattgatcttacctggtgaattggctaaacatgccgtctccgaaggtactagggctgttaccaaatactcctcctctactcaagcctaa

SEQ ID NO: 398 - DNA, 396 bp, Artificial Sequence
  Description of Artificial Sequence: Synthetic polynucleotide
atgtcctctgccgccgaaaagaaaccagcttccaaagctccagctgaaaagaagccagctgccaagaaaacatctacctccgtcgatggtaagaagagatctaaggttagaaaggagacctattcctcttatatttacaaagttttgaagcaaactcacccagacactggtatttcccagaagtctatgtctattttgaactctttcgttaacgatatctttgaaagaattgctactgaagcttctaaattggccgcttataacaagaaatccactatttctgctagagaaatccaaacagccgttagattgatcttacctggtgaattggctaaacatgccgtctccgaaggtactagggctgttaccaaatactcctcctctactcaagcctga

SEQ ID NO: 399 - DNA, 315 bp, Saccharomyces cerevisiae
atgcccaagatcttttgtttagcggacgtgtgtatggtccctattggcaccgactctgctagtatttctgattttgttgcactcattgaaaaaaaaatcagagaaagcccattaaagagcactttacacagtgcaggaacaacaattgaagggccttgggatgatgtgatgggtttgattggcgaaatccatgaatacggtcatgagaaaggatatgttagagtacacactgatattcgtgttgggactagaactgataagcaccaaactgctcaagataagatcgatgttgttttaaaaaaaatttctcaatga

SEQ ID NO: 400 - DNA, 315 bp, Artificial Sequence; identical to SEQ ID NO: 399
  Description of Artificial Sequence: Synthetic polynucleotide

SEQ ID NO: 401 - DNA, 2343 bp, Saccharomyces cerevisiae
atggtagattttttaccaaaagtaacggaaataaatcctccatccgaaggtaatgatggtgaagataacataaagccactttcaagtggttcagagcagcggccgttgaaagaagaggggcaacaaggtggtagaagacatcaccggcggttgtcctctatgcatgagtattttgacccgttttccaacgcagaggtctattatggaccaataacagatccaagaaaacagtcaaaaattcatagactaaatagaaccagaactatgagtgttttcaataaagtttctgacttcaaaaacggaatgaaggattataccctgaaaaggaggggttctgaagacgacagcttcctcagcagccaaggtaaccgtagattttatattgataatgtggatctcgctttagatgagctgctcgctagtgaggacacagacaagaatcaccaaattaccatagaagacactgggcccaaagttattaaagtcgggacggccaattccaacggtttcaaacatgtaaatgttaggggaacatatatgctttctaacttgttgcaggaactaaccattgcaaaaagtttcggacgacaccaaatatttttggatgaggcgcgtataaatgaaaaccctgttgatagattatcaagattgataacgactcaattttggacgagtttaacgagaagagttgatctttataatattgcagaaattgctagagactcaaaaatagatacgccaggcgctaaaaatccaagaatttatgttccatataactgcccagagcagtacgaattttacattcaggcatctcaaatgaacccgtccttaaaacttgaagtggagtacttaccaaaagatattacagcagagtatgttaaatcattaaatgatacaccgggtttgttagccctggctatggaagaacacgttaatccatctactggtgaaaggtccctagttggttatccttatgcggtacctggcggtagattcaatgaattgtatggctgggattcatatttaatggcactgggactcatagaaagtaataaggttgatgttgcaagaggtatggtggagcattttatattcgaaattgatcactatagtaaaattttgaatgctaataggagttattatctttgcagatctcagccaccattcctaaccgatatggctctgctcgtatttgaaaagataggaggtaagaataatccaaacgctattcagttgttaaaacgcgcgttcagagctgctattaaagaatataaagaggtgtggatgtcgagccctaggttagattctctgacagggctgtcttgttatcattctgatggtattggtatccctccggaaactgaaccagatcattttgatactatattattaccgtatgctgaaaagtacaatgttactctggaaaagcttaggtacctttataacgaaggcatgattaaagaacccaaactggatgcattttttttacatgatcgtgccgtgagagagtcaggacatgacacgacttataggtttgaaggtgtatgtgcatatttagcgacaattgatctaaactccttgctctataaatatgagaaagatattgctttcgtcattaaggagtattttggtaatgaatataaagatgagaatgatggaacggtaaccgattctgaacactgggaggagctagctgaactgaggaaaacaaggattaataagtatatgtgggacgaagattcagggtttttcttctattataacacgaaactgaaatgcagaacgtcttatgagtctgcaacgactttttggagtttgtgggctggtcttgcaactgaagagcaagcaaaaatcacagtagaaaaagctcttcctcagttagaaatgctcggcggactagttgcatgcacagaaaaatcaagaggtcctatttctattgatagaccgatcaggcaatgggattatccttttggttgggcgccgcaccaaatattagcctggaaaggtttatctgcatatggttatcaacaagtagctacaagattggcttataggtggctgtacatgattacaaaatcatttgttgattataacggaatggtggtagaaaaatatgatgtgacaagagggactgatccgcatcgcgttgatgcggaatatggtaatcaaggtgctgattttaagggcgtcgctacagaaggctttggttgggtgaacacaagttatttgctcggattgaaatatatgaataatcatgcaagaagggctctcgctgcttgtagtccaccattgccatttttcaatagtttgaaaccctctgagaaaaaattgtattacctataa

SEQ ID NO: 402 - DNA, 2343 bp, Artificial Sequence
  Description of Artificial Sequence: Synthetic polynucleotide
atggtagattttttaccaaaagtaacggaaataaatcctccatccgaaggtaatgatggtgaagataacataaagccactttccagtggttctgagcagagaccgttgaaagaagaggggcaacaaggtggtagaagacatcacaggagattgtcctctatgcatgagtattttgacccgttttccaacgcagaggtctattatggaccaataacagatccaagaaaacagtccaaaattcatagattgaatagaaccagaactatgagtgttttcaataaagtttctgacttcaaaaacggaatgaaggattataccttgaaaaggaggggttctgaagacgacagcttcctcagcagccaaggtaaccgtagattttatattgataatgtggatctcgctttagatgagttactcgctagtgaggacacagacaagaatcaccaaattaccatagaagacactgggcccaaagttattaaagtcgggacggccaattccaacggtttcaaacatgtaaatgttaggggaacatatatgctttctaacttgttgcaggaattgaccattgcaaaaagtttcggaagacaccaaatatttttggatgaggcgcgtataaatgaaaaccctgttgatagattatctagattgataacgactcaattttggacgagtttaacgagaagagttgatctttataatattgcagaaattgctagagactctaaaatagatacgccaggcgctaaaaatccaagaatttatgttccatataactgcccagagcagtacgaattttacattcaggcatctcaaatgaacccgtccttaaaacttgaagtggagtacttaccaaaagatattacagcagagtatgttaaatctttaaatgatacaccgggtttgttagccttagctatggaagaacacgttaatccatctactggtgaaaggtccttggttggttatccttatgcggtacctggcggtagattcaatgaattgtatggctgggattcttatttaatggcattgggactcatagaaagtaataaggttgatgttgcaagaggtatggtggagcattttatattcgaaattgatcactatagtaaaattttgaatgctaataggagttattatctttgcagatctcagccaccattcttgaccgatatggctttactcgtatttgaaaagataggaggtaagaataatccaaacgctattcagttgttaaaacgcgcgttcagagctgctattaaagaatataaagaggtgtggatgtctagccctaggttagattctttaacagggttatcttgttatcattctgatggtattggtatccctccggaaactgaaccagatcattttgatactatattattaccgtatgctgaaaagtacaatgttactttggaaaagcttaggtacctttataacgaaggcatgattaaagaacccaaattggatgcattttttttacatgatcgtgccgtgagagagagtggacatgacacgacttataggtttgaaggtgtatgtgcatatttagcgacaattgatttgaactccttgctctataaatatgagaaagatattgctttcgtcattaaggagtattttggtaatgaatataaagatgagaatgatggaacggtaaccgattctgaacactgggaggagttggctgaattgaggaaaacaaggattaataagtatatgtgggacgaagattctgggtttttcttctattataacacgaaattgaaatgcagaacgtcttatgagtctgcaacgactttttggagtttgtgggctggtcttgcaactgaagagcaagcaaaaatcacagtagaaaaagctcttcctcagttagaaatgctcggcggattggttgcatgcacagaaaaatctagaggtcctatttctattgatagaccgatcaggcaatgggattatccttttggttgggcgccgcaccaaatattagcctggaaaggtttatctgcatatggttatcaacaagtagctacaagattggcttataggtggttatacatgattacaaaaagttttgttgattataacggaatggtggtagaaaaatatgatgtgacaagagggactgatccgcatcgcgttgatgcggaatatggtaatcaaggtgctgattttaagggcgtcgctacagaaggctttggttgggtgaacacaagttatttgctcggattgaaatatatgaataatcatgcaagaagggctctcgctgcttgtagtccaccattgccatttttcaatagtttgaaaccctctgagaaaaaattgtattacttatga

SEQ ID NO: 403 - DNA, 861 bp, Saccharomyces cerevisiae
atggaaacggatagtggtatacctggtcattcatttgtgttaaagtggacaaaaaacatcttttcgcgcacattgcgtgcatctaactgtgtacctagacatgttgggttcatcatggatgggaacaggagattcgctagaaagaaagagatggacgtaaaggagggccacgaggcaggatttgttagtatgagtagaatcttagaactgtgttatgaagcaggagtcgatacggctaccgtgtttgccttttcaattgaaaatttcaagaggagctcacgggaagttgaatcactgatgactttagcgcgcgaaaggatacgacaaatcacagaacgtggagagctggcctgtaagtatggggtacgcattaaaattatcggcgatctctctttgttggataagtctctattagaagatgttcgggttgctgtggaaactacaaagaacaacaaaagggccacgttaaatatctgctttccatatacaggcagggaagaaatcttgcatgccatgaaagaaacaattgttcaacataagaagggcgccgctatagacgaaagcacgttagaatcgcatctctacacggcgggggtaccccctttagatttattgattaggacaagtggcgtttccagattaagtgactttttgatatggcaggcatcgagtaagggcgtacgcatcgaattgctggattgtttatggccagagtttggacctatacggatggcatggattttattaaaattttcgtttcacaaatcctttttaaacaaagagtacagattagaggaaggtgattatgacgaggaaaccaatggggaccccatcgatttgaaagaaaaaaagttgaattaa

SEQ ID NO: 404 - DNA, 861 bp, Artificial Sequence
  Description of Artificial Sequence: Synthetic polynucleotide
atggaaacggatagtggtatacctggtcattcttttgtgttaaagtggacaaaaaacatctttagccgcacattgcgtgcatctaactgtgtacctagacatgttgggttcatcatggatgggaacaggagattcgctagaaagaaagagatggacgtaaaggagggccacgaggcaggatttgttagtatgagtagaatcttagaattatgttatgaagcaggagtcgatacggctaccgtgtttgccttttctattgaaaatttcaagaggagcagcagagaagttgaatctttgatgactttagcgcgcgaaaggataagacaaatcacagaacgtggagagttggcctgtaagtatggggtacgcattaaaattatcggcgatctctctttgttggataagtctttattagaagatgttcgtgttgctgtggaaactacaaagaacaacaaaagggccacgttaaatatctgctttccatatacaggcagggaagaaatcttgcatgccatgaaagaaacaattgttcaacataagaagggcgccgctatagacgaaagcacgttagaaagtcatctctacacggcgggggtaccccctttagatttattgattaggacaagtggcgtttccagattaagtgactttttgatatggcaggcaagtagtaagggcgtacgcatcgaattgttggattgtttatggccagagtttggacctataagaatggcatggattttattaaaattttcttttcacaaatcctttttaaacaaagagtacagattagaggaaggtgattatgacgaggaaaccaatggggaccccatcgatttgaaagaaaaaaagttgaattga

SEQ ID NO: 405 - DNA, 1422 bp, Saccharomyces cerevisiae
atgtttcaaaggtctggcgctgctcatcacatcaaattgatttcatctcgaagatgccgctttaaatcctcctttgcagttgctttaaacgctgccagtaagttggtaactcccaagattctttggaataatcccatatcattagtctcgaaggagatgaacacattggccaaaaatatagttgccctcatcgggtctggccatccggtgctaaacaaggttactagttactattttgaaacagaaggcaaaaaagtacgtcccttgttagtgttgttgttgtcaagagcactttctgaaattcccatgacagaaagaaatcacttgaaaattgacaagtcggatgttcctgaggacccaatttactctaaacctagtcaaaatcaactatttcaacgtcctgcaagtagcatatccccactacatattcttcacggtattaaaccactaaatcccttgacaaaaggtcctgagcctttgccagaagaaacttttgacaaacaaagagggattttacccaaacagagaagattagcagagattgtagagatgatacacactgcgtctttacttcatgatgacgttattgatcattctgatacaagaagaggaaggccaagcggaaatgctgcctttaccaacaagatggccgttttggcgggtgattttctcttagggagagcaacagtgtcaatttcaagattacacaaccccgaagtcgtagaactaatgtctaatagtattgcgaatcttgtcgaaggtgagttcatgcaactgaaaaatacttccattgacgcggatatcgataccatcgaaaatggccataagctacttccggttccttctaaaaagcttgaagttaaagagcacgactttcgtgttccaagccgccaacaggggctgcaattatctcatgatcagattatagaaactgcatttgaatactacatacacaagacctatctgaagactgctgctttgatatcaaaatcttgcagatgtgctgctatattatctggggcatcacctgccgttatcgacgaatgctatgatttcggtagaaatctaggtatatgtttccaactcgtagatgatatgcttgattttactgtgtctggaaaagatttagggaagccatccggcgcggatctaaaattaggtattgctactgctccagtcttgtttgcatggaaagaagacccatctttaggtccactaatttcacgcaatttttcagagaggggtgatgttgaaaaaactattgattctgtgagactccataatggtatagcgaagacgaaaatactagcggaggaatatagggacaaggcattacaaaatctacgggattctcttcctgaatctgatgctcgttctgccctagagtttttaactaatagtatactaacaagaagaaagtaa

SEQ ID NO: 406 - DNA, 1422 bp, Artificial Sequence
  Description of Artificial Sequence: Synthetic polynucleotide
atgtttcaaaggtctggcgctgctcatcacatcaaattgatttcttctagaagatgccgctttaaatcctcctttgcagttgctttaaacgctgccagtaagttggtaactcccaagattctttggaataatcccatatctttagtctccaaggagatgaacacattggccaaaaatatagttgccctcatcgggtctggccatccggtgttgaacaaggttactagttactattttgaaacagaaggcaaaaaagtacgtcccttgttagtgttgttgttgtccagagcactttctgaaattcccatgacagaaagaaatcacttgaaaattgacaagagtgatgttcctgaggacccaatttactctaaacctagtcaaaatcaattatttcaacgtcctgcaagtagcatatccccattgcatattcttcacggtattaaaccattgaatcccttgacaaaaggtcctgagcctttgccagaagaaacttttgacaaacaaagagggattttacccaaacagagaagattagcagagattgtagagatgatacacactgcgtctttacttcatgatgacgttattgatcattctgatacaagaagaggaaggccaagcggaaatgctgcctttaccaacaagatggccgttttggcgggtgattttctcttagggagagcaacagtgtccatttctagattacacaaccccgaagtcgtagaattgatgtctaatagtattgcgaatcttgtcgaaggtgagttcatgcaattgaaaaatacttccattgacgcggatatcgataccatcgaaaatggccataagcttcttccggttccttctaaaaagcttgaagttaaagagcacgactttcgtgttccaagccgccaacaggggttgcaattatctcatgatcagattatagaaactgcatttgaatactacatacacaagacctatttgaagactgctgctttgatatccaaatcttgcagatgtgctgctatattatctggggcatctcctgccgttatcgacgaatgctatgatttcggtagaaatttgggtatatgtttccaactcgtagatgatatgcttgattttactgtgtctggaaaagatttagggaagccatccggcgcggatttgaaattaggtattgctactgctccagtcttgtttgcatggaaagaagacccatctttaggtccattgatttctcgcaatttttctgagaggggtgatgttgaaaaaactattgattctgtgagactccataatggtatagcgaagacgaaaatattggcggaggaatatagggacaaggcattacaaaatttaagagattctcttcctgaatctgatgctcgttctgccttagagtttttaactaatagtatattaacaagaagaaagtga

SEQ ID NO: 407 - DNA, 1302 bp, Saccharomyces cerevisiae
atgattgtggggttgacactttattttgtattattccgttcaatacagtatttactggtttttttgactccaattaggcagtttgatacatcaacatcacttttattaaacgaattatgttcttctccctctgaaatcaacagttattggaacaagtatttttggaataagctactatcatgggacagtgttttttttatcaagaacataacttccaaaaacggaaaacctcaatttgagcatgaatacgcgttttctcagttgtggacttttttcgttaggctgtttattaaaagtaataacgatagcatctaccatgccttaagggttggagttgcaatagaaaatgttttattttacttgtcaggtattgttttatattttctaacaaaaaaaattttcagccaaaatataaggcaatcacagtttgctagaactatcgctaaaaaaacatctctgttgtttttcttaacgagtgccgctggatttttaacaagcatatattctgaaccattatcttttttttttgcatttgttggtatttggagtcgtgaatgctccatttccgtgcccgtattgggtcaattcgatatttcgtggagatattggtttccttactcctttatcagcatggcttgctttaccttagcatccttgaatcgttcaaactgtgttttgttagggatttactttatttttgaccttattgaactaacaaagaacaggaagtttgtaaaagcaatatgtttcccactattatcaggatcattaatgttttctgctctactatatcaacaatattacctaccatataagacattttgtcctcaaaggggtgaatggtgtaaatctcaattgttttcaagcatttttatcacgaaaacttctttatattcctacattcagagtcattattggggagttgggttattgaaatactggaccccaaacaacatcccaaactttttgtttgctgtcccaaatattattattttaatctattcctccatatatttcagcaaaatttatccctcctataacttgaaggctctcgtatggatcaccagagcactggtcgtcatagtatgcttttttgcccatgtccaaattctgaatcgtatagcctcctttttacccttgcacctttggtatttggctgatagattggttaaaacttctgatccaaaaaaaatggaaaatccgaaaggtgacgataagatagtcaagttttacatatactggttggcattctggatacctttacagactatcctatttgcagcttttttaccaccagcctga

SEQ ID NO: 408 - DNA, 1302 bp, Artificial Sequence
  Description of Artificial Sequence: Synthetic polynucleotide
atgattgtggggttgacactttattttgtattattccgttctatacagtatttattggtttttttgactccaattaggcagtttgatacatctacatctcttttattaaacgaattatgttcttctccctctgaaatcaacagttattggaacaagtatttttggaataagttattatcttgggacagtgttttttttatcaagaacataacttccaaaaacggaaaacctcaatttgagcatgaatacgcgttttctcagttgtggacttttttcgttaggttatttattaaaagtaataacgatagcatctaccatgccttaagggttggagttgcaatagaaaatgttttattttacttgtctggtattgttttatattttttaacaaaaaaaattttcagccaaaatataaggcaatctcagtttgctagaactatcgctaaaaaaacatctttgttgtttttcttaacgagtgccgctggatttttaacaagcatatattctgaaccattatcttttttttttgcatttgttggtatttggagtcgtgaatgctccatttccgtgcccgtattgggtcaattcgatatttcttggagatattggtttccttactcctttatcagcatggcttgctttaccttagcatccttgaatcgttctaactgtgttttgttagggatttactttatttttgaccttattgaattaacaaagaacaggaagtttgtaaaagcaatatgtttcccattattatctggatctttaatgttttctgctttgttatatcaacaatattacttgccatataagacattttgtcctcaaaggggtgaatggtgtaaatctcaattgttttctagcatttttatcacgaaaacttctttatattcctacattcagagtcattattggggagttgggttattgaaatactggaccccaaacaacatcccaaactttttgtttgctgtcccaaatattattattttaatctattcctccatatatttcagcaaaatttatccctcctataacttgaaggctctcgtatggatcaccagagcattggtcgtcatagtatgcttttttgcccatgtccaaattttgaatcgtatagcctcctttttacccttgcacctttggtatttggctgatagattggttaaaacttctgatccaaaaaaaatggaaaatccgaaaggtgacgataagatagtcaagttttacatatactggttggcattctggatacctttacagactatcttatttgcagcttttttaccaccagcctga

SEQ ID NO: 409 - DNA, 642 bp, Saccharomyces cerevisiae
atgggacttatttcatacgaaaatgaggcgataaacgaggtgaaaaaggcagataaccatcacgttagcaaatttgtgactagttactatgggccatcatcgtcgtcatggcagtcaggaatatggattttgtttgtgctgtttgttgccgcagtaatccttataatactgttcacttttgtagcgaacagaaggagacgaaggatggggcgtgctcccattagaggtacggcatggttgacaccgccttcatacagacagtctcagcaacaatatactgggaccgttcagcaacggacagatgattatgttcctgagtatacagaaacagcgaacgaacatgatcttggatactatgaccagcggggcgagtttcaccccaacgataaggctgcatacgtggcccccccgccattggtacaagaatgttcatcagaatctgttaattctttagaaagacctcccgctgctgtagttcaccaagctaactctttagatacggattacggtttaacaaggcctagcaatgggcgcgttccagctgtaagtgatacggtggagcaattggaaaggcttccgggcgggactacaacgcaggaaattaacccaccggagagggcaaaggtaaatgcaaggtcatga

SEQ ID NO: 410 - DNA, 642 bp, Artificial Sequence
  Description of Artificial Sequence: Synthetic polynucleotide
atgggacttatttcttacgaaaatgaggcgataaacgaggtgaaaaaggcagataaccatcacgttagcaaatttgtgactagttactatgggccatcttcttcttcttggcagtccggaatatggattttgtttgtgctttttgttgccgcagtaatccttataatattattcacttttgtagcgaacagaaggagaagaaggatggggcgtgctcccattagaggtacggcatggttgacaccgccttcttacagacagtctcagcaacaatatactgggaccgttcagcaaagaacagatgattatgttcctgagtatacagaaacagcgaacgaacatgatcttggatactatgaccagagaggcgagtttcaccccaacgataaggctgcatacgtggcccccccgccattggtacaagaatgttcttctgaatctgttaattctttagaaagacctcccgctgctgtagttcaccaagctaactctttagatacggattacggtttaacaaggcctagcaatgggcgcgttccagctgtaagtgatacggtggagcaattggaaaggcttccgggcgggactacaacgcaggaaattaacccaccggagagggcaaaggtaaatgcaaggtcttga

SEQ ID NO: 411 - DNA, 1494 bp, Saccharomyces cerevisiae
atgactttgagtaagtattctaaaccaactctaaacgaccctaatttattcagagaatctggttatattgacggaaaatgggttaagggcactgacgaagtttttgaggtggtagaccctgcttccggcgaaatcatagcaagagttcccgaacaaccagtctccgtggttgaggaagcgattgatgttgcctatgaaactttcaagacgtacaagaatacaacaccaagagagagggcaaagtggctcagaaacatgtataacttaatgcttgaaaatttggatgatctggcaaccatcattactttagaaaatggtaaagctctaggggaagctaaaggagaaatcaaatacgcggcttcgtattttgagtggtacgccgaggaagcaccccgtttatatggtgctactattcaacccttgaaccctcacaacagagtattcacaattaggcaacctgttggtgtatgcggtataatttgtccatggaattttccgagcgccatgatcacgagaaaggccgccgctgctttagctgtgggctgcacagtagtcatcaagccagactctcaaacgccgctatctgctttagcaatggcatatttggctgaaaaggcaggctttcccaagggttcgtttaatgttattctttcacatgccaacacaccaaagcttggtaaaacattatgtgaatcaccaaaagtcaagaaagttacttttactggttctacaaacgtcggtaaaatcttgatgaaacaatcttcttctactttgaagaaactgtcttttgagctgggtggtaacgcccctttcatagtctttgaggatgccgatttggatcaagccttggaacaagccatggcttgtaaatttaggggtttgggtcaaacatgtgtgtgcgcaaatagactttacgttcactcatccataattgataaatttgcgaaattactcgcggagagggtcaaaaaattcgtaattggccatggtttggacccaaaaactacacatggttgtgtcattaactccagcgctattgaaaaagttgaaagacataaacaggatgccattgataagggagcaaaagttgtgcttgaaggtggacgtttaactgagttaggtcctaacttttatgctccagtaattttgtcacacgttccctcaacagctattgtttccaaggaggagacttttggtccattatgtccaatcttttcttttgatactatggaagaagttgtcggatatgctaatgatactgagtttggtttagcagcatatgtcttttctaaaaatgtcaacactttatacactgtgtctgaagctttggaaactggtatggtttcatgtaatacaggtgttttttcggattgttctataccatttggtggtgttaaagagtcaggatttggaagagaaggttcgctatatggtattgaagattacactgttttgaagaccatcacaattgggaatttgccaaacagcatttaa

SEQ ID NO: 412 - DNA, 1494 bp, Artificial Sequence
  Description of Artificial Sequence: Synthetic polynucleotide
atgactttgagtaagtattctaaaccaactttgaacgaccctaatttattcagagaatctggttatattgacggaaaatgggttaagggcactgacgaagtttttgaggtggtagaccctgcttccggcgaaatcatagcaagagttcccgaacaaccagtctccgtggttgaggaagcgattgatgttgcctatgaaactttcaagacgtacaagaatacaacaccaagagagagggcaaagtggctcagaaacatgtataacttaatgcttgaaaatttggatgatttggcaaccatcattactttagaaaatggtaaagctttaggggaagctaaaggagaaatcaaatacgcggcttcttattttgagtggtacgccgaggaagcaccccgtttatatggtgctactattcaacccttgaaccctcacaacagagtattcacaattaggcaacctgttggtgtatgcggtataatttgtccatggaattttccgagcgccatgatcacgagaaaggccgccgctgctttagctgtgggctgcacagtagtcatcaagccagactctcaaacgccgttatctgctttagcaatggcatatttggctgaaaaggcaggctttcccaagggttcttttaatgttattctttctcatgccaacacaccaaagcttggtaaaacattatgtgaatctccaaaagtcaagaaagttacttttactggttctacaaacgtcggtaaaatcttgatgaaacaatcttcttctactttgaagaaattatcttttgagttaggtggtaacgcccctttcatagtctttgaggatgccgatttggatcaagccttggaacaagccatggcttgtaaatttaggggtttgggtcaaacatgtgtgtgcgcaaatagactttacgttcactcttccataattgataaatttgcgaaattactcgcggagagggtcaaaaaattcgtaattggccatggtttggacccaaaaactacacatggttgtgtcattaactccagcgctattgaaaaagttgaaagacataaacaggatgccattgataagggagcaaaagttgtgcttgaaggtggacgtttaactgagttaggtcctaacttttatgctccagtaattttgtctcacgttccctccacagctattgtttccaaggaggagacttttggtccattatgtccaatcttttcttttgatactatggaagaagttgtcggatatgctaatgatactgagtttggtttagcagcatatgtcttttctaaaaatgtcaacactttatacactgtgtctgaagctttggaaactggtatggtttcttgtaatacaggtgttttttctgattgttctataccatttggtggtgttaaagagagtggatttggaagagaaggttctttgtatggtattgaagattacactgttttgaagaccatcacaattgggaatttgccaaacagcatttga

SEQ ID NO: 413 - DNA, 2211 bp, Saccharomyces cerevisiae
atgaatcaaaatttaaaaaacacttcttgggctgatcgaataggaagcgacgatcaagaaagaaaagctaactcttcagaggtttcacaaagcccaccacccaataatagcttcgagtcatcaatggattcacaatttagctatgctcattcaaataaaagtagcatttcattcgaatctattcaaaccacggaaagacttcttgacaaattagacctcagcttggaagatgaactgattctgcaagaagctttattagaagaagaaaacgcgtcgagaaattcgcaactgtcacaaacaagtggtccaacattatgtatgcctgcgtcggaattcccttcattaaggtatagaactaatccctctccaacatatatacaagctagagatcgttctcttatcatagacaatttaaaagaaaaggattccactttgagaggcaaatactcttccggtaaagtggaaaggcatttgcccgtgaagtcgagatactcttatatcgtcgaagaagattatgactctgagacttttagtggcatgaaaccccaaatgaatagaaatgagaaagattataagtacccaaaccttgaaaatggcaatagaagcacaaatagccctaatcctttcaacttcgagaaatataggattgaaaatactagactgcaccatctttatcctacgctgatatcagacaataatactagcgttgacaataatgctaatagtaagaataacagaactactagtaataatattaatacatctacaaaaactgacagaatatccgagaagcagagttgccccaatgagttcacaaccacgcaaaagagtaattgtctttatcggaacggaagttcaacaagcaccaacacctccttttctgaagttggacaactatcaaagccgaaaactcagtcttcttttgaaagtgaatcatcctcattctccaaactcaagttaactaagagtgatacaacacccatcaaaccatctcctaaacggtctaattcctctacctcgacgataacgaaaacaaataccatgacaaatgatatttcattacctccaacgccaccatataaagctcataaaaaaaaaacgtcactaaattcgctaaaaaaactttttaaatctcctaggacaagagcaaaaaataagaaagaccttgagtctgaaggatcaagccctatccggtctgccaccaattcattggacttctctggggagaatattcaacttccatctacttcaagtaccattaataattccagtccacatttagctaggtatatttttcctccaaacccagttttccattttaaaacagcatcaacacctcagtcatccacggataaaaaaaagaacagtaaagcacgtccaaataggactcatttgagaactttctcggatttccatacaacggaaaaagattcaaaaataggtgaactaagtgcactaacagaacaatcaaataagccctaccacccgaaagttagaagaagaacactttctttagatggtatgttgcccaataattcgacgcaatgcatggattccttcagtcataaaaaagaaggatcgaacgcaacaagcaagtgcgggaagcttaaatttcacccagaaccttatgataatgatgaatcttcacacatcggacaggcaattactatgcgtcatcaaggcaaacttgaagaatctgcacaacgactgaaaaaagcctgcgcgtgcggaaacaaaactgcgtttctgttatatggactagccctgcgacatggctgcggagtggacaagaacttgaaattatcattaggatatttaatggctgccactgatatcaaatcctttgctgctgaggttcttgatttagatataaatccgttaaattttgcttcaatggacgatatccctgatatagcgcctgaaccaacagcacctgccttgtacgaatgtggtatggcatatttaaagggtcttgggatggatcatcccgacgagcgaaaaggtttgaaatttttggaaaaagctgctctattaggccatgtagactcaatgtgcttaagcgggacaatttggtccaaaacttcaaacgtaaagaaaagggatctcgccagagctgctgcatggtttaggatagccgataaaaaaggtgcaaatctattaggttcagattggatttataaggaaaagtacatgaaacaaggtccgaaataa

SEQ ID NO: 414 - DNA, 2211 bp, Artificial Sequence
  Description of Artificial Sequence: Synthetic polynucleotide
atgaatcaaaatttaaaaaacacttcttgggctgatagaataggaagcgacgatcaagaaagaaaagctaactcttctgaggtttctcaaagcccaccacccaataatagcttcgagtcttctatggattctcaatttagctatgctcattctaataaaagtagcatttctttcgaatctattcaaaccacggaaagacttcttgacaaattagacctcagcttggaagatgaattgattttacaagaagctttattagaagaagaaaacgcgtccagaaattctcaattatctcaaacaagtggtccaacattatgtatgcctgcgtctgaattcccttctttaaggtatagaactaatccctctccaacatatatacaagctagagatcgttctcttatcatagacaatttaaaagaaaaggattccactttgagaggcaaatactcttccggtaaagtggaaaggcatttgcccgtgaagtctagatactcttatatcgtcgaagaagattatgactctgagacttttagtggcatgaaaccccaaatgaatagaaatgagaaagattataagtacccaaaccttgaaaatggcaatagaagcacaaatagccctaatcctttcaacttcgagaaatataggattgaaaatactagattgcaccatctttatcctacgttgatatctgacaataatactagcgttgacaataatgctaatagtaagaataacagaactactagtaataatattaatacatctacaaaaactgacagaatatccgagaagcagagttgccccaatgagttcacaaccacgcaaaagagtaattgtctttatagaaacggaagttctacaagcaccaacacctccttttctgaagttggacaattatccaagccgaaaactcagtcttcttttgaaagtgaatcttccagtttctccaaactcaagttaactaagagtgatacaacacccatcaaaccatctcctaaaagatctaattcctctacctctacgataacgaaaacaaataccatgacaaatgatatttctttacctccaacgccaccatataaagctcataaaaaaaaaacgtctttgaattctttgaaaaaactttttaaatctcctaggacaagagcaaaaaataagaaagaccttgagtctgaaggaagcagccctatcagatctgccaccaattctttggacttctctggggagaatattcaacttccatctacttctagtaccattaataattccagtccacatttagctaggtatatttttcctccaaacccagttttccattttaaaacagcaagcacacctcagtcttccacggataaaaaaaagaacagtaaagcacgtccaaataggactcatttgagaactttcagtgatttccatacaacggaaaaagattctaaaataggtgaattaagtgcattaacagaacaaagcaataagccctaccacccgaaagttagaagaagaacactttctttagatggtatgttgcccaataattctacgcaatgcatggattccttcagtcataaaaaagaaggaagtaacgcaacaagcaagtgcgggaagcttaaatttcacccagaaccttatgataatgatgaatcttctcacatcggacaggcaattactatgcgtcatcaaggcaaacttgaagaatctgcacaaagattgaaaaaagcctgcgcgtgcggaaacaaaactgcgtttttattatatggattggccttaagacatggctgcggagtggacaagaacttgaaattatctttaggatatttaatggctgccactgatatcaaatcctttgctgctgaggttcttgatttagatataaatccgttaaattttgcttccatggacgatatccctgatatagcgcctgaaccaacagcacctgccttgtacgaatgtggtatggcatatttaaagggtcttgggatggatcatcccgacgagagaaaaggtttgaaatttttggaaaaagctgctttattaggccatgtagactccatgtgcttaagcgggacaatttggtccaaaacttctaacgtaaagaaaagggatctcgccagagctgctgcatggtttaggatagccgataaaaaaggtgcaaatttattaggttctgattggatttataaggaaaagtacatgaaacaaggtccgaaatga

SEQ ID NO: 415 - DNA, 1647 bp, Saccharomyces cerevisiae
atggtatacacttcaacgtacagacacactatcgttgttgaccttttagaatatttgggtatagtgtccaacttagaaactttacagagtgcccgtgaagatgaaacaagaaaacccgagaataccgataaaaaagaatgtaaacccgactatgatatagaatgcggtcctaatagatcgtgctctgaatcctctaccgattcagactctagtggttcacagatcgaaaaaaatgatcctttcagggtggattggaacggccccagtgatcctgagaacccacaaaactggcccctactgaaaaaatcattggtagtattccaaataatgttacttacttgcgtcacgtacatgggatcctccatttacacacctggccaggaatatattcaagaagagttccacgttggtcatgtagtggcaacattaaatctttctttatatgttcttggttatggtctaggtcccatcattttttcaccgctatcagaaactgcacgctatggccgtctaaatctgtacatggtgactttattttttttcatgatctttcaagttggttgtgctactgtgcataacatcggcggtttaatcgtcatgcgtttcatcagtggcatactgtgcagcccatcgttggccactggtggcggtacagtggctgatatcatttcaccagaaatggttcctctcgttttaggtatgtggtcagccggtgctgttgctgcgccagtcttggctcccttactaggcgctgctatggtcgatgctaaaaattggcgattcatattttggttattaatgtggttaagtgctgccacttttatcttgttggcatttttcttccctgaaacacaacaccataatattttgtaccgccgtgctttgaaattgagaaaagaaactggtgatgacaggtactatactgaacaggataaactcgatagagaagttgatgcaagaacttttttgatcaatactttgtataggcctctcaaaatgattatcaaagagcctgcaattttggcttttgatctctatatcgctgttgcttatggttgtttctacttattctttgaagcattccctattgtatttgtaggtatataccacttcagcttagttgaagttggcttggcctatatggggttttgcgtagggtgcgtacttgcttatggcttattcggtattttaaacatgaggattattgtaccacgttttagaaacggcacattcaccccggaagcttttttaatcgtggcaatgtgtgtctgctggtgcctgcctctgtctttgttcttatttggttggactgctcgagtgcattggattttgccagttatctcggaagttttttttgttttagctgtctttaacattttccaagcaacttttgcatatttggctacatgctacccaaagtatgttgcatccgtttttgcaggcaatggtttttgtcgggcttcgtttgcctgtgcttttccgttgtttggtagagcaatgtatgacaatttagctactaagaactatcctgtggcatggggttcgtccttagtggggttcctaactttaggtctagctattatcccgtttatactttataagtatgggccatcattacgtacaagatcttcgtacacagaggagtag

SEQ ID NO: 416 - DNA, 1647 bp, Artificial Sequence
  Description of Artificial Sequence: Synthetic polynucleotide
atggtatacacttccacgtacagacacactatcgttgttgaccttttagaatatttgggtatagtgtccaacttagaaactttacagagtgcccgtgaagatgaaacaagaaaacccgagaataccgataaaaaagaatgtaaacccgactatgatatagaatgcggtcctaatagatcttgctctgaatcctctaccgattctgactctagtggttctcagatcgaaaaaaatgatcctttcagggtggattggaacggccccagtgatcctgagaacccacaaaactggcccttattgaaaaaatctttggtagtattccaaataatgttacttacttgcgtcacgtacatgggatcctccatttacacacctggccaggaatatattcaagaagagttccacgttggtcatgtagtggcaacattaaatctttctttatatgttcttggttatggtttaggtcccatcattttttctccgttatctgaaactgcacgctatggccgtttgaatctttacatggtgactttattttttttcatgatctttcaagttggttgtgctactgtgcataacatcggcggtttaatcgtcatgcgtttcatcagtggcatattgtgcagcccatctttggccactggtggcggtacagtggctgatatcatttctccagaaatggttcctctcgttttaggtatgtggtctgccggtgctgttgctgcgccagtcttggctcccttattaggcgctgctatggtcgatgctaaaaattggagattcatattttggttattaatgtggttaagtgctgccacttttatcttgttggcatttttcttccctgaaacacaacaccataatattttgtaccgccgtgctttgaaattgagaaaagaaactggtgatgacaggtactatactgaacaggataaactcgatagagaagttgatgcaagaacttttttgatcaatactttgtataggcctctcaaaatgattatcaaagagcctgcaattttggcttttgatctctatatcgctgttgcttatggttgtttctacttattctttgaagcattccctattgtatttgtaggtatataccacttcagcttagttgaagttggcttggcctatatggggttttgcgtagggtgcgtacttgcttatggcttattcggtattttaaacatgaggattattgtaccacgttttagaaacggcacattcaccccggaagcttttttaatcgtggcaatgtgtgtctgctggtgccttcctttatctttgttcttatttggttggactgctagagtgcattggattttgccagttatcagtgaagttttttttgttttagctgtctttaacattttccaagcaacttttgcatatttggctacatgctacccaaagtatgttgcatccgtttttgcaggcaatggtttttgtagagcttcttttgcctgtgcttttccgttgtttggtagagcaatgtatgacaatttagctactaagaactatcctgtggcatggggttcttccttagtggggttcttgactttaggtttagctattatcccgtttatactttataagtatgggccatctttacgtacaagatcttcctacacagaggagtga

SEQ ID NO: 417 - DNA, 312 bp, Saccharomyces cerevisiae
atgtccggtagaggtaaaggtggtaaaggtctaggtaaaggtggtgccaagcgtcacagaaagattctaagagataacatccaaggtattactaagccagctatcagaagattagctagaagaggtggtgtcaagcgtatttctggtttgatctacgaagaagtcagagctgtcttgaaatccttcttggaatccgtcatcagagactctgttacctacaccgaacacgccaagagaaagactgttacttctttggatgttgtttatgctttgaagagacaaggtagaaccttatacggtttcggtggttaa

SEQ ID NO: 418 - DNA, 312 bp, Artificial Sequence
  Description of Artificial Sequence: Synthetic polynucleotide
atgtccggtagaggtaaaggtggtaaaggtttaggtaaaggtggtgccaagcgtcacagaaagattttaagagataacatccaaggtattactaagccagctatcagaagattagctagaagaggtggtgtcaagcgtatttctggtttgatctacgaagaagtcagagctgtcttgaaatccttcttggaatccgtcatcagagactctgttacctacaccgaacacgccaagagaaagactgttacttctttggatgttgtttatgctttgaagagacaaggtagaaccttatacggtttcggtggttga

SEQ ID NO: 419 - DNA, 411 bp, Saccharomyces cerevisiae
atggccagaacaaagcaaacagcaagaaagtccactggtggtaaggccccaagaaagcaattagcttctaaggctgccagaaaatccgccccatctaccggtggtgttaagaagcctcacagatataagccaggtactgttgctttgagagaaatcagaagattccaaaaatctactgaactgttgatcagaaagttgcctttccaaagattggtcagagaaatcgctcaagatttcaagaccgacttgagatttcaatcttctgccatcggtgccttgcaagaatctgtcgaagcctacttagtctctttatttgaagataccaacttggctgccattcacgccaagcgtgtcactatccaaaagaaggatatcaagttggctagaagattaagaggtgaaagatcatag

SEQ ID NO: 420 - DNA, 411 bp, Artificial Sequence
  Description of Artificial Sequence: Synthetic polynucleotide
atggccagaacaaagcaaacagcaagaaagtccactggtggtaaggccccaagaaagcaattagcttctaaggctgccagaaaatccgccccatctaccggtggtgttaagaagcctcacagatataagccaggtactgttgctttgagagaaatcagaagattccaaaaatctactgaattattgatcagaaagttgcctttccaaagattggtcagagaaatcgctcaagatttcaagaccgacttgagatttcaatcttctgccatcggtgccttgcaagaatctgtcgaagcctacttagtctctttatttgaagataccaacttggctgccattcacgccaagcgtgtcactatccaaaagaaggatatcaagttggctagaagattaagaggtgaaagatcctga

SEQ ID NO: 421 - DNA, 864 bp, Saccharomyces cerevisiae
atgacctacactaccagacaaattggtgccaagaacaccttggaatacaaagtttatatcgaaaaggatggtaagccagtttctgccttccacgacattcccttgtacgctgacaaggaaaacaacattttcaacatggttgttgaaattccacgttggaccaacgccaagttagaaatcaccaaggaagaaactttgaacccaatcatccaagacaccaagaagggcaagttgagatttgttagaaactgtttccctcaccatggttacattcacaactatggtgctttcccacaaacttgggaagacccaaacgtaagccacccagaaactaaggcagttggtgacaacgatccaattgatgtgttggaaattggtgaaactattgcttacactggtcaagtcaagcaagttaaggctctaggtatcatggctttattggatgaaggtgagaccgattggaaagttattgccattgatattaacgatccattagccccaaaattgaacgacattgaggatgttgagaaatacttcccaggtctgttgagggctactaacgaatggttcagaatttacaaaatcccagatggtaagccagaaaaccaatttgccttctccggtgaagctaagaacaagaagtacgctttggatatcatcaaggaaacacatgactcctggaaacaattaattgctggtaagtcttctgacagcaagggtattgatttgaccaatgttactttgcctgacaccccaacctactccaaggctgcctctgatgccatcccaccagcttctccaaaggcagatgctccaattgacaagtctattgacaagtggttcttcatctccggttctgtttaa

SEQ ID NO: 422 - DNA, 864 bp, Artificial Sequence
  Description of Artificial Sequence: Synthetic polynucleotide
atgacctacactaccagacaaattggtgccaagaacaccttggaatacaaagtttatatcgaaaaggatggtaagccagtttctgccttccacgacattcccttgtacgctgacaaggaaaacaacattttcaacatggttgttgaaattccacgttggaccaacgccaagttagaaatcaccaaggaagaaactttgaacccaatcatccaagacaccaagaagggcaagttgagatttgttagaaactgtttccctcaccatggttacattcacaactatggtgctttcccacaaacttgggaagacccaaacgtaagccacccagaaactaaggcagttggtgacaacgatccaattgatgtgttggaaattggtgaaactattgcttacactggtcaagtcaagcaagttaaggctttgggtatcatggctttattggatgaaggtgagaccgattggaaagttattgccattgatattaacgatccattagccccaaaattgaacgacattgaggatgttgagaaatacttcccaggtttattgagggctactaacgaatggttcagaatttacaaaatcccagatggtaagccagaaaaccaatttgccttctccggtgaagctaagaacaagaagtacgctttggatatcatcaaggaaacacatgactcctggaaacaattaattgctggtaagtcttctgacagcaagggtattgatttgaccaatgttactttgcctgacaccccaacctactccaaggctgcctctgatgccatcccaccagcttctccaaaggcagatgctccaattgacaagtctattgacaagtggttcttcatctccggttctgtttga

SEQ ID NO: 423 - DNA, 390 bp, Saccharomyces cerevisiae
atgatatatcccttattcaggatatgtatcctaggtgcatttctgttgggtagctatgcatgtcttgaaaatagtacgcaaaagggtattgaaggggtaactctctctcataatagtgtacaaattaataatactttggcaaaatctgcgccattttgtgagtcagacgctctttcaatgaattattcaactgaaaatatgttaagtaataatgcatgcgattatacgaaaaattcttcgtatccatatattattaccattattactaaggcctttgataatgcccttgaaaattcacttaatttacaagcaaacaggaagctttatcacagagtggggacgtgtatacagaatattttttatcaactgttgttaactgtgaattactga

SEQ ID NO: 424 - DNA, 390 bp, Artificial Sequence
  Description of Artificial Sequence: Synthetic polynucleotide
atgatatatcccttattcaggatatgtatcttgggtgcatttttattgggtagctatgcatgtcttgaaaatagtacgcaaaagggtattgaaggggtaactctctctcataatagtgtacaaattaataatactttggcaaaatctgcgccattttgtgagagtgacgctctttctatgaattattctactgaaaatatgttaagtaataatgcatgcgattatacgaaaaattcttcttatccatatattattaccattattactaaggcctttgataatgcccttgaaaattctcttaatttacaagcaaacaggaagctttatcacagagtggggacgtgtatacagaatattttttatcaattattgttaactgtgaattactga

SEQ ID NO: 425 - DNA, 612 bp, Saccharomyces cerevisiae
atggctattgttataaacaaaagaaacgtgagagtcttggtaataactaatttactgctcattgttgtgttttttgtgttaaggaattcgaatgctagcgtcaacgaaagtattactactcaccatcctgattcattggtgacgtttgacaattcaggaaatgcacctggcactcaccaatctgtccatgatacagtaaatacacaagataaggaagccgaagaagttgataaaaatagtggggacgctgaatttgatgccgctgcagaatacaacaaaataatggaacagtcacccatgattgtatttagcaagactggctgcccatatagcaaaaaactgaaagctttgttgactaattcgtacacgttttctccatcttactacgttgtagaattggataggcacgaacacacaaaagaactacaagaccagattgaaaaagtcactggtaggagaacagtcccaaacgttatcatcggtggtacttccagaggtggttatactgagatagcagagttacataaaaatgatgaacttctagactctttcaaaaaatggagcgatggggcgtttactgtaaaagctaattcgcaatctgagagtgcctag

SEQ ID NO: 426 - DNA, 612 bp, Artificial Sequence
  Description of Artificial Sequence: Synthetic polynucleotide
atggctattgttataaacaaaagaaacgtgagagtcttggtaataactaatttacttctcattgttgtgttttttgtgttaaggaatagtaatgctagcgtcaacgaaagtattactactcaccatcctgattctttggtgacgtttgacaattctggaaatgcacctggcactcaccaatctgtccatgatacagtaaatacacaagataaggaagccgaagaagttgataaaaatagtggggacgctgaatttgatgccgctgcagaatacaacaaaataatggaacagtctcccatgattgtatttagcaagactggctgcccatatagcaaaaaattgaaagctttgttgactaattcttacacgttttctccatcttactacgttgtagaattggataggcacgaacacacaaaagaattacaagaccagattgaaaaagtcactggtaggagaacagtcccaaacgttatcatcggtggtacttccagaggtggttatactgagatagcagagttacataaaaatgatgaacttttggactctttcaaaaaatggagcgatggggcgtttactgtaaaagctaattctcaatctgagagtgcctga

SEQ ID NO: 427 - DNA, 1794 bp, Saccharomyces cerevisiae
atgctgcttaccaaaaggttttcaaagctgttcaagctgacgttcatagttttgatattgtgcgggctgttcgtcattacaaacaaatacatggatgagaacacgtcggtcaaggagtacaaggagtacttagacagatatgtccagagttactccaataagtattcatcttcctcagacgccgccagcgctgacgattcaaccccattgagggacaatgatgaggcaggcaatgaaaagttgaaaagcttctacaacaacgttttcaactttctaatggttgattcgcccaaggggagtactgcaaagcagtataacgaggcatgcttattaaagggtgacattggagaccgtcccgaccactacaaagatctttacaagttgtctgctaaggagctgtccaagtgtttggaactatctccggatgaagtagcaagtctgaccaaaagccataaggactacgtagagcatatagcgactctcgtctcgccaaagggtacgtacaaagggtccggtatagccacagtgggtggcgggaagttctcccttatggcatttttgatcattaagactttaaggaatatggggaccacgttacctgtggaagtcctgatccctcctggtgatgaaggtgaaactgagttttgtaacaagattctgcctaagtataactccaagtgtatttacgtttcagatattctaccacgagagacgattgaaaaatttgttttcaaaggataccagtttaaatcattggcccttatcgcttctagttttgaaaacctgctcttactggatgctgacaacttccccatcaaacccctagacaacatattcaatgaagaaccatatgtgtctacgggcttggtcatgtggcccgatttctggaggcgtacaactcacccattgtattacgacattgcaggtattgctgtggacaagaaaaagagagttcgcaattctcgagacgatatcaccccacctgctgtttacacaaaggatttgaaggatttgagtgacgtcccgctaagtgacctagacggaacaatacccgacgtgtctacggaatccggccaactgatgataaacaaaacgaagcatttggctacggctcttctatctttattctacaacgtcaatggaccaacgtggtactacccaatattttctcaaaaagctgctggtgaaggtgataaggaaactttcattgccgctgcaaacttttatggtctatcattttaccaagttagaacaaggacaggcgttgaaggctaccatgatgaagacgggtttcatggtgtagcaatgttacaacacgactttgtgcaggattatggccgttacttaaatgctatggagagcattggcaacaaatacggtggcactaaatcagctgatgcaatcaagtttgacaaaaactattccctcgaaaaatacaccgaagaatttttcgacaacgaggacttaaatgccaagaatcatgtagatgttatgttcatccattcaaacttcccaaagtttgacccatacgatttatctaaaagcaattttttgactacgaatggtaaacctgctcgttcatatacggccttaaaaaaggtaaaaaattacgatattgaactagagaatttcaaggttttaaacgaatatgtttgtgttaataagaatcctttcaaatatctcgatgaccttttagggcaggataaaacggaatggaaaagagtgtgtggttacatcaccgatagattagcatttttagaatctactcatgataaggcgattgccggtaaataa

SEQ ID NO: 428 - DNA, 1794 bp, Artificial Sequence
  Description of Artificial Sequence: Synthetic polynucleotide
atgttacttaccaaaaggttttccaagcttttcaagttgacgttcatagttttgatattgtgcgggcttttcgtcattacaaacaaatacatggatgagaacacgagtgtcaaggagtacaaggagtacttagacagatatgtccagagttactccaataagtattcttcttccagtgacgccgccagcgctgacgattctaccccattgagggacaatgatgaggcaggcaatgaaaagttgaaaagcttctacaacaacgttttcaactttttgatggttgattctcccaaggggagtactgcaaagcagtataacgaggcatgcttattaaagggtgacattggagaccgtcccgaccactacaaagatctttacaagttgtctgctaaggagctttccaagtgtttggaattatctccggatgaagtagcaagtttaaccaaaagccataaggactacgtagagcatatagcgactctcgtctctccaaagggtacgtacaaagggtccggtatagccacagtgggtggcgggaagttctcccttatggcatttttgatcattaagactttaaggaatatggggaccacgttacctgtggaagtcttgatccctcctggtgatgaaggtgaaactgagttttgtaacaagattttacctaagtataactccaagtgtatttacgtttctgatattttaccaagagagacgattgaaaaatttgttttcaaaggataccagtttaaatctttggcccttatcgcttctagttttgaaaacttactcttattagatgctgacaacttccccatcaaacccttagacaacatattcaatgaagaaccatatgtgtctacgggcttggtcatgtggcccgatttctggaggcgtacaactcacccattgtattacgacattgcaggtattgctgtggacaagaaaaagagagttcgcaattctagagacgatatcaccccacctgctgtttacacaaaggatttgaaggatttgagtgacgtcccgttaagtgacttggacggaacaatacccgacgtgtctacggaatccggccaattgatgataaacaaaacgaagcatttggctacggctcttttatctttattctacaacgtcaatggaccaacgtggtactacccaatattttctcaaaaagctgctggtgaaggtgataaggaaactttcattgccgctgcaaacttttatggtttatctttttaccaagttagaacaaggacaggcgttgaaggctaccatgatgaagacgggtttcatggtgtagcaatgttacaacacgactttgtgcaggattatggccgttacttaaatgctatggagagcattggcaacaaatacggtggcactaaatctgctgatgcaatcaagtttgacaaaaactattccctcgaaaaatacaccgaagaatttttcgacaacgaggacttaaatgccaagaatcatgtagatgttatgttcatccattccaacttcccaaagtttgacccatacgatttatctaaaagcaattttttgactacgaatggtaaacctgctcgttcttatacggccttaaaaaaggtaaaaaattacgatattgaattagagaatttcaaggttttaaacgaatatgtttgtgttaataagaatcctttcaaatatctcgatgaccttttagggcaggataaaacggaatggaaaagagtgtgtggttacatcaccgatagattagcatttttagaatctactcatgataaggcgattgccggtaaatga

SEQ ID NO: 429 - DNA, 387 bp, Saccharomyces cerevisiae
atgtctgctaacgattactacggcggaaccgccggcgagaagagccaatattcccgtccctccaacccgccaccttcatccgctcatcagaacaaaactcaggagcgtggatacccaccccaacaacagcagcagtactaccagcagcagcagcagcatcccggatactataaccaacaaggatacaatcagcaagggtacaatcagcaagggtacaatcagcagggctacaatcagcagggatataaccagcagggatataaccaacaaggccatcaacaaccagtctacgtccaacaacaaccaccccagaggggtaacgaaggttgtctggctgcatgtctggctgcattatgtatatgctgcaccatggatatgctattctaa

SEQ ID NO: 430 - DNA, 387 bp, Artificial Sequence
  Description of Artificial Sequence: Synthetic polynucleotide
atgtctgctaacgattactacggcggaaccgccggcgagaagagccaatattcccgtccctccaacccgccaccttcttccgctcatcagaacaaaactcaggagcgtggatacccaccccaacaacagcagcagtactaccagcagcagcagcagcatcccggatactataaccaacaaggatacaatcagcaagggtacaatcagcaagggtacaatcagcagggctacaatcagcagggatataaccagcagggatataaccaacaaggccatcaacaaccagtctacgtccaacaacaaccaccccagaggggtaacgaaggttgtttggctgcatgtttggctgcattatgtatatgctgcaccatggatatgcttttctga

SEQ ID NO: 431 - DNA, 2757 bp, Saccharomyces cerevisiae
atggcatcgacatggaagcccgccgaagactatgtgttgcaactagcaactcttttacagaactgtatgtcaccaaatccagagattcgtaataacgcaatggaagctatggagaacttccagctgcaacctgaatttctcaattatttgtgttatattttaattgaaggcgaatctgatgatgtattgaagcaacactactccctacaggatcttcagaacaatagagctaccgccggtatgctgttgaaaaattcaatgctagggggaaacaatttaattaagagcaatagccacgacttaggatacgtcaaatcaaacattatacatggcctttataattcgaacaataatctcgtttcgaacgtgacaggtatcgttattactactttattttccacttactataggcagcatagagatgatccaactggtcttcaaatgctttaccagttgctagagctaacctcaaatggaaatgagccaagtattaaggctttatctaagatcatggaagacagcgctcaatttttccaattggaatggtcgggaaatacgaagcctatggaagccttattggatagtttttttaggtttatttcgaatccaaatttctcacctgtgattcgctcagaatcggtgaaatgtataaatacagtgatcccgctacaaacacaaagttttattgtgagattagataaattcttagaaattatttttcagttggcacaaaacgacgaaaacgacctagttagggcacagatttgcattagttttagtttcttattggaattcagaccagataagctggtttcccatttagatggtattgtacaattcatgttgcatttgatcaccactgtaaatgaggaaaaagtggctattgaagcctgcgagtttttgcacgcctttgcaacgagcccaaatattcctgaacatatcttacaaccatatgttaaggatatcgtgccaatattattatcgaaaatggtctataacgaagaatccatcgttctcctggaagcttctaatgatgatgatgcattcttggaggataaagatgaggacatcaagcccattgcaccccgtattgtgaaaaagaaagaggcaggaaatggagaggatgcagatgacaacgaagatgatgatgatgatgatgatgatgaagatggcgatgttgatacgcaatggaatttgagaaaatgttccgcggcaacgctagatgtaatgacgaatattttacctcatcaagtgatggatatagcgttcccatttttaagagaacatttgggttctgataggtggtttattagagaagctactatattagcactgggggccatggcagaaggtggaatgaagtattttaatgatggcttaccagcactaataccatttttagtggaacaattgaacgataagtgggcaccagtgaggaaaatgacatgttggacattaagtaggttttcaccatggatattacaagaccatactgagtttttaattccagtcttagaacctataataaacacattaatggacaagaaaaaggatgttcaagaggcggctattagtagtgtagcagtatttattgaaaacgccgactccgaattggttgaaactttattttatagtcaattattgacgagttttgataaatgtttgaaatattacaagaaaaagaatttaattatattatatgatgccatcggcaggtttgctgaaaaatgtgcattagacgagacagcgatgcaaataattttgccgcccttaattgaaaaatgggctttgctgtcagacagtgacaaggagctgtggccacttttagaatgtctttcctgcgtggcatcatcactgggggaaagattcatgcctatggcaccagaagtgtacaacagagcctttagaattctatgtcattgtgtcgaattggaagccaaatcacatcaagacccgacaatagtagtgcctgagaaggacttcatcatcacctcattagatttgattgatggattggtacaaggtcttggcgctcactcgcaggatctattgttccctcaagggacgaaggatttaacgatattgaaaatcatgctagaatgtttgcaggaccctgtccatgaagtaagacaaagctgctttgccctgttgggagatattgtatattttttcaattcggaactggtaattggtaatttggaggatttcttgaagttgattggtacggaaataatgcataacgacgatagtgatggtactcctgctgtgataaatgcgatatgggcgcttggtttgataagcgaacgtatcgatttgaatacttatatcattgatatgtctagaatcattctagatttatttaccaccaacacacaaatcgtagacagctctgtgatggagaacttgtctgtgaccatcggaaaaatggggctaacacaccctgaagttttcagttctggcgcatttgccaatgattccaactggaataaatggtgtttgtccgttaacgcattggacgatgtagaggaaaagagtagcgcgtacatgggtttcctgaaaattatcaatttgaccagcacggaggtcacaatgagtaatgataccattcataaaattgttacgggcctttcaagcaatgtagaggcgaatgtttttgcgcaagagatctacacctttttgatgaaccattctgcccaaatttctgcaataaatttcacgcccgatgaaatctccttcttacaacagttcaccagctaa

SEQ ID NO: 432 - DNA, 2757 bp, Artificial Sequence
  Description of Artificial Sequence: Synthetic polynucleotide
atggcaagcacatggaagcccgccgaagactatgtgttgcaattggcaactcttttacagaactgtatgtctccaaatccagagattcgtaataacgcaatggaagctatggagaacttccagttacaacctgaatttctcaattatttgtgttatattttaattgaaggcgaatctgatgatgtattgaagcaacactactccttacaggatcttcagaacaatagagctaccgccggtatgcttttgaaaaattctatgttggggggaaacaatttaattaagagcaatagccacgacttaggatacgtcaaaagtaacattatacatggcctttataatagcaacaataatctcgtttctaacgtgacaggtatcgttattactactttattttccacttactataggcagcatagagatgatccaactggtcttcaaatgctttaccagttgttggagttgacctctaatggaaatgagccaagtattaaggctttatctaagatcatggaagacagcgctcaatttttccaattggaatggtctggaaatacgaagcctatggaagccttattggatagtttttttaggtttatttctaatccaaatttcagtcctgtgattcgcagtgaatctgtgaaatgtataaatacagtgatcccgttacaaacacaaagttttattgtgagattagataaattcttagaaattatttttcagttggcacaaaacgacgaaaacgacttggttagggcacagatttgcattagttttagtttcttattggaattcagaccagataagttggtttcccatttagatggtattgtacaattcatgttgcatttgatcaccactgtaaatgaggaaaaagtggctattgaagcctgcgagtttttgcacgcctttgcaacgagcccaaatattcctgaacatatcttacaaccatatgttaaggatatcgtgccaatattattatccaaaatggtctataacgaagaatccatcgttctcttggaagcttctaatgatgatgatgcattcttggaggataaagatgaggacatcaagcccattgcaccccgtattgtgaaaaagaaagaggcaggaaatggagaggatgcagatgacaacgaagatgatgatgatgatgatgatgatgaagatggcgatgttgatacgcaatggaatttgagaaaatgttccgcggcaacgttagatgtaatgacgaatattttacctcatcaagtgatggatatagcgttcccatttttaagagaacatttgggttctgataggtggtttattagagaagctactatattagcattgggggccatggcagaaggtggaatgaagtattttaatgatggcttaccagcattaataccatttttagtggaacaattgaacgataagtgggcaccagtgaggaaaatgacatgttggacattaagtaggttttctccatggatattacaagaccatactgagtttttaattccagtcttagaacctataataaacacattaatggacaagaaaaaggatgttcaagaggcggctattagtagtgtagcagtatttattgaaaacgccgactccgaattggttgaaactttattttatagtcaattattgacgagttttgataaatgtttgaaatattacaagaaaaagaatttaattatattatatgatgccatcggcaggtttgctgaaaaatgtgcattagacgagacagcgatgcaaataattttgccgcccttaattgaaaaatgggctttgttaagtgacagtgacaaggagttatggccacttttagaatgtctttcctgcgtggcatcttctttaggggaaagattcatgcctatggcaccagaagtgtacaacagagcctttagaattctttgtcattgtgtcgaattggaagccaaatctcatcaagacccgacaatagtagtgcctgagaaggacttcatcatcaccagtttagatttgattgatggattggtacaaggtcttggcgctcactctcaggatttattgttccctcaagggacgaaggatttaacgatattgaaaatcatgttggaatgtttgcaggaccctgtccatgaagtaagacaaagctgctttgccttattgggagatattgtatattttttcaattctgaattggtaattggtaatttggaggatttcttgaagttgattggtacggaaataatgcataacgacgatagtgatggtactcctgctgtgataaatgcgatatgggcgcttggtttgataagcgaacgtatcgatttgaatacttatatcattgatatgtctagaatcattttagatttatttaccaccaacacacaaatcgtagacagctctgtgatggagaacttgtctgtgaccatcggaaaaatggggttgacacaccctgaagttttcagttctggcgcatttgccaatgattccaactggaataaatggtgtttgtccgttaacgcattggacgatgtagaggaaaagagtagcgcgtacatgggtttcttgaaaattatcaatttgaccagcacggaggtcacaatgagtaatgataccattcataaaattgttacgggcctttctagcaatgtagaggcgaatgtttttgcgcaagagatctacacctttttgatgaaccattctgcccaaatttctgcaataaatttcacgcccgatgaaatctccttcttacaacagttcaccagctga

SEQ ID NO: 433 - DNA, 1101 bp, Saccharomyces cerevisiae
atgactgctgaagaatttgatttttctagccattcccatagacgttacaatccactaaccgattcatggatcttagtttctccacacagagctaaaagaccttggttaggtcaacaggaggctgcttacaagcccacagctccattgtatgatccaaaatgctatctatgtcctggtaacaaaagagctactggtaacctaaacccaagatatgaatcaacgtatattttccccaatgattatgctgccgttaggctcgatcaacctattttaccacagaatgattccaatgaggataatcttaaaaataggctgcttaaagtgcaatctgtgagaggcaattgtttcgtcatatgttttagccccaatcataatctaaccattccacaaatgaaacaatcagatctggttcatattgttaattcttggcaagcattgactgacgatctctccagagaagcaagagaaaatcataagcctttcaaatatgtccaaatatttgaaaacaaaggtacagccatgggttgttccaacttacatccacatggccaagcttggtgcttagaatccatccctagtgaagtttcgcaagaattgaaatcttttgataaatataaacgtgaacacaatactgatttgtttgccgattacgtcaaattagaatcaagagagaagtcaagagtcgtagtggagaatgaatcctttattgttgttgttccatactgggccatctggccatttgagaccttggtcatttcaaagaagaagcttgcctcaattagccaatttaaccaaatggtgaaggaggacctcgcctcgattttaaagcaactaactattaagtatgataatttatttgaaacgagtttcccatactcaatgggtatccatcaggctcctttgaatgcgactggtgatgaattgagtaatagttggtttcacatgcatttctacccacctttactgagatcagctactgttcggaaattcttggttggttttgaattgttaggtgagcctcaaagagatttaacttcggaacaagctgctgaaaaactaagaaatttagatggtcagattcattatctacaaagactgtaa

SEQ ID NO: 434 - DNA, 1101 bp, Artificial Sequence
  Description of Artificial Sequence: Synthetic polynucleotide
atgactgctgaagaatttgatttttctagccattcccatagacgttacaatccattgaccgattcttggatcttagtttctccacacagagctaaaagaccttggttaggtcaacaggaggctgcttacaagcccacagctccattgtatgatccaaaatgctatttatgtcctggtaacaaaagagctactggtaacttgaacccaagatatgaaagtacgtatattttccccaatgattatgctgccgttaggctcgatcaacctattttaccacagaatgattccaatgaggataatcttaaaaataggttacttaaagtgcaatctgtgagaggcaattgtttcgtcatatgttttagccccaatcataatttgaccattccacaaatgaaacaatctgatttggttcatattgttaattcttggcaagcattgactgacgatctctccagagaagcaagagaaaatcataagcctttcaaatatgtccaaatatttgaaaacaaaggtacagccatgggttgttccaacttacatccacatggccaagcttggtgcttagaatccatccctagtgaagtttctcaagaattgaaatcttttgataaatataaacgtgaacacaatactgatttgtttgccgattacgtcaaattagaatctagagagaagtctagagtcgtagtggagaatgaatcctttattgttgttgttccatactgggccatctggccatttgagaccttggtcatttccaagaagaagcttgcctctattagccaatttaaccaaatggtgaaggaggacctcgcctctattttaaagcaattgactattaagtatgataatttatttgaaacgagtttcccatactccatgggtatccatcaggctcctttgaatgcgactggtgatgaattgagtaatagttggtttcacatgcatttctacccacctttattaagatctgctactgttagaaaattcttggttggttttgaattgttaggtgagcctcaaagagatttaacttctgaacaagctgctgaaaaattgagaaatttagatggtcagattcattatttacaaagattatga

SEQ ID NO: 435 - DNA, 2100 bp, Saccharomyces cerevisiae
atgacagctcagttacaaagtgaaagtacttctaaaattgttttggttacaggtggtgctggatacattggttcacacactgtggtagagctaattgagaatggatatgactgtgttgttgctgataacctgtcgaattcaacttatgattctgtagccaggttagaggtcttgaccaagcatcacattcccttctatgaggttgatttgtgtgaccgaaaaggtctggaaaaggttttcaaagaatataaaattgattcggtaattcactttgctggtttaaaggctgtaggtgaatctacacaaatcccgctgagatactatcacaataacattttgggaactgtcgttttattagagttaatgcaacaatacaacgtttccaaatttgttttttcatcttctgctactgtctatggtgatgctacgagattcccaaatatgattcctatcccagaagaatgtcccttagggcctactaatccgtatggtcatacgaaatacgccattgagaatatcttgaatgatctttacaatagcgacaaaaaaagttggaagtttgctatcttgcgttattttaacccaattggcgcacatccctctggattaatcggagaagatccgctaggtataccaaacaatttgttgccatatatggctcaagtagctgttggtaggcgcgagaagctttacatcttcggagacgattatgattccagagatggtaccccgatcagggattatatccacgtagttgatctagcaaaaggtcatattgcagccctgcaatacctagaggcctacaatgaaaatgaaggtttgtgtcgtgagtggaacttgggttccggtaaaggttctacagtttttgaagtttatcatgcattctgcaaagcttctggtattgatcttccatacaaagttacgggcagaagagcaggtgatgttttgaacttgacggctaaaccagatagggccaaacgcgaactgaaatggcagaccgagttgcaggttgaagactcctgcaaggatttatggaaatggactactgagaatccttttggttaccagttaaggggtgtcgaggccagattttccgctgaagatatgcgttatgacgcaagatttgtgactattggtgccggcaccagatttcaagccacgtttgccaatttgggcgccagcattgttgacctgaaagtgaacggacaatcagttgttcttggctatgaaaatgaggaagggtatttgaatcctgatagtgcttatataggcgccacgatcggcaggtatgctaatcgtatttcgaagggtaagtttagtttatgcaacaaagactatcagttaaccgttaataacggcgttaatgcgaatcatagtagtatcggttctttccacagaaaaagatttttgggacccatcattcaaaatccttcaaaggatgtttttaccgccgagtacatgctgatagataatgagaaggacaccgaatttccaggtgatctattggtaaccatacagtatactgtgaacgttgcccaaaaaagtttggaaatggtatataaaggtaaattgactgctggtgaagcgacgccaataaatttaacaaatcatagttatttcaatctgaacaagccatatggagacactattgagggtacggagattatggtgcgttcaaaaaaatctgttgatgtcgacaaaaacatgattcctacgggtaatatcgtcgatagagaaattgctacctttaactctacaaagccaacggtcttaggccccaaaaatccccagtttgattgttgttttgtggtggatgaaaatgctaagccaagtcaaatcaatactctaaacaatgaattgacgcttattgtcaaggcttttcatcccgattccaatattacattagaagttttaagtacagagccaacttatcaattttataccggtgatttcttgtctgctggttacgaagcaagacaaggttttgcaattgagcctggtagatacattgatgctatcaatcaagagaactggaaagattgtgtaaccttgaaaaacggtgaaacttacgggtccaagattgtctacagattttcctga

SEQ ID NO: 436 - DNA, 2100 bp, Artificial Sequence
  Description of Artificial Sequence: Synthetic polynucleotide
atgacagctcagttacaaagtgaaagtacttctaaaattgttttggttacaggtggtgctggatacattggttctcacactgtggtagagttgattgagaatggatatgactgtgttgttgctgataacttatccaattctacttatgattctgtagccaggttagaggtcttgaccaagcatcacattcccttctatgaggttgatttgtgtgacagaaaaggtttggaaaaggttttcaaagaatataaaattgattctgtaattcactttgctggtttaaaggctgtaggtgaatctacacaaatcccgttaagatactatcacaataacattttgggaactgtcgttttattagagttaatgcaacaatacaacgtttccaaatttgttttttcttcttctgctactgtctatggtgatgctacgagattcccaaatatgattcctatcccagaagaatgtcccttagggcctactaatccgtatggtcatacgaaatacgccattgagaatatcttgaatgatctttacaatagcgacaaaaaaagttggaagtttgctatcttgcgttattttaacccaattggcgcacatccctctggattaatcggagaagatccgttgggtataccaaacaatttgttgccatatatggctcaagtagctgttggtaggcgcgagaagctttacatcttcggagacgattatgattccagagatggtaccccgatcagggattatatccacgtagttgatttggcaaaaggtcatattgcagccttgcaatacttggaggcctacaatgaaaatgaaggtttgtgtcgtgagtggaacttgggttccggtaaaggttctacagtttttgaagtttatcatgcattctgcaaagcttctggtattgatcttccatacaaagttacgggcagaagagcaggtgatgttttgaacttgacggctaaaccagatagggccaaacgcgaattgaaatggcagaccgagttgcaggttgaagactcctgcaaggatttatggaaatggactactgagaatccttttggttaccagttaaggggtgtcgaggccagattttccgctgaagatatgcgttatgacgcaagatttgtgactattggtgccggcaccagatttcaagccacgtttgccaatttgggcgccagcattgttgacttgaaagtgaacggacaatctgttgttcttggctatgaaaatgaggaagggtatttgaatcctgatagtgcttatataggcgccacgatcggcaggtatgctaatcgtatttccaagggtaagtttagtttatgcaacaaagactatcagttaaccgttaataacggcgttaatgcgaatcatagtagtatcggttctttccacagaaaaagatttttgggacccatcattcaaaatccttctaaggatgtttttaccgccgagtacatgttgatagataatgagaaggacaccgaatttccaggtgatttattggtaaccatacagtatactgtgaacgttgcccaaaaaagtttggaaatggtatataaaggtaaattgactgctggtgaagcgacgccaataaatttaacaaatcatagttatttcaatttgaacaagccatatggagacactattgagggtacggagattatggtgcgttctaaaaaatctgttgatgtcgacaaaaacatgattcctacgggtaatatcgtcgatagagaaattgctacctttaactctacaaagccaacggtcttaggccccaaaaatccccagtttgattgttgttttgtggtggatgaaaatgctaagccaagtcaaatcaatactttgaacaatgaattgacgcttattgtcaaggcttttcatcccgattccaatattacattagaagttttaagtacagagccaacttatcaattttataccggtgatttcttgtctgctggttacgaagcaagacaaggttttgcaattgagcctggtagatacattgatgctatcaatcaagagaactggaaagattgtgtaaccttgaaaaacggtgaaacttacgggtccaagattgtctacagattttcctga

SEQ ID NO: 437 - DNA, 1587 bp, Saccharomyces cerevisiae
atgactaaatctcattcagaagaagtgattgtacctgagttcaattctagcgcaaaggaattaccaagaccattggccgaaaagtgcccgagcataattaagaaatttataagcgcttatgatgctaaaccggattttgttgctagatcgcctggtagagtcaatctaattggtgaacatattgattattgtgacttctcggttttacctttagctattgattttgatatgctttgcgccgtcaaagttttgaacgagaaaaatccatccattaccttaataaatgctgatcccaaatttgctcaaaggaagttcgatttgccgttggacggttcttatgtcacaattgatccttctgtgtcggactggtctaattactttaaatgtggtctccatgttgctcactcttttctaaagaaacttgcaccggaaaggtttgccagtgctcctctggccgggctgcaagtcttctgtgagggtgatgtaccaactggcagtggattgtcttcttcggccgcattcatttgtgccgttgctttagctgttgttaaagcgaatatgggccctggttatcatatgtccaagcaaaatttaatgcgtattacggtcgttgcagaacattatgttggtgttaacaatggcggtatggatcaggctgcctctgtttgcggtgaggaagatcatgctctatacgttgagttcaaaccgcagttgaaggctactccgtttaaatttccgcaattaaaaaaccatgaaattagctttgttattgcgaacacccttgttgtatctaacaagtttgaaaccgccccaaccaactataatttaagagtggtagaagtcactacagctgcaaatgttttagctgccacgtacggtgttgttttactttctggaaaagaaggatcgagcacgaataaaggtaatctaagagatttcatgaacgtttattatgccagatatcacaacatttccacaccctggaacggcgatattgaatccggcatcgaacggttaacaaagatgctagtactagttgaagagtctctcgccaataagaaacagggctttagtgttgacgatgtcgcacaatccttgaattgttctcgcgaagaattcacaagagactacttaacaacatctccagtgagatttcaagtcttaaagctatatcagagggctaagcatgtgtattctgaatctttaagagtcttgaaggctgtgaaattaatgactacagcgagctttactgccgacgaagactttttcaagcaatttggtgccttgatgaacgagtctcaagcttcttgcgataaactttacgaatgttcttgtccagagattgacaaaatttgttccattgctttgtcaaatggatcatatggttcccgtttgaccggagctggctggggtggttgtactgttcacttggttccagggggcccaaatggcaacatagaaaaggtaaaagaagcccttgccaatgagttctacaaggtcaagtaccctaagatcactgatgctgagctagaaaatgctatcatcgtctctaaaccagcattgggcagctgtctatatgaattataa

SEQ ID NO: 438 - DNA, 1587 bp, Artificial Sequence
  Description of Artificial Sequence: Synthetic polynucleotide
atgactaaatctcattctgaagaagtgattgtacctgagttcaattctagcgcaaaggaattaccaagaccattggccgaaaagtgcccgagcataattaagaaatttataagcgcttatgatgctaaaccggattttgttgctagatctcctggtagagtcaatttaattggtgaacatattgattattgtgacttctctgttttacctttagctattgattttgatatgctttgcgccgtcaaagttttgaacgagaaaaatccatccattaccttaataaatgctgatcccaaatttgctcaaaggaagttcgatttgccgttggacggttcttatgtcacaattgatccttctgtgagcgactggtctaattactttaaatgtggtctccatgttgctcactcttttttgaagaaacttgcaccggaaaggtttgccagtgctcctttggccgggttgcaagtcttctgtgagggtgatgtaccaactggcagtggattgtcttcttctgccgcattcatttgtgccgttgctttagctgttgttaaagcgaatatgggccctggttatcatatgtccaagcaaaatttaatgcgtattacggtcgttgcagaacattatgttggtgttaacaatggcggtatggatcaggctgcctctgtttgcggtgaggaagatcatgctttgtacgttgagttcaaaccgcagttgaaggctactccgtttaaatttccgcaattaaaaaaccatgaaattagctttgttattgcgaacacccttgttgtatctaacaagtttgaaaccgccccaaccaactataatttaagagtggtagaagtcactacagctgcaaatgttttagctgccacgtacggtgttgttttactttctggaaaagaaggaagcagcacgaataaaggtaatttaagagatttcatgaacgtttattatgccagatatcacaacatttccacaccctggaacggcgatattgaatccggcatcgaaagattaacaaagatgttggtattggttgaagagtctctcgccaataagaaacagggctttagtgttgacgatgtcgcacaatccttgaattgttctcgcgaagaattcacaagagactacttaacaacatctccagtgagatttcaagtcttaaagctttatcagagggctaagcatgtgtattctgaatctttaagagtcttgaaggctgtgaaattaatgactacagcgagctttactgccgacgaagactttttcaagcaatttggtgccttgatgaacgagtctcaagcttcttgcgataaactttacgaatgttcttgtccagagattgacaaaatttgttccattgctttgagcaatggatcctatggttcccgtttgaccggagctggctggggtggttgtactgttcacttggttccagggggcccaaatggcaacatagaaaaggtaaaagaagcccttgccaatgagttctacaaggtcaagtaccctaagatcactgatgctgagttagaaaatgctatcatcgtctctaaaccagcattgggcagctgtttgtatgaattatga

SEQ ID NO: 439 - DNA, 1902 bp, Saccharomyces cerevisiae
atgccagacaatctatcattacatttaagcggctcttcaaaaagattgaactctcgccaacttatggaatcttccaatgagacctttgcgccaaataatgtggatttggaaaaagagtataagtcatctcagagtaatataactaccgaagtttatgaggcatcgagctttgaagaaaaagtaagctcagaaaaacctcaatacagctcattctggaagaaaatctattatgaatatgtggtcgttgacaaatcaatcttgggtgtttctattctggattcatttatgtacaaccaggacttgaagcccgtcgaaaaagaaaggcgggtttggtcctggtacaattattgttacttctggcttgctgaatgtttcaatatcaacacttggcaaattgcagctacaggtctacaactgggtctaaattggtggcagtgttggataacaatttggattgggtacggtttcgttggtgcttttgttgttttggcctctagagttggatctgcttatcatttgtcattccctatatcatctagagcatcattcggtattttcttctctttatggcccgttattaacagagtcgtcatggccatcgtttggtatagtgtccaagcttatattgcggcaactcccgtatcattaatgctgaaatctatctttggaaaagatttacaagacaaaatcccagatcactttggatcaccgaatgctactacttacgagttcatgtgtttttttatcttttgggctgccagtcttccatttttactggttccacctcacaaaattagacacctgtttactgttaaagccgtcttggttccgtttgcttcttttggtttcttaatttgggctatcagaagagctcacgggcgtattgccttaggatctttaaccgatgtacaacctcatggctctgccttttcgtgggcttttctaagatcactaatgggttgtatggctaatttctccacaatggtaatcaacgctccagatttctctagattttcaaaaaaccctaactccgctttatggtcccaattagtgtgcattccatttttgttttccatcacttgtttaattggaattctagtcaccgcagctggttatgaaatatacggtattaattactggtcgccactcgatgtgctagaaaaatttttacagactacttataataagggcacaagagctggtgttttcttaatctcttttgttttcgccgtagctcagttaggtactaatatttctgcaaactcattatcgtgtggaactgatatgtccgctattttccccaagtttatcaatatcaagcgtggttcattattttgtgcagccatggcgctgtgtatttgtccatggaatttaatggcaacatcaagtaaatttacaatggctttgtccgcatatgctatctttttgtccagtattgccggtgttgtctgctcagattactttgttgttagaagaggatatatcaagctaacacacatatattcccatcaaaagggctctttttatatgtacggaaacaggtttggtatcaattggagagctttggctgcatatctatgtggggtggctccttgcttgcccggtttcatcgcggaggtgggcgctcccgctataaaggtttctgatggagctatgaaactatattacctaagttactgggtaggatatggcttgagtttttcttcttatactgctctgtgttacttcttccctgtacctgggtgccctgttaacaacattataaaggacaagggctggttccaaagatgggccaatgtcgatgattttgaagaagagtggaaagacacaattgagagggatgacctggtagatgacaatattagtgtctacgaacacgaacacgaaaagactttcatttaa

SEQ ID NO: 440 - DNA, 1902 bp, Artificial Sequence
  Description of Artificial Sequence: Synthetic polynucleotide
atgccagacaatttatctttacatttaagcggctcttctaaaagattgaactctcgccaacttatggaatcttccaatgagacctttgcgccaaataatgtggatttggaaaaagagtataagtcttctcagagtaatataactaccgaagtttatgaggcaagtagctttgaagaaaaagtaagctctgaaaaacctcaatacagctctttctggaagaaaatctattatgaatatgtggtcgttgacaaatctatcttgggtgtttctattttagattcttttatgtacaaccaggacttgaagcccgtcgaaaaagaaaggagagtttggtcctggtacaattattgttacttctggcttgctgaatgtttcaatatcaacacttggcaaattgcagctacaggtttacaattgggtttgaattggtggcagtgttggataacaatttggattgggtacggtttcgttggtgcttttgttgttttggcctctagagttggatctgcttatcatttgagtttccctatatcttctagagcatctttcggtattttcttctctttatggcccgttattaacagagtcgtcatggccatcgtttggtatagtgtccaagcttatattgcggcaactcccgtatctttaatgttgaaatctatctttggaaaagatttacaagacaaaatcccagatcactttggatctccgaatgctactacttacgagttcatgtgtttttttatcttttgggctgccagtcttccatttttattggttccacctcacaaaattagacacctttttactgttaaagccgtcttggttccgtttgcttcttttggtttcttaatttgggctatcagaagagctcacgggcgtattgccttaggatctttaaccgatgtacaacctcatggctctgccttttcttgggcttttttaagatccttgatgggttgtatggctaatttctccacaatggtaatcaacgctccagatttctctagattttccaaaaaccctaactccgctttatggtcccaattagtgtgcattccatttttgttttccatcacttgtttaattggaattttagtcaccgcagctggttatgaaatatacggtattaattactggtctccactcgatgtgttggaaaaatttttacagactacttataataagggcacaagagctggtgttttcttaatctcttttgttttcgccgtagctcagttaggtactaatatttctgcaaactctttaagttgtggaactgatatgtccgctattttccccaagtttatcaatatcaagcgtggttctttattttgtgcagccatggcgttatgtatttgtccatggaatttaatggcaacatctagtaaatttacaatggctttgtccgcatatgctatctttttgtccagtattgccggtgttgtctgctctgattactttgttgttagaagaggatatatcaagttaacacacatatattcccatcaaaagggctctttttatatgtacggaaacaggtttggtatcaattggagagctttggctgcatatttatgtggggtggctccttgcttgcccggtttcatcgcggaggtgggcgctcccgctataaaggtttctgatggagctatgaaactttattacttgagttactgggtaggatatggcttgagtttttcttcttatactgctctttgttacttcttccctgtacctgggtgccctgttaacaacattataaaggacaagggctggttccaaagatgggccaatgtcgatgattttgaagaagagtggaaagacacaattgagagggatgacttggtagatgacaatattagtgtctacgaacacgaacacgaaaagactttcatttga

SEQ ID NO: 441 - DNA, 534 bp, Saccharomyces cerevisiae
atgtcgaacatcacttatgtcaaaggtaacatcttaaaaccaaagtcatatgctaggatcctcatccattcttgcaactgcaatggctcgtggggtggtgggatcgcttatcaacttgctttgcgctacccaaaagcagagaaagattacgttgaagtatgcgaaaagtatggttctaatttactaggcaaatgcatattacttcccagttacgaaaactcagatctgctgatttgttgcttgtttacatcatcatttggaggttcaagtcatggagaaaagcaaagtattttgaattatacaaaacttgctttagataaattgaagacctttagagaagcaaaagacaaaactcgaacaagtgaagattcaatcggtgactatttaaacggccacatcaaatacccaataggggaatataaattggaaatgccacagataaatagtggcatattcggagtcccttggaaagagacagaacgcgtgttagaagaatttagtggcgacatgagttttacagtatatcagctgtaa

SEQ ID NO: 442 - DNA, 534 bp, Artificial Sequence
  Description of Artificial Sequence: Synthetic polynucleotide
atgtccaacatcacttatgtcaaaggtaacatcttaaaaccaaagagttatgctaggatcctcatccattcttgcaactgcaatggctcctggggtggtgggatcgcttatcaacttgctttgcgctacccaaaagcagagaaagattacgttgaagtatgcgaaaagtatggttctaatttattaggcaaatgcatattacttcccagttacgaaaacagtgatttattgatttgttgcttgtttacatcttcttttggaggtagtagtcatggagaaaagcaaagtattttgaattatacaaaacttgctttagataaattgaagacctttagagaagcaaaagacaaaactagaacaagtgaagattctatcggtgactatttaaacggccacatcaaatacccaataggggaatataaattggaaatgccacagataaatagtggcatattcggagtcccttggaaagagacagaacgcgtgttagaagaatttagtggcgacatgagttttacagtatatcagttgtga

SEQ ID NO: 443 - DNA, 3498 bp, Saccharomyces cerevisiae
atgaccggcttgaatggagatgatcctgatgactactatctgaaccttaatcaagatgaagagtctctacttaggtcaagacacagtgtcggctcaggagcacctcatagacaaggctctttagtgcggcccgaaagaagccgactgaacaatcctgataatccacatttttattatgcgcagaaaacgcaggagcagatgaatcacctggatgttttaccatcaagtaccggtgtaaacccaaatgcaactcgtcggagtggctccctgcgctccaaaggctcagtgagaagcaaatttagtggccgcgaaacggatagctatcttttacaagatatgaatactactgacaagaaggcttccgttaaaataagtgatgaaggtgttgcggaagacgaatttgataaagatggtgatgtggacaatttcgaagaaagctccacgcagcccataaataagtctatcaaaccattaagaaaggaaacgaatgatacattgtcattttggcagatgtactgttatttcattacgttttgggcacctgctccaattcttgctttctgcgggatgccaaagaaggaaagacaaatggcgtggagagaaaaggttgctttaatttctgtcatcttgtacattggtgcgattgtggctttcctgacttttggtttcactaaaaccgtttgtagtagttcgaaactacgtttgaaaaacaacgaagtatcaacagaatttgtcgtaattaacggtaaggcttatgaattggatacttcctcgcgttccggtatacaagacgttgaagtagattcagacaccctttatgggccctggtcagatgctggtaaagatgcttcgttcttgtttcaaaatgtgaatggtaactgtcataaccttataactccaaagagtaattcttccattccccatgacgatgataataatttagcatggtattttccttgtaagttaaagaatcaagatggctcttcgaagccaaacttcacagttgaaaattacgcaggatggaactgtcatacgtctaaagaagatagggacgcattttacggtttaaagtcgaaagctgatgtttacttcacttgggatggtataaagaactcttctagaaacttgattgtttataatggcgacgttttggatttagatcttcttgattggttggaaaaggatgacgttgactatcccgttgtattcgatgacttgaagacttcaaatttacaaggttatgatctttcgttggttttgtcaaatgggcatgaaagaaaaattgcgagatgtttgagcgaaattattaaagttggtgaagtagactccaaaaccgtcggttgtattgcctctgatgtcgttttgtatgtttctctggtatttattctttcagtggtgataattaaattcataattgcctgctacttccgttggactgtagctaggaaacaaggtgcatatatcgtggacaataaaacaatggataaacacacaaacgatatcgaggattggtctaataatattcaaacaaaagctcctctaaaggaagtagatcctcatttgaggccaaagaaatactcaaaaaagtcgttgggacacaagcgtgcttcaacctttgacttgctgaaaaaacacagctccaaaatgtttcaatttaacgaatctgtgatagatctagacacctccatgagcagttcactacaatcttctggttcatacagaggaatgacaacaatgaccactcaaaatgcttggaaactctcgaatgaaaacaaagctgtacattcccgtaatccatctactttgttgcctacatcctcgatgttttggaataaagcgacttcctctcctgtaccaggatcatcgctgattcagagtcttgattcgacgattatacatcccgatatcgttcaacaaccaccactggattttatgccatacgggttcccattgattcatactatctgttttgttacttgttattctgaggatgaagagggtttaagaaccactttagactctctttctaccacagattatccaaattcccataaactactgatggttgtttgtgatggtttaattaagggctcgggcaacgataagactactccagagatagcgttaggaatgatggacgactttgtcaccccacctgatgaagttaaaccttactcctatgtggcagtggcatcaggctctaaaagacacaatatggccaagatatatgcgggtttttacaaatatgacgattctacaattccaccagaaaatcaacaacgtgtcccaatcattacaattgtgaagtgcggtactcctgcagagcagggggccgccaaacccggtaacagaggtaagcgtgattctcaaattattctgatgtcctttttagaaaaaataacatttgatgaaagaatgactcaattggaatttcagcttttaaaaaatatttggcagattacggggctaatggcagacttctacgaaacggtacttatggttgatgctgatactaaagtctttcccgatgctttaactcatatggtcgctgaaatggttaaagatcctttgattatgggtctttgtggtgagaccaagatcgctaataaggcacaatcttgggtaactgcaattcaagtgtttgagtactatatttcgcatcatcaggctaaagcttttgaatctgtcttcggttcggtaacttgtttgccgggatgtttctcaatgtatcgtataaaatctcctaaaggttcagatggttattgggtacctgtattggcaaatccagatattgttgaaagatattcggataatgttacaaacactttgcataagaagaacttattattacttggtgaagatagatttttatcttcattaatgttaaagactttccctaagagaaagcaagtatttgttccaaaagctgcttgtaaaactattgcccctgataaattcaaagtcttactttcccagcgtcgaagatggattaattctacggtacataacctttttgaattagttctaatcagagacttatgtggcactttctgtttttccatgcaatttgtgattggtattgaattgattggtactatggtactgccgttagccatttgctttactatttatgtcattatttttgccattgtatcaaaacctacacccgtaatcactttagttttactggcaattattcttggtctgcccggcttaattgttgttataactgctacgagatggtcgtacctatggtggatgtgcgtatatatttgtgctttgcctatttggaatttcgtactaccttcatatgcgtactggaaatttgatgacttctcatggggtgatacgagaactattgcgggaggtaataaaaaggcacaagacgagaatgaaggtgaatttgatcactcaaagattaaaatgaggacatggagggaatttgaaagggaagatattctcaatcggaaggaggaaagtgactccttcgttgcatag

SEQ ID NO: 444 - DNA, 3498 bp, Artificial Sequence
  Description of Artificial Sequence: Synthetic polynucleotide
atgaccggcttgaatggagatgatcctgatgactactatttgaaccttaatcaagatgaagagtctttacttaggagcagacacagtgtcggcagtggagcacctcatagacaaggctctttagtgagacccgaaagaagcaggttaaacaatcctgataatccacatttttattatgcgcagaaaacgcaggagcagatgaatcacttggatgttttaccatctagtaccggtgtaaacccaaatgcaactcgtcgcagtggctccttacgctccaaaggctctgtgagaagcaaatttagtggccgcgaaacggatagctatcttttacaagatatgaatactactgacaagaaggcttccgttaaaataagtgatgaaggtgttgcggaagacgaatttgataaagatggtgatgtggacaatttcgaagaaagctccacgcagcccataaataagtctatcaaaccattaagaaaggaaacgaatgatacattgagtttttggcagatgtactgttatttcattacgttttgggcacctgctccaattcttgctttctgcgggatgccaaagaaggaaagacaaatggcgtggagagaaaaggttgctttaatttctgtcatcttgtacattggtgcgattgtggctttcttgacttttggtttcactaaaaccgtttgtagtagttctaaattacgtttgaaaaacaacgaagtatctacagaatttgtcgtaattaacggtaaggcttatgaattggatacttcctctcgttccggtatacaagacgttgaagtagattctgacaccctttatgggccctggtctgatgctggtaaagatgcttctttcttgtttcaaaatgtgaatggtaactgtcataaccttataactccaaagagtaattcttccattccccatgacgatgataataatttagcatggtattttccttgtaagttaaagaatcaagatggctcttccaagccaaacttcacagttgaaaattacgcaggatggaactgtcatacgtctaaagaagatagggacgcattttacggtttaaagagtaaagctgatgtttacttcacttgggatggtataaagaactcttctagaaacttgattgtttataatggcgacgttttggatttagatcttcttgattggttggaaaaggatgacgttgactatcccgttgtattcgatgacttgaagacttccaatttacaaggttatgatctttctttggttttgagcaatgggcatgaaagaaaaattgcgagatgtttgagcgaaattattaaagttggtgaagtagactccaaaaccgtcggttgtattgcctctgatgtcgttttgtatgtttctttagtatttattctttctgtggtgataattaaattcataattgcctgctacttccgttggactgtagctaggaaacaaggtgcatatatcgtggacaataaaacaatggataaacacacaaacgatatcgaggattggtctaataatattcaaacaaaagctcctttgaaggaagtagatcctcatttgaggccaaagaaatactctaaaaagtctttgggacacaagcgtgctagcacctttgacttgttgaaaaaacacagctccaaaatgtttcaatttaacgaatctgtgatagatttggacacctccatgagcagttctttacaatcttctggttcttacagaggaatgacaacaatgaccactcaaaatgcttggaaactctctaatgaaaacaaagctgtacattcccgtaatccatctactttgttgcctacatcctctatgttttggaataaagcgacttcctctcctgtaccaggatcttctttgattcagagtcttgattctacgattatacatcccgatatcgttcaacaaccaccattagattttatgccatacgggttcccattgattcatactatctgttttgttacttgttattctgaggatgaagagggtttaagaaccactttagactctctttctaccacagattatccaaattcccataaattattgatggttgtttgtgatggtttaattaagggcagtggcaacgataagactactccagagatagcgttaggaatgatggacgactttgtcaccccacctgatgaagttaaaccttactcctatgtggcagtggcatctggctctaaaagacacaatatggccaagatatatgcgggtttttacaaatatgacgattctacaattccaccagaaaatcaacaacgtgtcccaatcattacaattgtgaagtgcggtactcctgcagagcagggggccgccaaacccggtaacagaggtaagcgtgattctcaaattattttgatgtcctttttagaaaaaataacatttgatgaaagaatgactcaattggaatttcagcttttaaaaaatatttggcagattacggggttgatggcagacttctacgaaacggtacttatggttgatgctgatactaaagtctttcccgatgctttaactcatatggtcgctgaaatggttaaagatcctttgattatgggtctttgtggtgagaccaagatcgctaataaggcacaatcttgggtaactgcaattcaagtgtttgagtactatatttctcatcatcaggctaaagcttttgaatctgtcttcggttctgtaacttgtttgccgggatgtttctccatgtatcgtataaaatctcctaaaggttctgatggttattgggtacctgtattggcaaatccagatattgttgaaagatattctgataatgttacaaacactttgcataagaagaacttattattacttggtgaagatagatttttatcttctttaatgttaaagactttccctaagagaaagcaagtatttgttccaaaagctgcttgtaaaactattgcccctgataaattcaaagtcttactttcccagcgtagaagatggattaattctacggtacataacctttttgaattagttttgatcagagacttatgtggcactttctgtttttccatgcaatttgtgattggtattgaattgattggtactatggtattaccgttagccatttgctttactatttatgtcattatttttgccattgtatccaaacctacacccgtaatcactttagttttattggcaattattcttggtttgcccggcttaattgttgttataactgctacgagatggagttacttatggtggatgtgcgtatatatttgtgctttgcctatttggaatttcgtattaccttcttatgcgtactggaaatttgatgacttcagttggggtgatacgagaactattgcgggaggtaataaaaaggcacaagacgagaatgaaggtgaatttgatcactccaagattaaaatgaggacatggagggaatttgaaagggaagatattctcaatagaaaggaggaaagtgactccttcgttgcatga

SEQ ID NO: 445 - DNA, 906 bp, Saccharomyces cerevisiae
atgttgaatagttcaagaaaatatgcttgtcgttccctattcagacaagcgaacgtctcaataaaaggactcttttataatggaggcgcatatcgaagagggttttcaacgggatgttgtttgaggagtgataacaaggaaagcccaagtgcaagacaaccactagataggctacaactaggtgatgaaatcaatgaaccagagcctattagaaccaggttttttcaattttccagatggaaggccaccattgctctattgttgctaagtggtgggacgtatgcctatttatcaagaaaaagacgcttgctagaaactgaaaaggaagcagatgctaacagagcttacggttcagtagcacttggcggtcctttcaatttaacagattttaatggtaagcctttcactgaggagaatttgaagggtaagttttccattttatactttggattcagtcattgccccgacatttgtccagaagagcttgacagattaacgtattggatttctgaattagatgataaagaccatataaagatacagccattgtttatctcatgtgatcctgcaagagatacaccggatgtcttgaaagagtacttaagcgattttcacccagctatcattggtttaaccggtacgtacgaccaagtgaaaagcgtatgcaaaaaatacaaggtatatttttcaactccacgtgatgtcaagcccaaccaggattacttagtggaccattcgatatttttctatttgatcgaccctgaaggacagtttatcgatgcgttgggaagaaactacgatgagcaatctggtctcgaaaagattcgtgaacaaattcaggcgtatgtgccaaaggaagaacgggagcgtaggtcaaaaaaatggtactcttttatcttcaattga

SEQ ID NO: 446 - DNA, 906 bp, Artificial Sequence
  Description of Artificial Sequence: Synthetic polynucleotide
atgttgaatagtagtagaaaatatgcttgtcgttcccttttcagacaagcgaacgtcagtataaaaggactcttttataatggaggcgcatatagaagagggttttctacgggatgttgtttgaggagtgataacaaggaaagcccaagtgcaagacaaccattagataggttacaattgggtgatgaaatcaatgaaccagagcctattagaaccaggttttttcaattttccagatggaaggccaccattgctttattgttgttaagtggtgggacgtatgcctatttatctagaaaaagacgcttgttggaaactgaaaaggaagcagatgctaacagagcttacggttctgtagcacttggcggtcctttcaatttaacagattttaatggtaagcctttcactgaggagaatttgaagggtaagttttccattttatactttggattcagtcattgccccgacatttgtccagaagagcttgacagattaacgtattggatttctgaattagatgataaagaccatataaagatacagccattgtttatcagttgtgatcctgcaagagatacaccggatgtcttgaaagagtacttaagcgattttcacccagctatcattggtttaaccggtacgtacgaccaagtgaaaagcgtatgcaaaaaatacaaggtatatttttccactccacgtgatgtcaagcccaaccaggattacttagtggaccattccatatttttctatttgatcgaccctgaaggacagtttatcgatgcgttgggaagaaactacgatgagcaatctggtctcgaaaagattcgtgaacaaattcaggcgtatgtgccaaaggaagaaagagagcgtaggtccaaaaaatggtactcttttatcttcaattga

SEQ ID NO: 447 - DNA, 1185 bp, Saccharomyces cerevisiae
atgcctccaaagaagcaagtcgaagaaaaaaaggtcttattgggtcgtccaggtaataacttgaaagccggtattgtcggtttggccaatgttggtaagtctacctttttccaagccatcactagatgtccattgggtaacccagctaactatccattcgctaccattgatccagaagaagcccgtgttattgtcccatctccaagatttgataagttgtgtgaaatctacaagaagacagcttcggaagttccagctcatttgaccgtttacgatattgctggtttgactaagggtgcctctgctggtgaaggtttgggtaatgctttcttgtctcacatcagatcagtcgattctatctaccaagtcgttcgttgtttcgatgatgctgaaattatccacgttgagggtgacgttgatccagttcgtgatttagaaattattaaccaagaactaagattgaaagatattgaattcgcacaaaaggctttggaaggtgctgaaaagattgccaaaagaggtggtcaatctttggaagtcaaacaaaagaaggaagaaatggatttgattacgaaaatcattaaattgctagagagtggtcaaagagttgctaatcactcctggacttcaaaagaagttgaaattatcaactccatgttcttgttgactgctaagccatgtatctatttgattaatttatctgaaagagattacatcagaaagaaaaacaagcatctgctaagaatcaaggaatgggtagacaagtactctccaggtgacttgatcattccattcagtgtttctctagaagaaagactatctcatatgtccccagaagatgctgaagaagaattgaagaaactgcagacaatatctgccttgccaaagattatcactaccatgagacaaaagttagatttgatttcctttttcacctgcggtccagatgaagttcgtgaatggaccatcagaagaggtactaaagctccacaagctgctggtgttattcataacgatttaatgaatacctttattttggctcaagttatgaaatgtgaagatgtcttcgaatataaggacgattctgccatcaaggccgctggtaagttgatgcaaaagggtaaagactatgtcgttgaagacggtgatatcatttacttcagagctggtgctggtaagaattga

SEQ ID NO: 448 - DNA, 1185 bp, Artificial Sequence
  Description of Artificial Sequence: Synthetic polynucleotide
atgcctccaaagaagcaagtcgaagaaaaaaaggtcttattgggtcgtccaggtaataacttgaaagccggtattgtcggtttggccaatgttggtaagtctacctttttccaagccatcactagatgtccattgggtaacccagctaactatccattcgctaccattgatccagaagaagcccgtgttattgtcccatctccaagatttgataagttgtgtgaaatctacaagaagacagcttctgaagttccagctcatttgaccgtttacgatattgctggtttgactaagggtgcctctgctggtgaaggtttgggtaatgctttcttgtctcacatcagatctgtcgattctatctaccaagtcgttcgttgtttcgatgatgctgaaattatccacgttgagggtgacgttgatccagttcgtgatttagaaattattaaccaagaattgagattgaaagatattgaattcgcacaaaaggctttggaaggtgctgaaaagattgccaaaagaggtggtcaatctttggaagtcaaacaaaagaaggaagaaatggatttgattacgaaaatcattaaattgttggagagtggtcaaagagttgctaatcactcctggacttctaaagaagttgaaattatcaactccatgttcttgttgactgctaagccatgtatctatttgattaatttatctgaaagagattacatcagaaagaaaaacaagcatttattaagaatcaaggaatgggtagacaagtactctccaggtgacttgatcattccattcagtgtttctttggaagaaagattatctcatatgtccccagaagatgctgaagaagaattgaagaaattacagacaatatctgccttgccaaagattatcactaccatgagacaaaagttagatttgatttcctttttcacctgcggtccagatgaagttcgtgaatggaccatcagaagaggtactaaagctccacaagctgctggtgttattcataacgatttaatgaatacctttattttggctcaagttatgaaatgtgaagatgtcttcgaatataaggacgattctgccatcaaggccgctggtaagttgatgcaaaagggtaaagactatgtcgttgaagacggtgatatcatttacttcagagctggtgctggtaagaattga

SEQ ID NO: 449 - DNA, 1143 bp, Saccharomyces cerevisiae
atgcttcccacattcaaacgttacatgtcgtcctcagctcatcagattcccaagcacttcaaatcgctcatctattcaactcatgaagttgaggattgtaccaaggttttgtcagtgaaaaattatacgcctaaacaagacttatctcaatcaattgtgttaaaaactttggcctttcccataaacccttcggatatcaatcagttgcaaggagtatacccgtctcgtccagaaaagacatacgattactccacagatgagccagccgctatcgccggtaatgagggtgtctttgaagttgtttctttaccttcgggaagttccaagggagatttgaaattgggtgaccgagttatcccattgcaggcaaatcaagggacttggtccaattatagagttttctctagtagttctgatttaatcaaggtaaatgatttggatctgttttctgcggcaactgtatctgttaatggttgtaccggtttccaattagtatcagactatatcgactggaacagtaacggtaatgaatggattatccaaaatgccggtacatctagtgtatcaaaaatagttacgcaagtagcaaaagctaaagggatcaaaacattaagtgttatacgtgaccgtgataattttgatgaggtagcaaaagttttggaggataagtatggtgctacgaaggttatttccgaatcgcaaaacaacgacaagacttttgccaaagaagtattgtccaagattttgggtgaaaatgcaagggtgaggcttgccttgaattctgttggaggtaaatccagtgcatcaatagcacgtaagttggaaaataatgctttgatgctcacttatggaggaatgtcaaaacaacctgtaactttaccaacatctctacacattttcaaaggcttgacatccaaagggtactgggtgactgaaaagaacaaaaaaaacccccaaagcaagattgacaccatcagtgattttatcaaaatgtataattatggtcacattatttcaccaagagatgaaattgaaactcttacctggaatactaacactactactgacgaacagttactagaactagtcaaaaaaggtataactgggaaggggaagaaaaaaatggttgttttagaatggtaa

SEQ ID NO: 450 - DNA, 1143 bp, Artificial Sequence
  Description of Artificial Sequence: Synthetic polynucleotide
atgcttcccacattcaaacgttacatgtcttcctctgctcatcagattcccaagcacttcaaatctctcatctattctactcatgaagttgaggattgtaccaaggttttgtctgtgaaaaattatacgcctaaacaagacttatctcaatctattgtgttaaaaactttggcctttcccataaacccttctgatatcaatcagttgcaaggagtatacccgtctcgtccagaaaagacatacgattactccacagatgagccagccgctatcgccggtaatgagggtgtctttgaagttgtttctttaccttctggaagttccaagggagatttgaaattgggtgacagagttatcccattgcaggcaaatcaagggacttggtccaattatagagttttctctagtagttctgatttaatcaaggtaaatgatttggatttattttctgcggcaactgtatctgttaatggttgtaccggtttccaattagtaagtgactatatcgactggaacagtaacggtaatgaatggattatccaaaatgccggtacatctagtgtatccaaaatagttacgcaagtagcaaaagctaaagggatcaaaacattaagtgttatacgtgaccgtgataattttgatgaggtagcaaaagttttggaggataagtatggtgctacgaaggttatttccgaatctcaaaacaacgacaagacttttgccaaagaagtattgtccaagattttgggtgaaaatgcaagggtgaggcttgccttgaattctgttggaggtaaatccagtgcatctatagcacgtaagttggaaaataatgctttgatgctcacttatggaggaatgtccaaacaacctgtaactttaccaacatctttacacattttcaaaggcttgacatccaaagggtactgggtgactgaaaagaacaaaaaaaacccccaaagcaagattgacaccatcagtgattttatcaaaatgtataattatggtcacattatttctccaagagatgaaattgaaactcttacctggaatactaacactactactgacgaacagttattggaattggtcaaaaaaggtataactgggaaggggaagaaaaaaatggttgttttagaatggtga

SEQ ID NO: 451 - DNA, 333 bp, Saccharomyces cerevisiae
atgtttaaaggatctgtgtcactgtatatactttgttttgctttagggttacgaaacacatttttaatatataatgtatgtaataatattaaaaacaactgtatggataatacttctggaccaatcggtgataccatcttccttatttatggtattattatcattattggaccccgccggtgcttttttttttaccttaaaagagtggttctcctccaagggacgcacgagtggtgtacccaggggttgtttccatggctaaagaaattggagattacaaacgtacattgtcatttaagaaggttcataatctgccaattacatttgatataa

SEQ ID NO: 452 - DNA, 333 bp, Artificial Sequence
  Description of Artificial Sequence: Synthetic polynucleotide
atgtttaaaggatctgtgtctttgtatatactttgttttgctttagggttaagaaacacatttttaatatataatgtatgtaataatattaaaaacaactgtatggataatacttctggaccaatcggtgataccatcttccttatttatggtattattatcattattggaccccgccgctgcttttttttttaccttaaaagagtggttctcctccaagggacgcacgagtggtgtacccaggggttgtttccatggttaaagaaattggagattacaaacgtacattgtcatttaagaaggttcataatctgccaattacatttgatatga

SEQ ID NO: 453 - DNA, 1578 bp, Saccharomyces cerevisiae
atgattttctcactagatgaagaacttcatcgtgtgtcactagatgataaaaagaatgacattaaagtagattattcctcggcaatatacaatgatatcaatcatgaacaaggcagctccatcacatatgaggagagtataaatcacctctcggttcattcaaatgcgattccgctaaatggcatgagtcctgcacataggatgagaagaaggtcctcagcttattccaaattccctattctcactccaccaaatacgagaagattttctattacaggttcggacgcaatgcgaactaatacgaatagactatccataacacctcaggacattatttcctctaatattggagaaaatgaattatcaaggaacctgcacgattttaagcccgtgagagtcctaggccaaggtgcctacggtaaagttcttcttgttaaggacgtcaatacatccaagctgtatgctatgaagcaattacggaaagcagaaattttaatttctcaaacagccacagattccaagagagaagacgaagataaaaatgatggtaataacaacgataatgacgatggattatcaaagaggcttgagagaacatttgccgaacggtctattctatctgaaatagaacatccaaacattgtcaagttattttattcttttcacgataactcaaagttatatttactgctacaatatatccctggcggtgaactattttaccacttgaaggaacacgggaccctagatgagacgacagtttcgttttacgcggcagaaatcagctgtgccttgagatttttgcatacgaaaggtgttgtctatagagatttaaaacctgaaaactgtttattgaatcaacgtggacatttagtattgacagattttggtctgagtaaaaaaagtgctaatgattccgcggttgatgaggaggatccagagaacgtcaatgccctatactcgattatcggtacgcctgaatactgtgcgcctgaaatattattaggtaaagcttacagtcagaattgtgattggtattctttgggatgtctgttgtatgacatgttagtaggtaagcctccatatactggtagcaatcataaggtgatcattaataagattcaacaaaacaagcaaggccccaaaattccattttatctgagcgagggaatgaaagatatattaaacgcgctgttgaagaaggaaactgccaaaaggtggaatgttgacaaatactgggccaaaaccggggctaataataagcctactaagtctaagaagaagaaatcaggggctgcaagaactagtcttttcactgaacattttatctttagaaaaatagactggaagttattagaatctggacaattgcaaaaaaccactctaggcccaattgttccagttattacggatttggaactagcggaaaattttgacacagaatttacttctatgtcatatgaggaaacctatacggatagcaagccgattaatatcaattcggtgagcaagtccccggatatgttcaagggatttagttataaagcaagtggtagctatttggagaagtacttttga

SEQ ID NO: 454 - DNA, 1578 bp, Artificial Sequence
  Description of Artificial Sequence: Synthetic polynucleotide
atgattttctctttagatgaagaacttcatcgtgtgtctttagatgataaaaagaatgacattaaagtagattattcctctgcaatatacaatgatatcaatcatgaacaaggcagctccatcacatatgaggagagtataaatcacctcagtgttcattctaatgcgattccgttaaatggcatgagtcctgcacataggatgagaagaaggtcctctgcttattccaaattccctattctcactccaccaaatacgagaagattttctattacaggttctgacgcaatgcgtactaatacgaatagattatccataacacctcaggacattatttcctctaatattggagaaaatgaattatctaggaacttgcacgattttaagcccgtgagagtccttggccaaggtgcctacggtaaagttcttcttgttaaggacgtcaatacatccaagctttatgctatgaagcaattaagaaaagcagaaattttaatttctcaaacagccacagattccaagagagaagacgaagataaaaatgatggtaataacaacgataatgacgatggattatccaagaggcttgagagaacatttgccgaaagatctattttatctgaaatagaacatccaaacattgtcaagttattttattcttttcacgataactccaagttatatttattattacaatatatccctggcggtgaattattttaccacttgaaggaacacgggaccttggatgagacgacagtttctttttacgcggcagaaatcagctgtgccttgagatttttgcatacgaaaggtgttgtctatagagatttaaaacctgaaaactgtttattgaatcaacgtggacatttagtattgacagattttggtttgagtaaaaaaagtgctaatgattccgcggttgatgaggaggatccagagaacgtcaatgccctttactctattatcggtacgcctgaatactgtgcgcctgaaatattattaggtaaagcttacagtcagaattgtgattggtattctttgggatgtttgttgtatgacatgttagtaggtaagcctccatatactggtagcaatcataaggtgatcattaataagattcaacaaaacaagcaaggccccaaaattccattttatttgagcgagggaatgaaagatatattaaacgcgttattgaagaaggaaactgccaaaaggtggaatgttgacaaatactgggccaaaaccggggctaataataagcctactaagtctaagaagaagaaaagtggggctgcaagaactagtcttttcactgaacattttatctttagaaaaatagactggaagttattagaatctggacaattgcaaaaaaccactttgggcccaattgttccagttattacggatttggaattggcggaaaattttgacacagaatttacttctatgtcttatgaggaaacctatacggatagcaagccgattaatatcaattctgtgagcaagtccccggatatgttcaagggatttagttataaagcaagtggtagctatttggagaagtacttttga

SEQ ID NO: 455 - DNA, 1374 bp, Saccharomyces cerevisiae
atgtctgacaaccctgagatgaaaccacatggtacgagcaaggagattgtggagtcggttactgacgccacctcaaaggcgattgataaattgcaagaagaactccacaaggacgccagcgaatccgtcacgccggtgaccaaggaaagcactgctgctacaaaggaaagcaggaaatacaactttttcattagaacagtttggacgtttgttatgatcagtggtttcttcatcaccttagcatcgggtcatgcatggtgtatagtgctgattttgggctgccaaattgctacttttaaagagtgtattgccgtaacaagtgcatctggtcgcgaaaagaatttgccattgacaaagacgttgaactggtaccttctcttcaccactatctattacttagatgggaaatcactcttcaagtttttccaagctactttttacgagtatcctgtattgaactttatcgtaacaaatcataagtttatctgctattgtctctatcttatgggatttgttctgttcgtttgtagtttaagaaagggatttttgaaattccagttcggatcattgtgcgttactcatatggttcttcttctggtagtatttcaggctcatttgatcatcaaaaacgtgctcaatgggctattctggttcttattaccatgcgggttggtaattgttaatgatatcttcgcctacctgtgcggcattacattcggtaagactaaactaatagaaatctcgcccaagaaaactttagaaggtttccttggtgcctggtttttcactgctctagctagtattatattaacaaggattctgagcccttatacttacttgacgtgccctgttgaagatctccataccaattttttctctaatttgacatgtgaactaaacccagttttccttccacaagtttacagacttccacccatctttttcgataaagttcaaatcaattcaattacagtaaaaccaatttatttccatgctttaaacttagctacctttgcatcattatttgcgccatttggaggctttttcgcatctggtctaaagagaacttttaaagttaaagactttggccactccatcccaggccatggtggtatcacagacagggttgattgccaattcataatgggttcttttgccaatttgtactatgaaacattcatcagcgaacacagaataacagtagatacagttttatccactattttaatgaacctgaacgacaagcagattatagaattgattgatatcttgattagattcctatctaaaaaaggtataatatcagcgaagaattttgaaaagttggctgacatctttaatgtgaccaagaaatcattgaccaatcactcttga

SEQ ID NO: 456 - DNA, 1374 bp, Artificial Sequence
  Description of Artificial Sequence: Synthetic polynucleotide
atgtctgacaaccctgagatgaaaccacatggtacgagcaaggagattgtggagtctgttactgacgccacctccaaggcgattgataaattgcaagaagaactccacaaggacgccagcgaatccgtcacgccggtgaccaaggaaagcactgctgctacaaaggaaagcaggaaatacaactttttcattagaacagtttggacgtttgttatgatcagtggtttcttcatcaccttagcatctggtcatgcatggtgtatagtgttgattttgggctgccaaattgctacttttaaagagtgtattgccgtaacaagtgcatctggtcgcgaaaagaatttgccattgacaaagacgttgaactggtaccttctcttcaccactatctattacttagatgggaaatctctcttcaagtttttccaagctactttttacgagtatcctgtattgaactttatcgtaacaaatcataagtttatctgctattgtctctatcttatgggatttgttttgttcgtttgtagtttaagaaagggatttttgaaattccagttcggatctttgtgcgttactcatatggttcttcttttggtagtatttcaggctcatttgatcatcaaaaacgtgctcaatgggcttttctggttcttattaccatgcgggttggtaattgttaatgatatcttcgcctacttgtgcggcattacattcggtaagactaaattgatagaaatctcccccaagaaaactttagaaggtttccttggtgcctggtttttcactgctttggctagtattatattaacaaggattttgagcccttatacttacttgacgtgccctgttgaagatctccataccaattttttctctaatttgacatgtgaattgaacccagttttccttccacaagtttacagacttccacccatctttttcgataaagttcaaatcaattctattacagtaaaaccaatttatttccatgctttaaacttagctacctttgcatctttatttgcgccatttggaggctttttcgcatctggtttgaagagaacttttaaagttaaagactttggccactccatcccaggccatggtggtatcacagacagggttgattgccaattcataatgggttcttttgccaatttgtactatgaaacattcatcagcgaacacagaataacagtagatacagttttatccactattttaatgaacttgaacgacaagcagattatagaattgattgatatcttgattagattcttatctaaaaaaggtataatatctgcgaagaattttgaaaagttggctgacatctttaatgtgaccaagaaatctttgaccaatcactcttga

SEQ ID NO: 457 - DNA, 1659 bp, Saccharomyces cerevisiae
atgtccgtaacttttaaggacgatgttcatcggattctgaagtttgttgctaattgcaatggcaggtttgaagattccaaatgtgatataagagaatcgcctctcggtggattgggtgtctttgcaaagactgatattgcagaaggtgagtcaatattgacgttgaacaaatcctcgattttttctgcatctaacagctccattgccaatttgttatgtgacagtagcatcgatggaatgttagctctaaacatcgcattcatttacgaaactacagttttcagaaattctagtcattggtacccatttctgcgaactatccgaattcgtgatgacgaagggcacttaaacctgccgccaagcttttggcatgcggatgctaagcgacttttaaaaggaaccagtttcgataccttattcgattcgttggcaccagaagaagaaatcatggaaggatttgaaattgctgtggatttggcacacaaatggaacgacgagtttgggttggaaattccaaaaggcttcctagacgttagtgaggagaatcatgaagaagattacaatttgaaattagaaaagtttatatcggtggcatatactttatcatcaagaggatttgaaattgacgcgtaccatgagacagctttggtgcccatcgcagacctgttcaatcatcatgtttccgacccggatttaaagtttgtatcgctatatgatgtgtgcgataaatgtggtgaaccagacatgtgtaaacatctcatagcagaggaatacttggaagcagaaaatctagacaaaaatatgcccaaagtcgcaagtatggagactcgtgtcatcgatgaagacttaatcaaaagtttagaaaatgatttagagaaagaatactctaatgttacggcaaacatcgaggatgatgatggcggtattgaaaaccctgacgaatgtgtcgatttagtgttaaagaatgacgtcgcacaaggccaagaaatatttaattcctatggtgagctctcaaacgtctttttgttggccagatatggtttcaccgtacctgagaatcagtatgatattgttcatttaggacctgattttatgaaaatcttaaagaaagaagaaaaatatcaagaaaaagtcaagtggtggagccaagtcggtcatggcttgttttcagcatggtatgctcaaatgcgccaagaagatgaagaagacgaagacggtcaagcaaaatcagacaatctgtctgacgatatagagagcgaagaggaagaggaagaggaagagggtgatgatagcttggaatcatggctttcccagctttacatagactcaagtggcgagccttcaccctcaacgtgggccttagctaaccttttgactttaacggccgttcaatgggaatcattgttttccaaaaaggccactcctcacatcagtgattctatagttaacgaagaaaagctgcccttcctggccaaaaaagacaatccccattccaagaaactgctttccaacttacttaaggaaaagcaactaccttgcataaaaggcgacaactcgtcaaagataacaagtgctactaaaagcatgctccaaaatgctcgaacacttgtacaatcggagcataatatcttagatagatgtctcaagagactatcctaa

SEQ ID NO: 458 - DNA, 1659 bp, Artificial Sequence
  Description of Artificial Sequence: Synthetic polynucleotide
atgtccgtaacttttaaggacgatgttcatagaattttgaagtttgttgctaattgcaatggcaggtttgaagattccaaatgtgatataagagaatctcctctcggtggattgggtgtctttgcaaagactgatattgcagaaggtgagagtatattgacgttgaacaaatccagtattttttctgcatctaacagctccattgccaatttgttatgtgacagtagcatcgatggaatgttagctttgaacatcgcattcatttacgaaactacagttttcagaaattctagtcattggtacccatttttaagaactatcagaattcgtgatgacgaagggcacttaaacttaccgccaagcttttggcatgcggatgctaagagacttttaaaaggaaccagtttcgataccttattcgattctttggcaccagaagaagaaatcatggaaggatttgaaattgctgtggatttggcacacaaatggaacgacgagtttgggttggaaattccaaaaggcttcttggacgttagtgaggagaatcatgaagaagattacaatttgaaattagaaaagtttatatctgtggcatatactttatcttctagaggatttgaaattgacgcgtaccatgagacagctttggtgcccatcgcagaccttttcaatcatcatgtttccgacccggatttaaagtttgtatctttgtatgatgtgtgcgataaatgtggtgaaccagacatgtgtaaacatctcatagcagaggaatacttggaagcagaaaatttggacaaaaatatgcccaaagtcgcaagtatggagactcgtgtcatcgatgaagacttaatcaaaagtttagaaaatgatttagagaaagaatactctaatgttacggcaaacatcgaggatgatgatggcggtattgaaaaccctgacgaatgtgtcgatttagtgttaaagaatgacgtcgcacaaggccaagaaatatttaattcctatggtgagctctccaacgtctttttgttggccagatatggtttcaccgtacctgagaatcagtatgatattgttcatttaggacctgattttatgaaaatcttaaagaaagaagaaaaatatcaagaaaaagtcaagtggtggagccaagtcggtcatggcttgttttctgcatggtatgctcaaatgcgccaagaagatgaagaagacgaagacggtcaagcaaaaagtgacaatttatctgacgatatagagagcgaagaggaagaggaagaggaagagggtgatgatagcttggaaagttggctttcccagctttacatagacagcagtggcgagccttctcccagtacgtgggccttagctaaccttttgactttaacggccgttcaatgggaatctttgttttccaaaaaggccactcctcacatcagtgattctatagttaacgaagaaaagttgcccttcttggccaaaaaagacaatccccattccaagaaattactttccaacttacttaaggaaaagcaattaccttgcataaaaggcgacaactcttccaagataacaagtgctactaaaagcatgctccaaaatgctagaacacttgtacaaagtgagcataatatcttagatagatgtctcaagagattatcctga

SEQ ID NO: 459 - DNA, 1089 bp, Saccharomyces cerevisiae
atgtcccgtccacaagttactgttcactctttgactggtgaagctactgccaatgccttgccattgccagctgtcttctccgctcctatccgtccagacattgtccacactgttttcacctctgtgaacaagaacaagagacaagcttacgctgtttctgaaaaggctggtcaccaaacctccgctgaatcctggggtaccggtcgtgccgtcgctcgtattccaagagttggtggtggtggtaccggtagatccggtcaaggtgccttcggtaacatgtgtcgtggtggtcgtatgtttgctccaactaagacctggagaaagtggaacgttaaggttaaccacaacgaaaagcgttacgccactgcttctgctattgctgctactgctgttgcctctttggtcttggccagaggtcacagagtcgaaaagattccagaaatcccattggttgtctccactgacttggaatctattcaaaagaccaaggaagctgttgctgctttgaaggctgttggtgctcactccgacttgttgaaggtcttgaagtccaagaaattgagagccggtaagggtaagtacagaaacagaagatggactcaaagaagaggtccattagttgtctacgctgaagacaacggtatcgtcaaggccttgagaaacgttccaggtgttgaaactgccaacgttgcttctttgaacttgttgcaattggctccaggtgctcacttgggtagattcgttatctggaccgaagctgctttcaccaagttggaccaagtctggggttccgaaaccgttgcctcctccaaggtcggctacactttgccatcccatatcatctccacttctgatgtcaccagaattatcaactcttccgaaatccaatctgctatcagaccagctggccaagctactcaaaagcgtactcacgttttgaagaagaacccattgaagaacaagcaagtcttgttgagattgaacccttacgccaaggtctttgctgctgaaaagctaggttccaagaaggctgaaaagactggtaccaagccagctgctgttttcaccgaaactttgaaacacgattaa

SEQ ID NO: 460 - DNA, 1089 bp, Artificial Sequence
  Description of Artificial Sequence: Synthetic polynucleotide
atgtcccgtccacaagttactgttcactctttgactggtgaagctactgccaatgccttgccattgccagctgtcttctccgctcctatccgtccagacattgtccacactgttttcacctctgtgaacaagaacaagagacaagcttacgctgtttctgaaaaggctggtcaccaaacctccgctgaatcctggggtaccggtcgtgccgtcgctcgtattccaagagttggtggtggtggtaccggtagatccggtcaaggtgccttcggtaacatgtgtcgtggtggtcgtatgtttgctccaactaagacctggagaaagtggaacgttaaggttaaccacaacgaaaagcgttacgccactgcttctgctattgctgctactgctgttgcctctttggtcttggccagaggtcacagagtcgaaaagattccagaaatcccattggttgtctccactgacttggaatctattcaaaagaccaaggaagctgttgctgctttgaaggctgttggtgctcactccgacttgttgaaggtcttgaagtccaagaaattgagagccggtaagggtaagtacagaaacagaagatggactcaaagaagaggtccattagttgtctacgctgaagacaacggtatcgtcaaggccttgagaaacgttccaggtgttgaaactgccaacgttgcttctttgaacttgttgcaattggctccaggtgctcacttgggtagattcgttatctggaccgaagctgctttcaccaagttggaccaagtctggggttccgaaaccgttgcctcctccaaggtcggctacactttgccatcccatatcatctccacttctgatgtcaccagaattatcaactcttccgaaatccaatctgctatcagaccagctggccaagctactcaaaagcgtactcacgttttgaagaagaacccattgaagaacaagcaagtcttgttgagattgaacccttacgccaaggtctttgctgctgaaaagttgggttccaagaaggctgaaaagactggtaccaagccagctgctgttttcaccgaaactttgaaacacgattga

SEQ ID NO: 461 - DNA, 303 bp, Saccharomyces cerevisiae
atggtaatcatacgtatcacattgagcaacctactgagggagaaaggagatttgtgcctggaactacttcgtgtagacaaaggaatatacccctttgatacttctcaaccaattggtagtatgcaggtgctgctcccccacgctagtaattaccccggttccgctcaattttatctttttgacgcggctacgaaactcggtttcgagcagtccgttaacttaaactacagtgaaaatcattggttaaacaacactccatgccagtatctgtatgtgtttttgcaacaagcacgactggagtaa

SEQ ID NO: 462 - DNA, 303 bp, Artificial Sequence
  Description of Artificial Sequence: Synthetic polynucleotide
atggtaatcatacgtatcacattgagcaacttattgagggagaaaggagatttgtgcttagaattgcttcgtgtagacaaaggaatatacccctttgatacttctcaaccaattggtagtatgcaggtgcttctcccccacgctagtaattaccccggttccgctcaattttatctttttgacgcggctacgaaactcggtttcgagcagtccgttaacttaaactacagtgaaaatcattggttaaacaacactccatgccagtatttgtatgtgtttttgcaacaagcaagattggagtga

SEQ ID NO: 463 - DNA, 2760 bp, Saccharomyces cerevisiae
atgtcacaccatgttcctaatttatatggtacacctattcgcgaccctcacgaacgcaaacgcaattcagcgtcaatgggcgaagtaaatcagtcagtttcttcgaggaattgtgaaagaggaagtgaaaagggcacgaagcaaaggaagaaagcctctcacgcttgtgaccaatgtagaaggaaaagaatcaagtgcaggtttgataaacataccggcgtatgtcaagggtgcttagaagtcggtgaaaagtgtcaatttattagagttccattgaaacgtggtcctgcaaaaaaaaggggcagtgtagtatccattgaaaaattcagctcggataatgatcctcttcaataccgaccaagaacacattcatacccaatgaactcgggaaataactacttaccatcactcgccaggaattcctcttttccttccataagcagtctatttgttccctcgataactgctcaatcgcaacaatttgtaaaggtgccgtacgatgacatcaagcgtaggagctctctggcaatattaggcagcgattcatcgatatctaccgaatttgggggaaactatcgcttagatgaaaacttaaatgtcaggcaagaggggaaggatattgtagcgaaaggaatgataacgcccgtggaggaaatgggcgcatgttcatctaacgttcgtcgtcagggttcacaatctcttccaattcaagaacagcgcgctagcccgtacattaacccttttatctctgggagatccaggctaagcagcctttcctatacaagtgaggctacaacttcagaaggtaatacgcaaggtaaaaaccaatgcatgcttactcccaatagtgtacgttccattgaaaaggaacgattaaactcgttaactgcgggatttccgaacaaaaaattaggcacagatggtagaagtgacaaatgggacaaaaattcgacttggaagcctgtatatcgatcgtcgaatccttctcatcctagcactgaaaaaaatgtttccttgaatcaggaagccagtgctaaaccacttatgcttggaacctacagacagtttgatgcaacctcgttctacaaggttttaggcatctactataactttttccatattaattttcctgtaataccaattaacaaaagtaaatttactgacatgcttgatcctgaaaagccaaacgtgattgatgagatcagacaaattaacaatgaaattatccagtgttttaaaaccgcgctagaggtattggtattttgcaaaataaaacaaagaaggtcatcgaaatcaacaaaatcatggtctcgtgacagtttatgcgattttcaaaaaggtctgtattacattcagaatttcaacaaatgtatagccgactgcttccaaagtttaataactataaaacccgtattaaaacaaaattccagtgttattccttcaagaataaagttcatttacttttcgacaataatagtgttaaattttatcttaatattggccggtgaggaaagctcgcttttgctaggcccctctgttggggtttttaacgaatttcaagctcataagttatttctaccttttcaaaatacgtccccaatgctattattaaattcaaacgaggaaagtggtgacgagatactggattatgctgtgttgttcaaaaggttgtacatccttttaaacattctggatacgctacaaagctttcggctaggtcaaccaaaattaattaatctaaattttggtagcgccattgaaacatattttagcgataaaacaggtcataaccaagtcgtcgaaaaagctcccgtagctttggataacattctacgaaaccttaaacttggtgaatttataacatattttgtccttaacagaaaatcattgcaagtaaatgtacctcaccacttgctgttcacaaatcaaacggattacggagagttcgctgttgaaaaaggggaacatgataatatagctggcaaatttgagacccttttgaagaaaaaggaaattttaatcagaaaattactaaatattgaacagaaaaatgaccatattctagaaaattgctgcaattcggatgctgaaatgaaaaatatcggagagctagtctgctcaatgatcactctggtatcaggcatattagattcaattactaatatgaacgcagaaaactctgttgatttggattcaaagccccttccgaacgcctattttgctcaggacagtgaagaagaattaatgtcgccaacacaaagtattacgtcaaatcttgccagtgaagaaaatacacgttgcacaaccaaagacttgatgggaactgtttctattttcatgctgccaatggtggaagaatgctataatatcattagtttgataggacccatacctaccacattaataagtttatacatccgtaatggaaatatggccaagggaataaatgacagaattatgacgttgtcaactgcgctgaacgaattggtgcaaataaccgcactatttaataccctagaaccttttaggaagaatgcacatgaccgtgctaagcgttactatgtaagtgctacaagtagtaccggatgctacgaatcggtaatgaagagcatgtattccggaaaatgtgcagctagtaacgcctcaaacgttgcgccatcggaggaagaaaacaaaaagatattgaaaaagtttgccgacataggttggaaattgatggatgattcagaattgggttgttgctgttgcttctttaactaa

SEQ ID NO: 464 - DNA, 2760 bp, Artificial Sequence
  Description of Artificial Sequence: Synthetic polynucleotide
atgtctcaccatgttcctaatttatatggtacacctattcgcgaccctcacgaacgcaaacgcaattctgcgtccatgggcgaagtaaatcagtctgtttcttccaggaattgtgaaagaggaagtgaaaagggcacgaagcaaaggaagaaagcctctcacgcttgtgaccaatgtagaaggaaaagaatcaagtgcaggtttgataaacataccggcgtatgtcaagggtgcttagaagtcggtgaaaagtgtcaatttattagagttccattgaaacgtggtcctgcaaaaaaaaggggcagtgtagtatccattgaaaaattcagcagtgataatgatcctcttcaatacagaccaagaacacattcttacccaatgaactctggaaataactacttaccatctctcgccaggaattcctcttttccttccataagcagtttatttgttccctccataactgctcaatctcaacaatttgtaaaggtgccgtacgatgacatcaagcgtaggagctctttggcaatattaggcagcgattcttctatatctaccgaatttgggggaaactatcgcttagatgaaaacttaaatgtcaggcaagaggggaaggatattgtagcgaaaggaatgataacgcccgtggaggaaatgggcgcatgttcttctaacgttcgtcgtcagggttctcaatctcttccaattcaagaacagcgcgctagcccgtacattaacccttttatctctgggagatccaggttgagcagcctttcctatacaagtgaggctacaacttctgaaggtaatacgcaaggtaaaaaccaatgcatgcttactcccaatagtgtacgttccattgaaaaggaaagattaaactctttaactgcgggatttccgaacaaaaaattaggcacagatggtagaagtgacaaatgggacaaaaattctacttggaagcctgtatatagatcttccaatccttctcatcctagcactgaaaaaaatgtttccttgaatcaggaagccagtgctaaaccacttatgcttggaacctacagacagtttgatgcaaccagtttctacaaggttttaggcatctactataactttttccatattaattttcctgtaataccaattaacaaaagtaaatttactgacatgcttgatcctgaaaagccaaacgtgattgatgagatcagacaaattaacaatgaaattatccagtgttttaaaaccgcgctcgaggtattggtattttgcaaaataaaacaaagaaggtcctctaaatctacaaaaagttggtctcgtgacagtttatgcgattttcaaaaaggtttatattacattcagaatttcaacaaatgtatagccgactgcttccaaagtttaataactataaaacccgtattaaaacaaaattccagtgttattccttccagaataaagttcatttacttttctacaataatagtgttaaattttatcttaatattggccggtgaggaaagctctcttttgttgggcccctctgttggggtttttaacgaatttcaagctcataagttatttttaccttttcaaaatacgtccccaatgcttttattaaatagcaacgaggaaagtggtgacgagatattggattatgctgtgttgttcaaaaggttgtacatccttttaaacattttagatacgttacaaagctttagattaggtcaaccaaaattaattaatttgaattttggtagcgccattgaaacatattttagcgataaaacaggtcataaccaagtcgtcgaaaaagctcccgtagctttggataacattttaagaaaccttaaacttggtgaatttataacatattttgtccttaacagaaaatctttgcaagtaaatgtacctcaccacttgttattcacaaatcaaacggattacggagagttcgctgttgaaaaaggggaacatgataatatagctggcaaatttgagacccttttgaagaaaaaggaaattttaatcagaaaattattgaatattgaacagaaaaatgaccatattttggaaaattgctgcaattctgatgctgaaatgaaaaatatcggagagttggtctgctctatgatcactttggtaagtggcatattagattctattactaatatgaacgcagaaaactctgttgatttggattctaagccccttccgaacgcctattttgctcaggacagtgaagaagaattaatgtctccaacacaaagtattacgtccaatcttgccagtgaagaaaatacacgttgcacaaccaaagacttgatgggaactgtttctattttcatgcttccaatggtggaagaatgctataatatcattagtttgataggacccatacctaccacattaataagtttatacatccgtaatggaaatatggccaagggaataaatgacagaattatgacgttgtctactgcgttgaacgaattggtgcaaataaccgcattatttaataccttagaaccttttaggaagaatgcacatgaccgtgctaagcgttactatgtaagtgctacaagtagtaccggatgctacgaaagtgtaatgaagagcatgtattccggaaaatgtgcagctagtaacgcctccaacgttgcgccaagtgaggaagaaaacaaaaagatattgaaaaagtttgccgacataggttggaaattgatggatgattctgaattgggttgttgctgttgcttctttaactga

SEQ ID NO: 465 - DNA, 1047 bp, Saccharomyces cerevisiae
atgagcaagacagccgtgaaagattctgctacagaaaaaaccaagctaagtgaaagcgaacagcactacttcaattcgtacgatcactatggtattcacgaagagatgcttcaagatactgttcgtaccttatcttacagaaacgcaattatccaaaataaggatctttttaaggacaagattgttttagacgtcggttgcggtaccggtattttatccatgtttgccgctaaacacggtgcgaagcatgttatcggtgttgatatgtcaagcattattgagatggcgaaggaattggtagagttgaacggattcagcgacaagatcaccttgctaagaggcaagttggaggacgttcatttaccctttcctaaagttgacatcataatttctgaatggatgggttactttctactatacgagtccatgatggacaccgttctttacgctagagaccactatttggtagaaggcggtctgatctttcccgacaagtgctccattcatttggccggtttggaagactctcagtataaagacgagaagttgaactactggcaagacgtttacgggtttgattattcgccatttgttccgttggtcttacacgagcccatcgtcgacaccgtggaaagaaacaatgtcaacaccacctcagacaaattgatcgaatttgatttaaatacagtaaaaatatcagatctagcgtttaagagtaactttaaattgacggccaagagacaagatatgattaatggtatagtcacctggttcgacattgttttccctgcaccaaagggtaagagacctgttgagttctccactggtcctcatgctccatacactcactggaagcaaacaatattttatttccctgatgatctagatgctgaaactggtgacaccattgaaggtgaattggtttgctctccaaacgagaagaataacagagatctaaatatcaaaatttcttacaagttcgaatcgaatggcatcgacggtaattcaagaagcagaaaaaacgaaggttcttatttaatgcattaa

SEQ ID NO: 466 - DNA, 1047 bp, Artificial Sequence
  Description of Artificial Sequence: Synthetic polynucleotide
atgagcaagacagccgtgaaagattctgctacagaaaaaaccaagttgagtgaaagcgaacagcactacttcaattcttacgatcactatggtattcacgaagagatgcttcaagatactgttcgtaccttatcttacagaaacgcaattatccaaaataaggatctttttaaggacaagattgttttagacgtcggttgcggtaccggtattttatccatgtttgccgctaaacacggtgcgaagcatgttatcggtgttgatatgtctagcattattgagatggcgaaggaattggtagagttgaacggattcagcgacaagatcaccttgttaagaggcaagttggaggacgttcatttaccctttcctaaagttgacatcataatttctgaatggatgggttactttttattgtacgagtccatgatggacaccgttctttacgctagagaccactatttggtagaaggcggtttgatctttcccgacaagtgctccattcatttggccggtttggaagactctcagtataaagacgagaagttgaactactggcaagacgtttacgggtttgattattctccatttgttccgttggtcttacacgagcccatcgtcgacaccgtggaaagaaacaatgtcaacaccaccagtgacaaattgatcgaatttgatttaaatacagtaaaaatatctgatttggcgtttaagagtaactttaaattgacggccaagagacaagatatgattaatggtatagtcacctggttcgacattgttttccctgcaccaaagggtaagagacctgttgagttctccactggtcctcatgctccatacactcactggaagcaaacaatattttatttccctgatgatttggatgctgaaactggtgacaccattgaaggtgaattggtttgctctccaaacgagaagaataacagagatttgaatatcaaaatttcttacaagttcgaaagtaatggcatcgacggtaattctagaagcagaaaaaacgaaggttcttatttaatgcattga

SEQ ID NO: 467 - DNA, 687 bp, Saccharomyces cerevisiae
atgactaaacaagctgaggagacccaaaagccaatcatatttgctcctgagacgtatcaatatgataaatttactttgaatgaaaaacaacttactgacgacccaatcgatcttttcaccaaatggttcaacgaagccaaggaagacccaagggaaacgttgccagaagcaattactttttcatccgcggaactacctagtgggagggtgtcgtccaggattcttctttttaaggagctcgaccatagaggttttactatttattctaactggggaacctctagaaaggctcatgatattgctaccaacccgaatgcggcaatcgtattcttttggaaggatctgcaaaggcaggtgagagttgaaggtatcacagagcatgttaacagagaaacttctgaaagatactttaagacgagacctcgtggatccaagatcggtgcatgggcttcccgccaatcggatgttatcaagaacagagaagaactagacgagttgacccaaaaaaacaccgaacgtttcaaggatgctgaagacatcccatgtccagattattggggtggcttgagaatcgttccactggaaattgagttctggcaaggtagaccctcgagattgcatgatagattcgtttacagaagaaaaacagaaaacgatccatggaaagtcgttagactagccccatga

SEQ ID NO: 468 - DNA, 687 bp, Artificial Sequence
  Description of Artificial Sequence: Synthetic polynucleotide
atgactaaacaagctgaggagacccaaaagccaatcatatttgctcctgagacgtatcaatatgataaatttactttgaatgaaaaacaacttactgacgacccaatcgatcttttcaccaaatggttcaacgaagccaaggaagacccaagggaaacgttgccagaagcaattactttttcttccgcggaattacctagtgggagggtgtcttccaggattcttctttttaaggagctcgaccatagaggttttactatttattctaactggggaacctctagaaaggctcatgatattgctaccaacccgaatgcggcaatcgtattcttttggaaggatttgcaaaggcaggtgagagttgaaggtatcacagagcatgttaacagagaaacttctgaaagatactttaagacgagacctcgtggatccaagatcggtgcatgggcttcccgccaatctgatgttatcaagaacagagaagaattagacgagttgacccaaaaaaacaccgaacgtttcaaggatgctgaagacatcccatgtccagattattggggtggcttgagaatcgttccattggaaattgagttctggcaaggtagacccagtagattgcatgatagattcgtttacagaagaaaaacagaaaacgatccatggaaagtcgttagattggccccatga

SEQ ID NO: 469 - DNA, 1233 bp, Saccharomyces cerevisiae
atgtctaccacactactttggttttcaagtgtaataggctacgtgattcaaacaaaatgtttgtctaacatacaatctaaaaaggaaatctccgtggggcccaatggtacaattgcaacgcctgaaactaacggcgacaacggaaactcaagttcattaaccttctatctgacctttatgtattttgcttcgtggctgctcttggtgcctgcatctcgactttgggagaagatgagaccgatgtttgtctctgactcagactcgaacaggaattctcagtttgacaacaacaacagcgggtctgtgacaaacgaagatgtcgatacgttctcgcacgtgttggatgatcctcaaccacggattccagcccaacagcagaagcaaaaaatcatatccgtggctaccttcaaatatgtggctaagctaacagtgctggctctcataatgattgtcgctgatttgacttataacatggctttgtcattgtcaccggcatttgatgttgctttgatgcaaaatactgccattttcgaaattgtcactttactatatggtgtttgtggaatctccaggaagaactacgttttccgtaatttcctcatcatgatgaacgcggtcattggaattttgatcatctcatacacgaaggctacctgtgacatgcttgccggaaagctgtccgtcaaccctaacacgggtgaactttctgacccattcttgtttgataggttgaaaggtgctctgatttgcggccttggtgctttgattatgggtccttttgccgtgttatggaaccgttggttttgcagtaacatttccaagaacgaaaattctgctgtagtcttggttaagcagagcacccacatggccctaatcggtattattggcatggtaatacttttgccatttattcctaaatttccctcccgtgagtctgtggaatccatttcgttgttctataatgacaagagcttttggttctctctactaggctcgattatctttggttccttgccgagcttgatttcgatattagagttgaatcgcaaggcccctgctgagtatttgacgacgtgcaacctgggagctattatctttatggggttagctgagtgggtttgcgaacctacgcaaaccacaattgtgagatgggaagtcataggatacataatgctaacggtaagtttgttggtcctatcagtaacactcggggaaggtaaataccaccattag

SEQ ID NO: 470 - DNA, 1233 bp, Artificial Sequence
  Description of Artificial Sequence: Synthetic polynucleotide
atgtctaccacattgctttggttttctagtgtaataggctacgtgattcaaacaaaatgtttgtctaacatacaatctaaaaaggaaatctccgtggggcccaatggtacaattgcaacgcctgaaactaacggcgacaacggaaacagtagttctttaaccttctatttgacctttatgtattttgcttcttggttgctcttggtgcctgcatctaggctttgggagaagatgagaccgatgtttgtctctgacagtgactccaacaggaattctcagtttgacaacaacaacagcgggtctgtgacaaacgaagatgtcgatacgttctctcacgtgttggatgatcctcaaccaagaattccagcccaacagcagaagcaaaaaatcatatccgtggctaccttcaaatatgtggctaagttaacagtgttggctctcataatgattgtcgctgatttgacttataacatggctttgtctttgtctccggcatttgatgttgctttgatgcaaaatactgccattttcgaaattgtcactttattatatggtgtttgtggaatctccaggaagaactacgttttccgtaatttcctcatcatgatgaacgcggtcattggaattttgatcatctcctacacgaaggctacctgtgacatgcttgccggaaagttatccgtcaaccctaacacgggtgaactttctgacccattcttgtttgataggttgaaaggtgctttgatttgcggccttggtgctttgattatgggtccttttgccgtgttatggaaccgttggttttgcagtaacatttccaagaacgaaaattctgctgtagtcttggttaagcagagcacccacatggccttgatcggtattattggcatggtaatacttttgccatttattcctaaatttccctcccgtgagtctgtggaatccatttctttgttctataatgacaagagcttttggttctctttattaggctccattatctttggttccttgccgagcttgatttctatattagagttgaatcgcaaggcccctgctgagtatttgacgacgtgcaacttgggagctattatctttatggggttagctgagtgggtttgcgaacctacgcaaaccacaattgtgagatgggaagtcataggatacataatgcttacggtaagtttgttggtcctttctgtaacactcggggaaggtaaataccaccattga

SEQ ID NO: 471 - DNA, 888 bp, Saccharomyces cerevisiae
atgctgaagttgtcaagaagtgccaatctaagattggtccaattgccagccgcaagattaagtggcaatggcgctaaattgctcactcaaaggggattctttactgtaacgcgcttatggcagtcaaatggcaagaaaccattaagcagagtacctgtgggcggtactcccattaaggataacggcaaagtgcgagaaggctcgatcgagttttccacgggaaaggccattgctctattcctagcagtcggtggggcactttcttatttcttcaacagggagaaacgcagattggaaacacagaaggaggctgaagcaaacagaggatacggtaaaccttcacttgggggacccttccatctggaggatatgtatggcaatgagtttacggagaaaaaccttctcggtaagttttctataatatactttgggtttagtaactgtcctgacatctgtcctgatgaactggataagctaggtctatggcttaatacactctcttcaaagtatggtattactctgcagccattatttataacttgtgatccagcaagagactcccctgctgtattgaaagagtatttgagcgactttcatccctccatcctgggtttgacggggacgttcgatgaggtgaagaacgcatgcaagaagtacagagtatacttttctacgcctccaaacgtcaaaccgggccaagattatttggtagaccattccatcttcttttatctcatggaccctgaaggacagtttgttgatgctttgggtagaaattatgatgaaaaaacgggcgtggacaagatcgtggaacacgttaagagttatgtgcctgcagagcagcgcgccaagcagaaggaggcatggtactccttcttattcaaataa

SEQ ID NO: 472 - DNA, 888 bp, Artificial Sequence
  Description of Artificial Sequence: Synthetic polynucleotide
atgttgaagttgtccagaagtgccaatttaagattggtccaattgccagccgcaagattaagtggcaatggcgctaaattgctcactcaaaggggattctttactgtaacgcgcttatggcagtctaatggcaagaaaccattaagcagagtacctgtgggcggtactcccattaaggataacggcaaagtgagagaaggctccatcgagttttccacgggaaaggccattgctttattcttggcagtcggtggggcactttcttatttcttcaacagggagaaacgcagattggaaacacagaaggaggctgaagcaaacagaggatacggtaaaccttctcttgggggacccttccatttagaggatatgtatggcaatgagtttacggagaaaaaccttctcggtaagttttctataatatactttgggtttagtaactgtcctgacatctgtcctgatgaattagataagttgggtttatggcttaatacactctcttccaagtatggtattactttacagccattatttataacttgtgatccagcaagagactcccctgctgtattgaaagagtatttgagcgactttcatccctccatcttgggtttgacggggacgttcgatgaggtgaagaacgcatgcaagaagtacagagtatacttttctacgcctccaaacgtcaaaccgggccaagattatttggtagaccattccatcttcttttatctcatggaccctgaaggacagtttgttgatgctttgggtagaaattatgatgaaaaaacgggcgtggacaagatcgtggaacacgttaagagttatgtgcctgcagagcagcgcgccaagcagaaggaggcatggtactccttcttattcaaatga

SEQ ID NO: 473 - DNA, 2892 bp, Saccharomyces cerevisiae
atgacgagaaacccgtttatggtggaaccttcgaatggctctcctaatagacgtggtgcttcaaacctctccaaattttacgcaaacgctaacagcaactctcggtgggctaatcccagtgaggagagtttggaggatagctatgaccaatctaacgttttccaaggccttccggcatctccttcgagagctgcactaagatactccccagaccgtcgccatagaactcaattttaccgcgatagtgcccataactctccagttgctccgaacaggtatgctgctaatctacaagagtctcccaaaagagcaggcgaggctgtcatacatctaagtgaggggagtaacctttacccccgcgataatgcagatctaccggtagacccctaccatctatcaccccagcaacagcccagtaacaatctgtttggaagtggcagattgtattctcaaagctcgaaatacacgatgtctactacttccacaacggctccctctctggcagaagcagacgatgaaaaggaaaaatacctcacttcgactacttcctatgatgatcagtctacaattttctctgcagacactttcaatgaaacaaaatttgaactgaaccatccaacaagacagcagtatgtaagacgtgccaattctgagagtaagagaagaatggtctcagacttgcctcccccaagcaagaagaaggcactattgaaactagacaacccgataccaaaaggtctgttggatactttgcctcgtaggaactcccctgagtttacggaaatgagatatacagcctgcactgtggaacctgacgattttttgagagaaggttacactttgagattcgcagagatgaacagagaatgtcaaattgccatttgtattaccatgtacaatgaagataaatattcattggcaagaaccatccactccattatgaagaatgttgctcatctttgtaagcgtgaaaaatctcatgtttggggccccaatggctggaagaaagtctctgtaattctgattagtgacggtagagcaaaagtcaaccaagggtctctcgactatttagctgctttgggtgtttatcaagaagatatggccaaggcgtctgtgaatggtgatccggtaaaagcgcacatttttgaattgacaactcaggtctctatcaacgccgatctggattatgtttcaaaggacattgttcctgtgcaattggttttttgtctaaaagaagaaaataagaaaaagatcaattcccatcgttggctattcaacgcgttttgtcccgttttgcaacctactgtagttactttggttgatgtcggtacacgtttaaacaatacagcaatttacaggttatggaaggtttttgatatggattcaaatgtggctggtgcggctggtcagattaagactatgaaggggaagtggggactgaaacttttcaatccattagttgcatcgcaaaattttgaatataagatctcgaatattttagataaaccattagaaagtgtttttggttatatctctgttcttcctggtgccctgtccgcatataggtatagagccttaaaaaatcatgaagatggcactggccctctcagatcgtatttccttggtgaaactcaagaaggcagagaccatgatgttttcactgcaaatatgtacttggctgaagatagaattctttgttgggaattggtcgccaagcgagatgcaaaatgggttctaaaatatgttaaggaagccactggtgaaacggatgttcccgaagacgtttctgaatttatttctcaaagaagacgttggttaaatggtgcaatgtttgccgcaatttatgctcaattgcatttctaccaaatttggaaaactaaacattctgttgtacgcaagttctttcttcatgttgaattcctttatcaatttattcagatgcttttttcctggttttctattgcaaatttcgttcttaccttttattatttagcaggatcaatgaatttagttattaaacatggtgaggccttattcattttttttaaatacctgatcttttgtgacttggcaagtttattcattatttccatgggtaatagaccccagggcgcgaaacatttattcattacctccatggttatactgtctatatgtgccacatattctctaatttgtgggtttgtttttgctttcaagtcgttagcttctggaacggaatcccacaaaatatttgtcgacatcgttatctcattgctctccacctatggcctatactttttctcatcactgatgtacctagatccttggcacatgtttacatcatccatacaatactttttgacacttcccgcctttacgtgtactttacagatttttgccttctgtaatacacacgacgtttcctggggtactaaaggttccacacaggagtccaagcaattgtccaaggccattgtcgttcaaggtccagatgggaaacagattgtggaaacagattggcctcaggaagttgataagaagtttttggaaataaaaagtcgtttgaaagaaccagaatttgaagaatcaagcggcaatgaaaaacaatccaagaatgattattatagagatataagaaccagaattgtgatgatttggatgctatcaaatctaatactgatcatgtctataattcaagtctttacaccacaagatactgacaatggttatttgatattcattttatggtctgtggccgctttagctgcctttagggtggttggttccatggcctttttgttcatgaaatacttgcgtataatagtgagttacagaaataaagttgaaggtagcggctcatgggaagtctctaaattagacttaccaaatgttttccacaaaaagggctaa

SEQ ID NO: 474 - DNA, 2892 bp, Artificial Sequence
  Description of Artificial Sequence: Synthetic polynucleotide
atgacgagaaacccgtttatggtggaaccttccaatggctctcctaatagacgtggtgcttctaacctctccaaattttacgcaaacgctaacagcaactctcgttgggctaatcccagtgaggagagtttggaggatagctatgaccaatctaacgttttccaaggccttccggcatctccttccagagctgcattgagatactccccagaccgtcgccatagaactcaattttaccgcgatagtgcccataactctccagttgctccgaacaggtatgctgctaatttacaagagtctcccaaaagagcaggcgaggctgtcatacatttgagtgaggggagtaacctttacccccgcgataatgcagatttaccggtagacccctaccatttatctccccagcaacagcccagtaacaatttatttggaagtggcagattgtattctcaaagcagtaaatacacgatgtctactacttccacaacggctccctctttggcagaagcagacgatgaaaaggaaaaatacctcacttctactacttcctatgatgatcagtctacaattttctctgcagacactttcaatgaaacaaaatttgaattgaaccatccaacaagacagcagtatgtaagacgtgccaattctgagagtaagagaagaatggtctctgacttgcctcccccaagcaagaagaaggcattattgaaattagacaacccgataccaaaaggtttattggatactttgcctcgtaggaactcccctgagtttacggaaatgagatatacagcctgcactgtggaacctgacgattttttgagagaaggttacactttgagattcgcagagatgaacagagaatgtcaaattgccatttgtattaccatgtacaatgaagataaatattctttggcaagaaccatccactccattatgaagaatgttgctcatctttgtaagcgtgaaaaatctcatgtttggggccccaatggctggaagaaagtctctgtaattttaattagtgacggtagagcaaaagtcaaccaagggtctctcgactatttagctgctttgggtgtttatcaagaagatatggccaaggcgtctgtgaatggtgatccggtaaaagcgcacatttttgaattgacaactcaggtctctatcaacgccgatttggattatgtttccaaggacattgttcctgtgcaattggttttttgtttgaaagaagaaaataagaaaaagatcaattcccatcgttggcttttcaacgcgttttgtcccgttttgcaacctactgtagttactttggttgatgtcggtacacgtttaaacaatacagcaatttacaggttatggaaggtttttgatatggattctaatgtggctggtgcggctggtcagattaagactatgaaggggaagtggggattgaaacttttcaatccattagttgcatctcaaaattttgaatataagatctctaatattttagataaaccattagaaagtgtttttggttatatctctgttcttcctggtgccctttccgcatataggtatagagccttaaaaaatcatgaagatggcactggccctctcagatcttatttccttggtgaaactcaagaaggcagagaccatgatgttttcactgcaaatatgtacttggctgaagatagaattctttgttgggaattggtcgccaagagagatgcaaaatgggttttgaaatatgttaaggaagccactggtgaaacggatgttcccgaagacgtttctgaatttatttctcaaagaagacgttggttaaatggtgcaatgtttgccgcaatttatgctcaattgcatttctaccaaatttggaaaactaaacattctgttgtacgcaagttctttcttcatgttgaattcctttatcaatttattcagatgcttttttcctggttttctattgcaaatttcgttcttaccttttattatttagcaggatccatgaatttagttattaaacatggtgaggccttattcattttttttaaatacttgatcttttgtgacttggcaagtttattcattatttccatgggtaatagaccccagggcgcgaaacatttattcattacctccatggttatattatctatatgtgccacatattctttgatttgtgggtttgtttttgctttcaagtctttagcttctggaacggaatcccacaaaatatttgtcgacatcgttatctctttgctctccacctatggcctttactttttctcttctttgatgtacttggatccttggcacatgtttacatcttccatacaatactttttgacacttcccgcctttacgtgtactttacagatttttgccttctgtaatacacacgacgtttcctggggtactaaaggttccacacaggagtccaagcaattgtccaaggccattgtcgttcaaggtccagatgggaaacagattgtggaaacagattggcctcaggaagttgataagaagtttttggaaataaaaagtcgtttgaaagaaccagaatttgaagaaagtagcggcaatgaaaaacaatccaagaatgattattatagagatataagaaccagaattgtgatgatttggatgctttctaatttgatattgatcatgtctataattcaagtctttacaccacaagatactgacaatggttatttgatattcattttatggtctgtggccgctttagctgcctttagggtggttggttccatggcctttttgttcatgaaatacttgcgtataatagtgagttacagaaataaagttgaaggtagcggctcctgggaagtctctaaattagacttaccaaatgttttccacaaaaagggctga

SEQ ID NO: 475 - DNA, 936 bp, Saccharomyces cerevisiae
atgttgtcaagaattgtatcaaacaatgcaacacgctccgtaatgtgccaccaagcgcaagtgggtattctttataagactaacccagtgagaacttatgctactttgaaagaagtggaaatgcgtttgaaatctatcaaaaatattgagaagatcacaaaaactatgaagattgttgcatctacaagattgagtaaagctgaaaaggctaaaatttccgcaaagaagatggatgaagcagagcagttgttttacaagaacgccgaaaccaaaaatttggatgttgaggctactgaaacaggtgctcctaaagagttgattgttgctatcacctctgataaggggttgtgtggttctatccactctcaattggctaaagctgtgagaagacatttgaatgatcaaccaaacgccgatatagtcactattggtgataaaattaaaatgcagctattgagaacccatcctaacaacattaaattgtctattaatggaattggtaaagatgccccaactttccaagaatctgctttgattgccgataagttattgagtgtcatgaaggccggcacttacccaaagatttccattttctacaatgacccagtgtcttccctatcttttgaaccatctgaaaaaccgatctttaacgccaagaccattgaacaatccccatcattcggcaaatttgagatcgacacggacgcaaacgttccaagagatttgtttgaatatactttggctaaccaaatgttgacagcaatggctcaaggttatgctgctgaaatttccgccagaagaaacgctatggataacgcttccaagaatgccggtgatatgatcaatcgttactctatcttgtacaacagaacaagacaagctgtcattactaatgaactggttgatattattactggtgcttcctctttgggatga

SEQ ID NO: 476 - DNA, 936 bp, Artificial Sequence
  Description of Artificial Sequence: Synthetic polynucleotide
atgttgtccagaattgtatccaacaatgcaacacgctccgtaatgtgccaccaagcgcaagtgggtattctttataagactaacccagtgagaacttatgctactttgaaagaagtggaaatgcgtttgaaatctatcaaaaatattgagaagatcacaaaaactatgaagattgttgcatctacaagattgagtaaagctgaaaaggctaaaatttccgcaaagaagatggatgaagcagagcagttgttttacaagaacgccgaaaccaaaaatttggatgttgaggctactgaaacaggtgctcctaaagagttgattgttgctatcacctctgataaggggttgtgtggttctatccactctcaattggctaaagctgtgagaagacatttgaatgatcaaccaaacgccgatatagtcactattggtgataaaattaaaatgcagttattgagaacccatcctaacaacattaaattgtctattaatggaattggtaaagatgccccaactttccaagaatctgctttgattgccgataagttattgagtgtcatgaaggccggcacttacccaaagatttccattttctacaatgacccagtgtcttccttatcttttgaaccatctgaaaaaccgatctttaacgccaagaccattgaacaatccccatctttcggcaaatttgagatcgacacggacgcaaacgttccaagagatttgtttgaatatactttggctaaccaaatgttgacagcaatggctcaaggttatgctgctgaaatttccgccagaagaaacgctatggataacgcttccaagaatgccggtgatatgatcaatcgttactctatcttgtacaacagaacaagacaagctgtcattactaatgaattggttgatattattactggtgcttcctctttgggatga

SEQ ID NO: 477 - DNA, 897 bp, Saccharomyces cerevisiae
atggtcgcaatctcaatgatttggttttttaccaagcgtatgcccagaatatttgcattagcttttaatttaatttcaatatttcttttgatttttcttctcatcggctgttacaacccgtcaaatcagtcaacatttctagtgaagtataaatttgatgacaactcacctttttatacgatcatagagaaatcatatgaaaaatcaaatacaactctgggcttggaggaagtcattataagatccggttacatgggtgtttgtattgataacattccctcccaatatagctcttacaataatatgactacattctccaattcaatttgctatgcaagaaagaatttaagctcggttcccttatacagagacttggaaattcaactctcaaatattgcatcttccagctccaaaacccaatcaagcgttgtcttgaacattttgaagttagcccaattaacttcggttaatgttatacatccatatgtcttgatggcaactgtaatcctaacaatcctaatgtttctatttattctgtatgtaactgtccctaagttaccattcaaactagcggttaataaatttctactgttgctaagttcaactatagttttgacatggggtattggtgcgatgtggactcatgtagggataaatgcaagttacagattggttccatcatcaagtatgaatataatcactgtcaagaagggcaagaaggcagcagtaatggcttggtttagctttgcattcctccttttagacagtgtggttttatggttaatatttttaagggataggaaaagcttgaaagatgaaattgataatgttccatgtgcccaaaataggtacaataactactcttcggattcatctacattgcattccaaagtttag

SEQ ID NO: 478 - DNA, 897 bp, Artificial Sequence
  Description of Artificial Sequence: Synthetic polynucleotide
atggtcgcaatctctatgatttggttttttaccaagcgtatgcccagaatatttgcattagcttttaatttaatttctatatttcttttgatttttcttctcatcggctgttacaacccgtccaatcagagtacatttttagtgaagtataaatttgatgacaactctcctttttatacgatcatagagaaaagttatgaaaaatctaatacaactttgggcttggaggaagtcattataagatccggttacatgggtgtttgtattgataacattccctcccaatatagctcttacaataatatgactacattctccaattctatttgctatgcaagaaagaatttaagctctgttcccttatacagagacttggaaattcaactctctaatattgcatcttccagctccaaaacccaaagcagcgttgtcttgaacattttgaagttagcccaattaacttctgttaatgttatacatccatatgtcttgatggcaactgtaatcttaacaatcttgatgtttttgtttattctttatgtaactgtccctaagttaccattcaaattagcggttaataaatttttattattgttaagttctactatagttttgacatggggtattggtgcgatgtggactcatgtagggataaatgcaagttacagattggttccatcttccagtatgaatataatcactgtcaagaagggcaagaaggcagcagtaatggcttggtttagctttgcattcctccttttagacagtgtggttttatggttaatatttttaagggataggaaaagcttgaaagatgaaattgataatgttccatgtgcccaaaataggtacaataactactcttctgattcttctacattgcattccaaagtttga

SEQ ID NO: 479 - DNA, 2010 bp, Saccharomyces cerevisiae
atgtctcccatacaggttgttgtctttgccttgtcaaggattttcctgctattattcagacttatcaagctaattataacccctatccagaaatcactgggttatctatttggtaattattttgatgaattagaccgtaaatatagatacaaggaggattggtatattattccttactttttgaaaagcgtgttttgttatatcattgatgtgagaagacataggtttcaaaactggtacttatttattaaacaggtccaacaaaatggtgaccatttagcgattagttacacccgtcccatggccgaaaagggagaatttcaactcgaaacctttacgtatattgaaacttataacatagtgttgagattgtctcatattttgcattttgattataacgttcaggccggtgactacgtggcaatcgattgtactaataaacctcttttcgtatttttatggctttctttgtggaacattggggctattccagcttttttaaactataatactaaaggcactccgctggttcactccctaaagatttccaatattacgcaggtatttattgaccctgatgccagtaatccgatcagagaatcggaagaagaaatcaaaaacgcacttcctgatgttaaattaaactatcttgaagaacaagacttaatgcatgaacttttaaattcgcaatcaccggaattcttacaacaagacaacgttaggacaccactaggcttgaccgattttaaaccctctatgttaatttatacatctggaaccactggtttgcctaaatccgctattatgtcttggagaaaatcctccgtaggttgtcaagtttttggtcatgttttacatatgactaatgaaagcactgtgttcacagccatgccattgttccattcaactgctgccttattaggtgcgtgcgccattctatctcacggtggttgccttgcgttatcgcataaattttctgccagtacattttggaagcaagtttatttaacaggagccacgcacatccaatatgtcggagaagtctgtagatacctgttacatacgccaatttctaagtatgaaaagatgcataaggtgaaggttgcttatggtaacgggctgagacctgacatctggcaggacttcaggaagaggttcaacatagaagttattggtgaattctatgccgcaactgaagctccttttgctacaactaccttccagaaaggtgactttggaattggcgcatgtaggaactatggtactataattcaatggtttttgtcattccaacaaacattggtaaggatggacccaaatgacgattccgttatatatagaaattccaagggtttctgcgaagtggcccctgttggcgaaccaggagaaatgttaatgagaatctttttccctaaaaaaccagaaacatcttttcaaggttatcttggtaatgccaaggaaacaaagtccaaagttgtgagggatgtcttcagacgtggcgatgcttggtatagatgtggagatttattaaaagcggacgaatatggattatggtatttccttgatagaatgggtgatactttcagatggaaatctgaaaatgtttccactactgaagtagaagatcagttgacggccagtaacaaagaacaatatgcacaagttctagttgttggtattaaagtacctaaatatgaaggtagagctggttttgcagttattaaactaactgacaactctcttgacatcactgcaaagaccaaattattaaatgattccttgagccggttaaatctaccgtcttatgctatgcccctatttgttaaatttgttgatgaaattaaaatgacagataatcataaaattttgaagaaggtttatagagagcaaaaattaccaaagggtttggatggaaatgacactattttttggctcaagaattacaagcgctatgaagtcttgaccgctgctgattgggaagccatcgatgcacaaacaattaaattatga

SEQ ID NO: 480 - DNA, 2010 bp, Artificial Sequence
  Description of Artificial Sequence: Synthetic polynucleotide
atgtctcccatacaggttgttgtctttgccttgagtaggattttcttattattattcagacttatcaagttgattataacccctatccagaaatctttgggttatttatttggtaattattttgatgaattagaccgtaaatatagatacaaggaggattggtatattattccttactttttgaaaagcgtgttttgttatatcattgatgtgagaagacataggtttcaaaactggtacttatttattaaacaggtccaacaaaatggtgaccatttagcgattagttacacccgtcccatggccgaaaagggagaatttcaactcgaaacctttacgtatattgaaacttataacatagtgttgagattgtctcatattttgcattttgattataacgttcaggccggtgactacgtggcaatcgattgtactaataaacctcttttcgtatttttatggctttctttgtggaacattggggctattccagcttttttaaactataatactaaaggcactccgttggttcactccttgaagatttccaatattacgcaggtatttattgaccctgatgccagtaatccgatcagagaaagtgaagaagaaatcaaaaacgcacttcctgatgttaaattaaactatcttgaagaacaagacttaatgcatgaacttttaaattctcaatctccggaattcttacaacaagacaacgttaggacaccattaggcttgaccgattttaaaccctctatgttaatttatacatctggaaccactggtttgcctaaatccgctattatgtcttggagaaaatcctccgtaggttgtcaagtttttggtcatgttttacatatgactaatgaaagcactgtgttcacagccatgccattgttccattctactgctgccttattaggtgcgtgcgccattttatctcacggtggttgccttgcgttatctcataaattttctgccagtacattttggaagcaagtttatttaacaggagccacgcacatccaatatgtcggagaagtctgtagatacttattacatacgccaatttctaagtatgaaaagatgcataaggtgaaggttgcttatggtaacgggttgagacctgacatctggcaggacttcaggaagaggttcaacatagaagttattggtgaattctatgccgcaactgaagctccttttgctacaactaccttccagaaaggtgactttggaattggcgcatgtaggaactatggtactataattcaatggtttttgagtttccaacaaacattggtaaggatggacccaaatgacgattccgttatatatagaaattccaagggtttctgcgaagtggcccctgttggcgaaccaggagaaatgttaatgagaatctttttccctaaaaaaccagaaacatcttttcaaggttatcttggtaatgccaaggaaacaaagtccaaagttgtgagggatgtcttcagacgtggcgatgcttggtatagatgtggagatttattaaaagcggacgaatatggattatggtatttccttgatagaatgggtgatactttcagatggaaatctgaaaatgtttccactactgaagtagaagatcagttgacggccagtaacaaagaacaatatgcacaagttttggttgttggtattaaagtacctaaatatgaaggtagagctggttttgcagttattaaattaactgacaactctcttgacatcactgcaaagaccaaattattaaatgattccttgagcagattaaatttaccgtcttatgctatgcccttatttgttaaatttgttgatgaaattaaaatgacagataatcataaaattttgaagaaggtttatagagagcaaaaattaccaaagggtttggatggaaatgacactattttttggctcaagaattacaagcgctatgaagtcttgaccgctgctgattgggaagccatcgatgcacaaacaattaaattatga

SEQ ID NO: 481 - DNA, 1194 bp, Saccharomyces cerevisiae
atgctgcatcaaaaaatagctcataaagttcgaaaagtcgtcgtcccaggtatttccttattgattttcttccagggatgccttattcttttgtttctccaactcacctataagactctttactgtagaaatgatataaggaaacaaattggtctcaataaaaccaaaagattatttattgtcttggtatcatccattttgcatgttgtcgcaccatctgcagtgagaattaccactgaaaattccagtgttcctaaaggtactttttttttagacttgaagaagaaaaggattctttctcatctaaagtccaattcggtggccatttgcaatcaccaaatatacacggattggatatttttatggtggttggcttacacatcgaacttaggggctaatgtcttcattattttaaaaaaatcgttggcttccattcctatcctcggtttcggtatgagaaactataatttcatttttatgagtagaaagtgggcacaagacaaaataaccctaagcaacagccttgctggccttgattcgaatgcaaggggcgccggctcacttgctggaaagtcacctgagcgcataactgaggaaggagagagcatatggaatccggaggttattgatccaaaacaaatccattggccatacaatcttatcctattccctgaaggtacaaatctcagtgctgatactaggcaaaaaagtgctaaatatgctgccaaaataggcaaaaagccattcaagaatgtgctactgcctcattctacaggcctaagatactcgttacaaaagttgaagccaagtattgaaagtctttatgatattacgatcggctactccggtgtaaaacaggaggaatatggtgagcttatatatgggctgaagagcatatttttagaaggaaaatacccgaagttagtcgatattcacatcagagcatttgatgttaaagatattccattagaggacgagaatgaattttcagaatggctgtataaaatttggagtgagaaggatgctctaatggaaaggtactattccactggatcattcgtaagtgatcctgaaacaaaccattcagttaccgatagtttcaagatcaatcgtattgagttaactgaagtgctaatattaccaactctaacaataatttggttagtttataaactttattgttttattttttga

SEQ ID NO: 482 - DNA, 1194 bp, Artificial Sequence
  Description of Artificial Sequence: Synthetic polynucleotide
atgttgcatcaaaaaatagctcataaagttagaaaagtcgtcgtcccaggtatttccttattgattttcttccagggatgccttattcttttgtttctccaactcacctataagactctttactgtagaaatgatataaggaaacaaattggtctcaataaaaccaaaagattatttattgtcttggtatcttccattttgcatgttgtcgcaccatctgcagtgagaattaccactgaaaattccagtgttcctaaaggtactttttttttagacttgaagaagaaaaggattctttctcatttgaagtccaattctgtggccatttgcaatcaccaaatatacacggattggatatttttatggtggttggcttacacaagtaacttaggggctaatgtcttcattattttaaaaaaatctttggcttccattcctatcctcggtttcggtatgagaaactataatttcatttttatgagtagaaagtgggcacaagacaaaataaccttgagcaacagccttgctggccttgattctaatgcaaggggcgccggctctcttgctggaaagtctcctgagcgcataactgaggaaggagagagcatatggaatccggaggttattgatccaaaacaaatccattggccatacaatcttatcttattccctgaaggtacaaatctcagtgctgatactaggcaaaaaagtgctaaatatgctgccaaaataggcaaaaagccattcaagaatgtgttgttacctcattctacaggcttaagatactctttacaaaagttgaagccaagtattgaaagtctttatgatattacgatcggctactccggtgtaaaacaggaggaatatggtgagcttatatatgggttgaagagcatatttttagaaggaaaatacccgaagttagtcgatattcacatcagagcatttgatgttaaagatattccattagaggacgagaatgaattttctgaatggttatataaaatttggagtgagaaggatgctttgatggaaaggtactattccactggaagtttcgtaagtgatcctgaaacaaaccattctgttaccgatagtttcaagatcaatcgtattgagttaactgaagtgttgatattaccaactttgacaataatttggttagtttataaactttattgttttattttttga

SEQ ID NO: 483 - DNA, 2070 bp, Saccharomyces cerevisiae
atgcaagcccaaggttcacaatcgaatgtagggtctttgaggagtaattgctctgacaattcactaccgaacaatcatgttatgatgcactgcgatgaaagcagcggcagcccgcacagcgagcacaacgattatagttacgaaaagaccaatctggaaagtacggcatcaaatagtcgtgaacacagagacaaccagctaagtaggttgaagagtgaggaatacgttgttccaaagaatcaacgtaggggactattgcctcaactcgccattataccggagttcaaggatgccagagattatccaccgatgatgaaaaagatgattgtcttcttgattgcgttttcctccatgatgggccccatgggcacatctatcatttttccagcgatcaactcaatcacaacagaatttaaaacatcagtgattatggtaaacgtttcaattggtgtgtaccttttaagtcttggtgttttcccattgtggtggtcttctctatccgagctagagggcagaagaactacttacataacttcatttgcattattgtttgcatttaatatcgggtctgctctagctcctgatatcaactcatttattgccttgagaatgctctgtggggctgcttctgccagtgttcaaagtgtaggtgctggaacagtggctgatttatatattagcgaagatagaggtaaaaatttgagttattactatttgggtccactactggcgccgctactatctccaatttttggatctttgttagtgaatcgctggccctggagatccactcaatggtttatggttattttatccggatgtaatgtcattcttttgacggtgttactacctgaaacattaagaaaacaagattctaaaggcgctatcgctcaaattttggctgaaagacgtattcaagtagacaataacgaacgtggagagatacaagaagattatcagaggggagaagatgagacagatcgaattgaaaaccaagttgccacattatctactgagaagcataactacgttggagaggtaagggatcaagactcgctagatttagaaagtcactctagccccaatacttatgatggtcgagctggagaaacccaattgcaacggatttatacagaggcgagtagaagtctgtatgaatatcagctagatgatagcggtatcgatgcaacaacagcacaagttacgagaataagatcaacagatccaaagttagcgagatcgattcgagaaaatagtctgagaaaattacaaaccaacctggaagagcaagtcaaaaaagtgctatccagtaatggaggtgaaatcgctcctaaacaggtatcagcggtgaggaaggtctgggacaccttttttgtttattttatcaagcctttaaaatcattgcacttcctagaatatccacccgtggcacttgcaataacattttccgcaatttccttttccacagtatactttgttaatatgacagttgaatataaatattcaaggcctccttacaactttaaaccattatacattggtctactgtatattccgaattctgtaacatactttttcgcctcaatttacggtggacgttgggtggacatgcttttaaaaagatacaaagagaaatatggaattcttgctcctgaagctcgtatatcgtggaatgttgttacatctgtaatatctttccccattgcgctattgatatttggctggtgcctagataaaaaatgccactgggtaacgccactaattggaacagccctctttggatatgcagctatgatgacaattggtgctaccctttcctatttagtcgattcattgccgggaaagggtgccaccggtgttgctttgaataatttaataaggcaaatcttggctgcaaccgcagtctttgtcaccacacccatgttaaacggtatgggaactgggtgggctttcacaatgctggcctttatcgtcttgggtgctagcagtgtacttataatactgaaaaagcacggtgattactggagagagaactacgatttacaaaaattgtacgacaaaattgattaa

SEQ ID NO: 484 - DNA, 2070 bp, Artificial Sequence
  Description of Artificial Sequence: Synthetic polynucleotide
atgcaagcccaaggttctcaaagcaatgtagggtctttgaggagtaattgctctgacaattctttaccgaacaatcatgttatgatgcactgcgatgaaagcagcggcagcccgcacagcgagcacaacgattatagttacgaaaagaccaatttggaaagtacggcatctaatagtcgtgaacacagagacaaccagttgagtaggttgaagagtgaggaatacgttgttccaaagaatcaacgtaggggattattgcctcaactcgccattataccggagttcaaggatgccagagattatccaccgatgatgaaaaagatgattgtcttcttgattgcgttttcctccatgatgggccccatgggcacatctatcatttttccagcgatcaactctatcacaacagaatttaaaacatctgtgattatggtaaacgtttctattggtgtgtaccttttaagtcttggtgttttcccattgtggtggtcttctttatccgagttagagggcagaagaactacttacataacttcttttgcattattgtttgcatttaatatcgggtctgctttggctcctgatatcaactcttttattgccttgagaatgctctgtggggctgcttctgccagtgttcaaagtgtaggtgctggaacagtggctgatttatatattagcgaagatagaggtaaaaatttgagttattactatttgggtccattattggcgccgttgttatctccaatttttggatctttgttagtgaatcgctggccctggagatccactcaatggtttatggttattttatccggatgtaatgtcattcttttgacggtgttattgcctgaaacattaagaaaacaagattctaaaggcgctatcgctcaaattttggctgaaagacgtattcaagtagacaataacgaacgtggagagatacaagaagattatcagaggggagaagatgagacagatagaattgaaaaccaagttgccacattatctactgagaagcataactacgttggagaggtaagggatcaagactctttagatttagaaagtcactctagccccaatacttatgatggtagagctggagaaacccaattgcaaagaatttatacagaggcgagtagaagtctttatgaatatcagttagatgatagcggtatcgatgcaacaacagcacaagttacgagaataagatctacagatccaaagttagcgagatctattagagaaaatagtttgagaaaattacaaaccaacttggaagagcaagtcaaaaaagtgttatccagtaatggaggtgaaatcgctcctaaacaggtatctgcggtgaggaaggtctgggacaccttttttgtttattttatcaagcctttaaaatctttgcacttcttggaatatccacccgtggcacttgcaataacattttccgcaatttccttttccacagtatactttgttaatatgacagttgaatataaatattctaggcctccttacaactttaaaccattatacattggtttattatatattccgaattctgtaacatactttttcgcctctatttacggtggacgttgggtggacatgcttttaaaaagatacaaagagaaatatggaattcttgctcctgaagctcgtatatcttggaatgttgttacatctgtaatatctttccccattgcgttattgatatttggctggtgcttagataaaaaatgccactgggtaacgccattgattggaacagccctctttggatatgcagctatgatgacaattggtgctaccctttcctatttagtcgattctttgccgggaaagggtgccaccggtgttgctttgaataatttaataaggcaaatcttggctgcaaccgcagtctttgtcaccacacccatgttaaacggtatgggaactgggtgggctttcacaatgttggcctttatcgtcttgggtgctagcagtgtacttataatattgaaaaagcacggtgattactggagagagaactacgatttacaaaaattgtacgacaaaattgattga

SEQ ID NO: 485 - DNA, 1719 bp, Saccharomyces cerevisiae
atgctgaggaattgtttgaggaaattgggaaatcatcaaacgaaatgttcggtaaaaacgttacacaccccaatctatagaacaaaaaaccttcaggttctcagagatacgctctctggtattaagctgttggaaaaaataataacttcatcctcctacaataaaacattgatatatgaacctaagtataaatccaagccacaggtcgttagttctcatgataccatgagacttcacaatgtaatgcgtgagttactagattccctacaagtagatgaagctaccaacacacgacttcaatcaaacaggcctcgaaagctggggagggttggtctacaattattcatggattgcattcaggacaacttaacagcaacttcaacatctttgacatgctctttactggagcactatttcaagtatcccgaaaaagaagtgaccaatgggatcaaggccggattacgatatatcagagattttcttgcgaagaacaagattatagtgaaaagtcaaaacgatgttgatgctctggtcgagcaattgactatgtcctcctcagacagccaaagcatcaaaagggttttgaaagccattaattatgaattgttttcggatgacattgtgcgggtcataaacggcaacaaaacttacgatgaggttgatgtatccaagggttggaaatatccagctggtattttagatagtaatgaagcctatttaaggtccctggagttgcctactaagaaattagtttccattgataaagatatgctagttcttatgtatgatgggacgttacgagacgctaataaaattctacccacgataacgtatgcaagaaagttgagaaaatctgttctcttaatcgttaacggagattgcacaggtgatgcattaacatccgttacaattaacaataacagaaacaagagagaaaataatgaaagccgaatagtggttttgaagtactctaaaaaggcgaacaatgacttagcgccacaggagaatcttgattttataaagttcttacggttgccttgcggatatgacagcatctactcaccagaatatagtcctttagtgccaagcaaaatgtgtgcggataaatattacggcagtatcgaatccataaaagcgaccacaggggaggcattcttatataactccattgatgctgaagcgattccaaataaagttccgaaatccttcctccaaaatacggtcactttaagcattggtggacataacgaaatcgaaatcgacagaagaagaaatgcaatagataattgcttaaataacgtcctatgtcatgggctggccaaaggtttcatcccaggttacggcatctccctactgaaggcaattccaggtttgaatgaactgaaagcaaatgaacccaatttcatgactaaggtaggcatcaatgctgttttatcagcagttattctcccatcagaagtggcgtttaagaatgcatatgggtacaactattatgagatcaatagcctgatagcaggcgctataaacgaaaaatcgtttccaatggccaagttttctccaaattcagaaccggtgaacacagtaaaggatggaaacttggagccatggagcaaaatggattcttgtttagccggtgtagaaacgttcattgaattacttacaagctgtaatacaattatcacatgtgtatacaaaaagcctgaacggcacaaagcctag

SEQ ID NO: 486 - DNA, 1719 bp, Artificial Sequence
  Description of Artificial Sequence: Synthetic polynucleotide
atgttaaggaattgtttgaggaaattgggaaatcatcaaacgaaatgttctgtaaaaacgttacacaccccaatctatagaacaaaaaaccttcaggttctcagagatacgctctctggtattaagttgttggaaaaaataataacttcttcctcctacaataaaacattgatatatgaacctaagtataaatccaagccacaggtcgttagttctcatgataccatgagacttcacaatgtaatgcgtgagttattagattccttacaagtagatgaagctaccaacacaagacttcaaagtaacaggcctagaaagttagggagggttggtttacaattattcatggattgcattcaggacaacttaacagcaacttctacatctttgacatgctctttattggagcactatttcaagtatcccgaaaaagaagtgaccaatgggatcaaggccggattaagatatatcagagattttcttgcgaagaacaagattatagtgaaaagtcaaaacgatgttgatgctttggtcgagcaattgactatgtcctccagtgacagccaaagcatcaaaagggttttgaaagccattaattatgaattgttttctgatgacattgtgagagtcataaacggcaacaaaacttacgatgaggttgatgtatccaagggttggaaatatccagctggtattttagatagtaatgaagcctatttaaggtccttggagttgcctactaagaaattagtttccattgataaagatatgcttgttcttatgtatgatgggacgttaagagacgctaataaaattttgcccacgataacgtatgcaagaaagttgagaaaatctgttctcttaatcgttaacggagattgcacaggtgatgcattaacatccgttacaattaacaataacagaaacaagagagaaaataatgaaagcagaatagtggttttgaagtactctaaaaaggcgaacaatgacttagcgccacaggagaatcttgattttataaagttcttaagattgccttgcggatatgacagcatctactctccagaatatagtcctttagtgccaagcaaaatgtgtgcggataaatattacggcagtatcgaatccataaaagcgaccacaggggaggcattcttatataactccattgatgctgaagcgattccaaataaagttccgaaatccttcctccaaaatacggtcactttaagcattggtggacataacgaaatcgaaatcgacagaagaagaaatgcaatagataattgcttaaataacgtcttatgtcatgggttagccaaaggtttcatcccaggttacggcatctccttattgaaggcaattccaggtttgaatgaattgaaagcaaatgaacccaatttcatgactaaggtaggcatcaatgctgttttaagtgcagttattctcccatctgaagtggcgtttaagaatgcatatgggtacaactattatgagatcaatagcttgatagcaggcgctataaacgaaaaaagttttccaatggccaagttttctccaaattctgaaccggtgaacacagtaaaggatggaaacttggagccatggagcaaaatggattcttgtttagccggtgtagaaacgttcattgaattacttacaagctgtaatacaattatcacatgtgtatacaaaaagcctgaaagacacaaagcctga

SEQ ID NO: 487 - DNA, 1920 bp, Saccharomyces cerevisiae
atggaaactattttgcagccaaaggctagaccatttgagtctttgaaaagaaaacgttttagagaatggttgaggccgtcgactgcgcatggatccctgttgcattctgatacattagatttgcgtgactttgcaaaacctaatcccgctgacacattttctaatcttgattctggtcattgtcctttggtcacaactccaataaaatatgagtgcccagatggaaagagttcttttttccgaggagacactaaatttgaaaccctgttcagtaatagaaaattctatgagttcaaagataatttgaaaaggggattgaagaaaatacgtcatgggagaaacggacatcaaagcgaaaagagatgtccagttgttgaagaaacaaaaaagtctgtgtcagataatctggacaaaccagacaataatacgccctgtttcgacagattccacacaaattcgaaagaatttgaaacgcaatttgatcattcaaataggagccaaaattccgagaaggcttatctagacaatgaatcctgttggaacctaagtgagaaatttattccttttaataatttaaaatatgaagatttgaaacattttgaagagaatttgcaaagcttagcgcctgcaacttttactccaattgaatcaaatgaatcgcttgataggtcagattcgacacgtggcacaaaacgaagcattcgcaatgattccagtgatacaacatctgaaaagaggctatgcttaaaacaatactcagatgaacctgaatcggatcattcgatggaaagtacaccatccatttacattaccaaagaagttcaagaaagaattgaagcattaagctccacggattcgtttttaattgaaaaagtagattttccctctaacaaaattggttccagtgcctccgattatgaaagtgataacgaatacagaaatatggatgaggattcaataaacgatgttaccactgagaaagagggaaatgtggtcataccagactctaatactagcacggtggacgcaatggaaaaaccaattgaagtgagctcggccttaaaagatgatacattggataaagacatagatgatgcgagcagtagctattcggatgatgtagagaccacattcgagccagttgaatctgaggaactttccgatttatctgatacaagctcaagtggaagtagtaaaatttatactatccccacatttcgcggccttactaataggaccaatatatcacaaattctttcaaaagttggtaaagctgatttaagccaagataacttaacgcatttgatcaaaagtcatcaaaaaaagaaaagatgcgtgaattttagaaataaaagattctatgatgctttcaatccatatgttgataacgaagaagatgcagagttatctgacagcgaaaacatttcagaaatggatacagatctttgtataaaggatcggagtacctcaagtgttaggtttgatgaaaactcacgtcttttaatctacaaaaaatctaaaaagttaaacaaagatgagactcaaagtggttattcgactactgaaatgaggtcaattctaaagacaaagatgaattcacagcatgatgaggagtctcagagagcttcgaagtgtgacacagtaggtgtagcccaatttttacattattttcaatatacagagtataaaaggcagagaaatgaagcagaaaattatagactgagaggagagcaactaagcaagtactattctgaagaatatcctttggattttgcggctgttgaatgcgaagattccgttaatgataaatctgatatcatacttagtatgagagctacggaaagaaacattggtaggcaactgaaaggtataagtagtcaaggggcacaaattatatcgcttgatgaggatgttttttga

SEQ ID NO: 488 - DNA, 1920 bp, Artificial Sequence
  Description of Artificial Sequence: Synthetic polynucleotide
atggaaactattttgcagccaaaggctagaccatttgagtctttgaaaagaaaacgttttagagaatggttgaggccgtctactgcgcatggatccttattgcattctgatacattagatttgcgtgactttgcaaaacctaatcccgctgacacattttctaatcttgattctggtcattgtcctttggtcacaactccaataaaatatgagtgcccagatggaaagagttcttttttcagaggagacactaaatttgaaacccttttcagtaatagaaaattctatgagttcaaagataatttgaaaaggggattgaagaaaatacgtcatgggagaaacggacatcaaagcgaaaagagatgtccagttgttgaagaaacaaaaaagtctgtgtctgataatttggacaaaccagacaataatacgccctgtttcgacagattccacacaaattctaaagaatttgaaacgcaatttgatcattctaataggagccaaaattccgagaaggcttatttggacaatgaatcctgttggaacttgagtgagaaatttattccttttaataatttaaaatatgaagatttgaaacattttgaagagaatttgcaaagcttagcgcctgcaacttttactccaattgaaagtaatgaatctcttgataggtctgattctacacgtggcacaaaaagaagcattcgcaatgattccagtgatacaacatctgaaaagaggctttgcttaaaacaatactctgatgaacctgaaagtgatcattctatggaaagtacaccatccatttacattaccaaagaagttcaagaaagaattgaagcattaagctccacggattcttttttaattgaaaaagtagattttccctctaacaaaattggttccagtgcctccgattatgaaagtgataacgaatacagaaatatggatgaggattctataaacgatgttaccactgagaaagagggaaatgtggtcataccagactctaatactagcacggtggacgcaatggaaaaaccaattgaagtgagcagtgccttaaaagatgatacattggataaagacatagatgatgcgagcagtagctattctgatgatgtagagaccacattcgagccagttgaatctgaggaactttccgatttatctgatacaagcagtagtggaagtagtaaaatttatactatccccacatttcgcggccttactaataggaccaatatatctcaaattctttctaaagttggtaaagctgatttaagccaagataacttaacgcatttgatcaaaagtcatcaaaaaaagaaaagatgcgtgaattttagaaataaaagattctatgatgctttcaatccatatgttgataacgaagaagatgcagagttatctgacagcgaaaacatttctgaaatggatacagatctttgtataaaggatagaagtacctctagtgttaggtttgatgaaaactctcgtcttttaatctacaaaaaatctaaaaagttaaacaaagatgagactcaaagtggttattctactactgaaatgaggtctattttgaagacaaagatgaattctcagcatgatgaggagtctcagagagcttccaagtgtgacacagtaggtgtagcccaatttttacattattttcaatatacagagtataaaaggcagagaaatgaagcagaaaattatagattgagaggagagcaattgagcaagtactattctgaagaatatcctttggattttgcggctgttgaatgcgaagattccgttaatgataaatctgatatcatacttagtatgagagctacggaaagaaacattggtaggcaattgaaaggtataagtagtcaaggggcacaaattatatctcttgatgaggatgttttttga

SEQ ID NO: 489 - DNA, 1005 bp, Saccharomyces cerevisiae
atgaaatgtactataccagaacagcaaaaagtcattttgattgatgaaattggtggatacgatgtaatcaagtatgaggattatcctgtaccatcgatttcggaggaagagttactaatcaaaaataagtacacgggtgttaattacatcgaaagttactttcggaagggtatttatccctgtgaaaaaccatacgtattgggcagggaagcgtcggggaccgttgtagcaaaaggtaaaggggtaactaattttgaagttggagaccaagttgcttatatatctaactcaacttttgcacagtattcaaaaatttcgtcccaaggcccagtcatgaagctgccaaagggaacgagtgacgaagagttgaaactttatgcggctggtttattacaagttctcactgctttatcatttacaaacgaagcgtatcacgtcaaaaagggcgactatgtattactttttgccgcagcgggtggtgtgggattgattttaaatcagctactcaagatgaaaggtgcacatacgattgcagttgcctcaactgatgaaaagcttaaaatagcgaaggaatacggcgccgaatacttgatcaacgcttcgaaagaggatattttaagacaagttttaaaattcactaatggtaagggcgttgatgctagttttgactcggtcggaaaggatacctttgaaatcagcttagccgcactaaaaagaaaaggtgtattcgtttcctttggtaatgcatctggtcttatcccgccattctctattaccagactttccccaaaaaatattactttggtgagacctcaactttacggctatatcgccgatcctgaagaatggaaatattactctgacgagttttttggtctggttaattcaaagaagttgaacatcaaaatatacaaaacttatccattacgggattatagaactgcagctgctgacatagaaagtagaaaaactgttggtaagctagttcttgaaataccacaatag

SEQ ID NO: 490 - DNA, 1005 bp, Artificial Sequence
  Description of Artificial Sequence: Synthetic polynucleotide
atgaaatgtactataccagaacagcaaaaagtcattttgattgatgaaattggtggatacgatgtaatcaagtatgaggattatcctgtaccatctatttctgaggaagagttattgatcaaaaataagtacacgggtgttaattacatcgaaagttactttagaaagggtatttatccctgtgaaaaaccatacgtattgggcagggaagcgtctgggaccgttgtagcaaaaggtaaaggggtaactaattttgaagttggagaccaagttgcttatatatctaactctacttttgcacagtattctaaaatttcttcccaaggcccagtcatgaagttaccaaagggaacgagtgacgaagagttgaaactttatgcggctggtttattacaagttctcactgctttatcttttacaaacgaagcgtatcacgtcaaaaagggcgactatgtattactttttgccgcagcgggtggtgtgggattgattttaaatcagttgctcaagatgaaaggtgcacatacgattgcagttgcctctactgatgaaaagcttaaaatagcgaaggaatacggcgccgaatacttgatcaacgcttccaaagaggatattttaagacaagttttaaaattcactaatggtaagggcgttgatgctagttttgactctgtcggaaaggatacctttgaaatcagcttagccgcattgaaaagaaaaggtgtattcgtttcctttggtaatgcatctggtcttatcccgccattctctattaccagactttccccaaaaaatattactttggtgagacctcaactttacggctatatcgccgatcctgaagaatggaaatattactctgacgagttttttggtttagttaattctaagaagttgaacatcaaaatatacaaaacttatccattaagagattatagaactgcagctgctgacatagaaagtagaaaaactgttggtaagttggttcttgaaataccacaatga

SEQ ID NO: 491 - DNA, 528 bp, Saccharomyces cerevisiae
atgcttatcaaccacttgagtaagatccgaaccgtaaggcacttttctaatattaaacccgttttatccaaggaagtttcgcgacgagtaattgttgcacctgcatcacacttcaaaacctccagtccaaatgtgaaaagtaacatccctattcatgaatataaacaactaccggaagattctaactacattgaaaagcattataaggaactacaagtatttttgaatgagtttttgattaagaaattaaacaagacctatgcggattttgaaggagatccagacgagttggtatttcaattggaaaaattcattgaactagaagttactccgagatacacaaatcattcagcacctgatggttgtgaagagagattcaaatccatcggagacaggatagtcgttgaccgctatttagattttgtgaaagatgtcagactaacactgctgctaaatggaggacactccttcatatttgatgtcatgctacaagccaaagaagtatttgacaaaatgcagaaagaatga

SEQ ID NO: 492 - DNA, 528 bp, Artificial Sequence
  Description of Artificial Sequence: Synthetic polynucleotide
atgcttatcaaccacttgagtaagatcagaaccgtaaggcacttttctaatattaaacccgttttatccaaggaagtttccaggcgtgtaattgttgcacctgcatctcacttcaaaacctccagtccaaatgtgaaaagtaacatccctattcatgaatataaacaattgccggaagattctaactacattgaaaagcattataaggaattacaagtatttttgaatgagtttttgattaagaaattaaacaagacctatgcggattttgaaggagatccagacgagttggtatttcaattggaaaaattcattgaattggaagttactccgagatacacaaatcattctgcacctgatggttgtgaagagagattcaaatccatcggagacaggatagtcgttgaccgctatttagattttgtgaaagatgtcagattgacattattattgaatggaggacactccttcatatttgatgtcatgttacaagccaaagaagtatttgacaaaatgcagaaagaatga

SEQ ID NO: 493 - DNA, 471 bp, Saccharomyces cerevisiae
atgtccactgaattaactgttcaatctgaaagagctttccaaaagcaacctcacatcttcaacaatccaaaggtcaagacttccaagagaaccaagagatggtataagaatgccggtttgggattcaagaccccaaagaccgctattgaaggttcttacattgataagaaatgtccattcactggtttagtttccatccgtggtaagatcttgaccggtaccgtcgtctccaccaagatgcaccgtaccattgtcatcagaagagcttacttgcattacattccaaagtacaacagatacgaaaagagacacaagaacgtcccagtccacgtctccccagctttccgtgtccaagttggtgacattgttaccgttggtcaatgtagaccaatctccaagactgttagattcaacgtcgtcaaggtctctgctgctgccggtaaggccaacaagcaatttgctaaattttaa

SEQ ID NO: 494 - DNA, 471 bp, Artificial Sequence
  Description of Artificial Sequence: Synthetic polynucleotide
atgtccactgaattaactgttcaatctgaaagagctttccaaaagcaacctcacatcttcaacaatccaaaggtcaagacttccaagagaaccaagagatggtataagaatgccggtttgggattcaagaccccaaagaccgctattgaaggttcttacattgataagaaatgtccattcactggtttagtttccatccgtggtaagatcttgaccggtaccgtcgtctccaccaagatgcaccgtaccattgtcatcagaagagcttacttgcattacattccaaagtacaacagatacgaaaagagacacaagaacgtcccagtccacgtctccccagctttccgtgtccaagttggtgacattgttaccgttggtcaatgtagaccaatctccaagactgttagattcaacgtcgtcaaggtctctgctgctgccggtaaggccaacaagcaatttgctaaattttga

SEQ ID NO: 495 - DNA, 2433 bp, Saccharomyces cerevisiae
atgccttcaggtcataacgataaaaacgcaaatcaagagtctgtggaagaggctgttttgaaatatgtcggtgtaggtctagatcaccagaaccatgaccctcaattgcatacgaaggatctggaaaacaaacactcgaaaaagcagaatattgtggaaagtagtagtgatgttgatgttaataacaatgatgacagtaatagaaacgaggataataatgatgattctgaaaatattagcgcattgaatgcgaacgaatcatcttcgaatgtggatcatgccaactccaatgaacaacataacgcagttatggattggtatttaaggcaaacagcgcataatcaacaagacgacgaagatgacgaaaacaataataacactgacaacggcaatgacagtaataatcacttttctcaatctgacatagtcgtggatgacgacgacgacaagaataagaaagatgcgggtgttggtgtggacgatgatcatcaatctatggcgatggccgccgtcgctgctgcttacactctatcgaaaaataacaataataataacagtattgcgaacgatagcaattcgcgtaaaagacagcatgataacggaaataatcatgagaattcacagaaaaagcggaaaaacaataatgatgacgatgacagacaaattggaaacgtagatccggaattaaccaccttgggtgatgcagatgacaacgatactaataatgatgtgattgatcgtgatcaactggtccataaggccattatcgacgctgattcgattacccaacatcctgatttccagcaatacttgaatactgcggctgatactgacgataacgaaaaattaaagcatattaaagatcatttgatgcgtacacacggtttgaatcatcagaacaagaatcacaatgatgatacagatgatttatcaaatagtacaaagcaatactctgaactgcagaaagactctatgctggatagttccctcaacaaatctagaaattatatggaagtcttgcccaaagttatctctcaagatactcaaccacaccaacaaaaatctccctctcatgataatgaagctggcagcgtggacaattcagaaatatctcaactacttcaatcagccgccacaaaggcatcatctttggtatctttatcctcatcctcagcaacgccatcgacttcaaggtctaacaatagcaaagcttttgataaagccgaagacgccgctttagaaagatttattaacgagtatgaggccattgaacgtttgactagacaacaagtttgtgaaaggatatggagttccgacaggccaaaggacaacttttggaataatatttacaaagtcttaccctatagatctagctcctctatctacaaacacatgagaagaaaatatcacatttttgaacaacgtggtaaatggaccgcggaggaggaacaagagctagctaaattatgtgcagaaaaagaaggtcaatgggcagaaataggtaaaactttaggcagaatgccagaagattgtagggatcgttggagaaactacgtaaaatgtggtaccaatagagcatcaaatagatggtccgttgaagaagaagagcttctgaaaaaggttatcagcgatatgttggaagaagcccagcaacaacagtctcaattgcatccaaacttattggaagaagaacagcatttactgcaagatgaccagaatgatcatcgcaataacgatgaagacgatgatgatacagcttctgcagcagcagctgctgctgctgctattcaagaacaacaacaacttcttcaacaaaagcagcaagatgatgacgatgctattgccgctgctgccgctgctgcttcttcatccctgggagacaacaaagacgaagacaaaccccacgattcattaggtatacagctcgatgataattcccagaactcaatggtacctgctccatcagcaacaagcacacattctaaaagtttgtcaaatacaatcagacgtcacaataataaactgaggaaatctttgatgggtaacggtaagttagatttcaaagacatcattaactggaccattgtcagtgagcgtatgggcggtacgagatcacgtattcaatgtcgttataaatggaataaattggtcaaaagggaagcaattgccaaaattcagactgtaaaagatgatgatatgttatggatttttgaaaaattaagagatttaggtataacagaagattctcaagtagattgggatgaacttgcagctttgaagcctggcatgaaattaaatgggttagagttgaaattgtgctatgaaagaatgaagaaaaaggtcaaaggctataagcaaaaatcaatcaatgaaatcagtaaagagctagttgattattttagctccaatatttcaatgaaaacagaaaattaa

SEQ ID NO: 496 - DNA, 2433 bp, Artificial Sequence
  Description of Artificial Sequence: Synthetic polynucleotide
atgccttctggtcataacgataaaaacgcaaatcaagagtctgtggaagaggctgttttgaaatatgtcggtgtaggtttggatcaccagaaccatgaccctcaattgcatacgaaggatttggaaaacaaacactctaaaaagcagaatattgtggaaagtagtagtgatgttgatgttaataacaatgatgacagtaatagaaacgaggataataatgatgattctgaaaatattagcgcattgaatgcgaacgaaagctcttccaatgtggatcatgccaactccaatgaacaacataacgcagttatggattggtatttaaggcaaacagcgcataatcaacaagacgacgaagatgacgaaaacaataataacactgacaacggcaatgacagtaataatcacttttctcaatctgacatagtcgtggatgacgacgacgacaagaataagaaagatgcgggtgttggtgtggacgatgatcatcaatctatggcgatggccgccgtcgctgctgcttacactttatccaaaaataacaataataataacagtattgcgaacgatagcaattctcgtaaaagacagcatgataacggaaataatcatgagaattctcagaaaaagagaaaaaacaataatgatgacgatgacagacaaattggaaacgtagatccggaattaaccaccttgggtgatgcagatgacaacgatactaataatgatgtgattgatcgtgatcaattggtccataaggccattatcgacgctgattctattacccaacatcctgatttccagcaatacttgaatactgcggctgatactgacgataacgaaaaattaaagcatattaaagatcatttgatgcgtacacacggtttgaatcatcagaacaagaatcacaatgatgatacagatgatttatccaatagtacaaagcaatactctgaattacagaaagactctatgcttgatagttccctcaacaaatctagaaattatatggaagtcttgcccaaagttatctctcaagatactcaaccacaccaacaaaaatctccctctcatgataatgaagctggcagcgtggacaattctgaaatatctcaattacttcaatctgccgccacaaaggcatcttctttggtatctttatcctcctcctctgcaacgccatctacttctaggtctaacaatagcaaagcttttgataaagccgaagacgccgctttagaaagatttattaacgagtatgaggccattgaacgtttgactagacaacaagtttgtgaaaggatatggagttccgacaggccaaaggacaacttttggaataatatttacaaagtcttaccctatagatctagctcctctatctacaaacacatgagaagaaaatatcacatttttgaacaacgtggtaaatggaccgcggaggaggaacaagagttggctaaattatgtgcagaaaaagaaggtcaatgggcagaaataggtaaaactttaggcagaatgccagaagattgtagggatcgttggagaaactacgtaaaatgtggtaccaatagagcatctaatagatggtccgttgaagaagaagagcttttgaaaaaggttatcagcgatatgttggaagaagcccagcaacaacagtctcaattgcatccaaacttattggaagaagaacagcatttattacaagatgaccagaatgatcatcgcaataacgatgaagacgatgatgatacagcttctgcagcagcagctgctgctgctgctattcaagaacaacaacaacttcttcaacaaaagcagcaagatgatgacgatgctattgccgctgctgccgctgctgcttcttcttccttgggagacaacaaagacgaagacaaaccccacgattctttaggtatacagctcgatgataattcccagaactccatggtacctgctccatctgcaacaagcacacattctaaaagtttgagcaatacaatcagacgtcacaataataaattgaggaaatctttgatgggtaacggtaagttagatttcaaagacatcattaactggaccattgtcagtgagcgtatgggcggtacgagatctcgtattcaatgtcgttataaatggaataaattggtcaaaagggaagcaattgccaaaattcagactgtaaaagatgatgatatgttatggatttttgaaaaattaagagatttaggtataacagaagattctcaagtagattgggatgaacttgcagctttgaagcctggcatgaaattaaatgggttagagttgaaattgtgctatgaaagaatgaagaaaaaggtcaaaggctataagcaaaaatctatcaatgaaatcagtaaagagttagttgattattttagctccaatatttccatgaaaacagaaaattga

SEQ ID NO: 497 - DNA, 1017 bp, Saccharomyces cerevisiae
atgactttgagtaattgcgactctttggataacttattccaggaccctccagaggaagaagaaagtagtaaattcgttgaggcggtcagaactttgatgaatagaaacgatatgggatatcctcccgccgctgcaaatggtacgtattgcttaaaaaaaatcaagtctttgaatgccaaacagtggaaaataaacaagaaaagaatgtgcatgttgccagcagtaaagaagaaaaatttcgactttcacgagcaaagaagtttaatcttgaatttaaatttatggaaattcatcaagtttatcaattgtagtagtaaaaacaattacaataaaaataataagcatgtgagaagctcgaacaacactgtaaaaaatgaaaatgttttaccgttacaaaaacacaagaaagtggacaatgatcaaagattggagaaccttttttggagaagctggtttaaggcacgcaaaaggagagatataatgggcaagccacgagagaggcatatcaaatttaacgataacgttgaacagtgtattataactgatgagcatttcatacaaaggcttccttctacacggttgaattcgactgatgaacagcgcccttgttcaaagtctgaactagatccctgtattggcaacgcagcaagtaagcgaagtttctatgattataacagcgtttacgtcgcgagtgacgcaattattacgactgccgctgccactgccattatcagtagtaatagtggagactatcagcgtgggcacgatgttcgcgatgttccaagaaatgttttgttacaggcaggagaaacagatttcagtagtgtgcttcgggttgactccgatctcaagttatccaacataagtcatcattcccccgtaaaaccttcgtcaacttcaagtcattcgaccttcattttcgagtcggaaactgacactgatactgatactgacgctgaaacagaaaatgacattgacgcttacatagacaccagtatacccaacctgctcctataa

SEQ ID NO: 498 - DNA, 1017 bp, Artificial Sequence
  Description of Artificial Sequence: Synthetic polynucleotide
atgactttgagtaattgcgactctttggataacttattccaggaccctccagaggaagaagaaagtagtaaattcgttgaggcggtcagaactttgatgaatagaaacgatatgggatatcctcccgccgctgcaaatggtacgtattgcttaaaaaaaatcaagtctttgaatgccaaacagtggaaaataaacaagaaaagaatgtgcatgttgccagcagtaaagaagaaaaatttcgactttcacgagcaaagaagtttaatcttgaatttaaatttatggaaattcatcaagtttatcaattgtagtagtaaaaacaattacaataaaaataataagcatgtgagaagcagtaacaacactgtaaaaaatgaaaatgttttaccgttacaaaaacacaagaaagtggacaatgatcaaagattggagaaccttttttggagaagctggtttaaggcacgcaaaaggagagatataatgggcaagccaagagagaggcatatcaaatttaacgataacgttgaacagtgtattataactgatgagcatttcatacaaaggcttccttctacaagattgaattctactgatgaacagcgcccttgttccaagtctgaattagatccctgtattggcaacgcagcaagtaagagaagtttctatgattataacagcgtttacgtcgcgagtgacgcaattattacgactgccgctgccactgccattatcagtagtaatagtggagactatcagcgtgggcacgatgttcgcgatgttccaagaaatgttttgttacaggcaggagaaacagatttcagtagtgtgcttcgtgttgactccgatctcaagttatccaacataagtcatcattcccccgtaaaaccttcttctacttctagtcattctaccttcattttcgagagtgaaactgacactgatactgatactgacgctgaaacagaaaatgacattgacgcttacatagacaccagtatacccaacttactcctctga

SEQ ID NO: 499 - DNA, 633 bp, Saccharomyces cerevisiae
atgccgaaagtcgctattttgatttattcagtggacgatataattgccacattagcagaaaatgaaaaaaaaggtatagagatagctggtggtgaggctgagattttccaagtgccagacgtcagctataaaactgaatatgcgacagaagagggaaaagaggcagccaaagtcgccaaaactaatgcagatttttcctataaaatcctaacaagagaaacgttggttgagtacgattactacttattcggaatacctactaagtttggaaacttccccgcggagtggaaaagcttttgggactcgaatactggtgggctttgggcaaagggttctctccatggcaaaattgccggtttgtttgtttcaggcgcaataagcggcaagggtgatacagaaatgtgtatcatgaacgcaatgagtactctggtccatcatggtgtcatttatgtcccattggggtataagaacgcatacaaggaattgaccgacgttgaagatgtgaacgggtcttgcgcctggggcgcaggatgtgtttctggaatcgacggtggcagacctcccagtttatccgagctaagagttcaccaacttcaagggaaggccttttacgaccgtatcaaagatttgtaa

SEQ ID NO: 500 - DNA, 633 bp, Artificial Sequence
  Description of Artificial Sequence: Synthetic polynucleotide
atgccgaaagtcgctattttgatttattctgtggacgatataattgccacattagcagaaaatgaaaaaaaaggtatagagatagctggtggtgaggctgagattttccaagtgccagacgtcagctataaaactgaatatgcgacagaagagggaaaagaggcagccaaagtcgccaaaactaatgcagatttttcctataaaatcttaacaagagaaacgttggttgagtacgattactacttattcggaatacctactaagtttggaaacttccccgcggagtggaaaagcttttgggactctaatactggtgggctttgggcaaagggttctctccatggcaaaattgccggtttgtttgtttctggcgcaataagcggcaagggtgatacagaaatgtgtatcatgaacgcaatgagtactttggtccatcatggtgtcatttatgtcccattggggtataagaacgcatacaaggaattgaccgacgttgaagatgtgaacgggtcttgcgcctggggcgcaggatgtgtttctggaatcgacggtggcagacctcccagtttatccgagttaagagttcaccaacttcaagggaaggccttttacgaccgtatcaaagatttgtga

SEQ ID NO: 501 - DNA, 1077 bp, Saccharomyces cerevisiae
atgagtagtgttggcgattttgaagaaattattttgcatgatttaaaaccttattatcacgttcccggtgccatacatagtgaaggaataaccttcgttaaggaaaccggtacactgttgtgggttgatatttttaaaggagaggttcataaagtcgaagacatagaacagcctgaatccagtcattcttttttttccattagtagagccaattatggcaagaatgcgtcaattgagtaccctcccaatccagatgaattaaaagaatccgtgggctgtatatttccaatacttgatggggcttcacaaaatgaaatcaaacaagtattatttggtagtaaatttggcataggaaaattggattttagcaaaagtgaatgggaatatgtcattttgtattccgaatgtcctgaattgagtacagacagagcatataagttgagatctaatgatgggaacgtttcgccagatggaaaatatatttatgtggggctaatgagcgattttccatttgatttggaacctattgggtgtttgcttcgtgttgacctattagctcacaagatagagcttgtttggaattgcttgttaattcctaacgcgatccactgggatgaaagtgatcaaaagacgatgtacgtgactgattctttaaacttcactatttggaaatgtcctggtggcgacttgctaaaacgtgacgagttaattgacgtgaagaactccaacaatcaatcttttgagtctcctgaaccagatggaagtgcaatttggtttagcaaagacggaaaacattctgggtttctgtttatcactgtctggtccaccagtaaggttcaaatgttcgatttaactaacggaaaattgctgaaggagttcattttgccggagcagacaccaagagtttcatgttgttgttttgttggtaaagatctcttcgtgaccactgccaatgcagaaatcaacgatgctgtaagaaccaatactgacaagaatggtggctgcatctacaaaattccaaacgtgctagacggaaatgttcctctggaatctacaaagcgacaacctctccactag

SEQ ID NO: 502 - DNA, 1077 bp, Artificial Sequence
  Description of Artificial Sequence: Synthetic polynucleotide
atgagtagtgttggcgattttgaagaaattattttgcatgatttaaaaccttattatcacgttcccggtgccatacatagtgaaggaataaccttcgttaaggaaaccggtacattattgtgggttgatatttttaaaggagaggttcataaagtcgaagacatagaacagcctgaatccagtcattcttttttttccattagtagagccaattatggcaagaatgcgtccattgagtaccctcccaatccagatgaattaaaagaatccgtgggctgtatatttccaatacttgatggggcttctcaaaatgaaatcaaacaagtattatttggtagtaaatttggcataggaaaattggattttagcaaaagtgaatgggaatatgtcattttgtattccgaatgtcctgaattgagtacagacagagcatataagttgagatctaatgatgggaacgtttctccagatggaaaatatatttatgtggggttgatgagcgattttccatttgatttggaacctattgggtgtttgcttcgtgttgacttattagctcacaagatagagcttgtttggaattgcttgttaattcctaacgcgatccactgggatgaaagtgatcaaaagacgatgtacgtgactgattctttaaacttcactatttggaaatgtcctggtggcgacttgttgaaacgtgacgagttaattgacgtgaagaactccaacaatcaatcttttgagtctcctgaaccagatggaagtgcaatttggtttagcaaagacggaaaacattctgggtttttgtttatcactgtctggtccaccagtaaggttcaaatgttcgatttaactaacggaaaattgttgaaggagttcattttgccggagcagacaccaagagtttcttgttgttgttttgttggtaaagatctcttcgtgaccactgccaatgcagaaatcaacgatgctgtaagaaccaatactgacaagaatggtggctgcatctacaaaattccaaacgtgcttgacggaaatgttcctttggaatctacaaagagacaacctctccactga

SEQ ID NO: 503 - DNA, 1035 bp, Saccharomyces cerevisiae
atgtctgattatgttgaactattgaaaagaggtggtaacgaagccatcaaaattaatccaccaaccggtgctgatttccacattacatctcgtggttcagactggcttttcaccgttttttgtgttaacctactattcggtgtgattttagtcccactaatgtttagaaaaccagttaaggacagattcgtatattatacggccattgctccaaatttgttcatgtcaattgcttatttcaccatggcttctaacttgggttggatcccagtcagagcaaagtacaaccatgtacaaacttctacccaaaaggagcacccaggttacagacaaattttttacgctagatacgttggctggtttttggctttcccatggccaattattcaaatgtctctacttggtggtactccattatggcaaattgctttcaatgttggtatgactgaaatatttactgtctgctggttgattgctgcctgtgtccactctacttacaaatggggttactacaccattggtattggtgctgccattgttgtttgtattagtttgatgacaactacattcaacctggtcaaggccagaggtaaggatgtctctaacgttttcattactttcatgagtgtcatcatgtttttgtggctgattgcttacccaacctgttttggtatcacagatggtggtaacgttttgcaaccagattctgctaccattttctatggtattattgatttgttgatcctatctatcttgccagttcttttcatgccattggctaactatttggggattgaaagattaggtttaatcttcgacgaagaacccgctgaacatgttggtccagttgctgaaaagaagatgccatctccagcttctttcaagtcatctgattctgactctagtatcaaggagaagttaaagctaaagaagaagcacaagaaggacaagaagaaggctaagaaggctaagaaggccaagaaggccaagaaagcccaagaagaggaggaggatgtagccaccgactctgagtaa

SEQ ID NO: 504 - DNA, 1035 bp, Artificial Sequence
  Description of Artificial Sequence: Synthetic polynucleotide
atgtctgattatgttgaattattgaaaagaggtggtaacgaagccatcaaaattaatccaccaaccggtgctgatttccacattacatctcgtggttctgactggcttttcaccgttttttgtgttaacttattattcggtgtgattttagtcccattaatgtttagaaaaccagttaaggacagattcgtatattatacggccattgctccaaatttgttcatgtctattgcttatttcaccatggcttctaacttgggttggatcccagtcagagcaaagtacaaccatgtacaaacttctacccaaaaggagcacccaggttacagacaaattttttacgctagatacgttggctggtttttggctttcccatggccaattattcaaatgtctttacttggtggtactccattatggcaaattgctttcaatgttggtatgactgaaatatttactgtctgctggttgattgctgcctgtgtccactctacttacaaatggggttactacaccattggtattggtgctgccattgttgtttgtattagtttgatgacaactacattcaacttggtcaaggccagaggtaaggatgtctctaacgttttcattactttcatgagtgtcatcatgtttttgtggttgattgcttacccaacctgttttggtatcacagatggtggtaacgttttgcaaccagattctgctaccattttctatggtattattgatttgttgatcctttctatcttgccagttcttttcatgccattggctaactatttggggattgaaagattaggtttaatcttcgacgaagaacccgctgaacatgttggtccagttgctgaaaagaagatgccatctccagcttctttcaagtcttctgattctgactctagtatcaaggagaagttaaagttgaagaagaagcacaagaaggacaagaagaaggctaagaaggctaagaaggccaagaaggccaagaaagcccaagaagaggaggaggatgtagccaccgactctgagtga

SEQ ID NO: 505 - DNA, 2700 bp, Saccharomyces cerevisiae
atggagaggccatcttttttggatcaagaaccacctgcaggttacgtaccaggtattggtcgtggagccactggattttcaacaaaagaaaagcaagtggttagtaatgatgacaaaggaagaagaataccgaaaaggtaccgtgaaaatttgaacaaccatcttcaaagccaaccgaaagatgatgaagatgatgaagctgcaaatgtattcaaaacgcttgaattgaaattagcacaaaagaaaaagaaaagagctaatgaaaaggatgatgacaattcagttgattcttcaaacgtgaaacggcaatttgccgatttgaaagaatcattagctgctgtaacggagagtgagtggatggatattccggatgccacagattttacaagaagaaacaagagaaatagaattcaagagcaattaaacagaaaaacttatgctgcaccggattcgctaatacctgggaatgttgatttaaataaattaacggaagaacgagaaaaattattgcaatctcaaatagatgagaatcttgcacaattaacgaagaatgcaagtaaccctatacaggttaataaaccgaacgctgctaccgatgccctaagttacttaaaggacttagaaaacgatagagtaaattctctctcagacgcaacgttagaagatttacagaaaatgcgcacaattttaaagtcatacagaaaggccgatccaacaaatccacagggttggatagcttctgccagattagaagaaaaggcaagaaaattttcagtagcaaaaaaaataatagaaaatggttgccaagagtgccctcgaagctccgatatttggctagaaaacattagactacacgaatctgatgttcactactgtaaaacattagtggcaacggcaataaattttaatccaacgtctccgcttctttggttcaaagctattgatttggaaagcacaacggttaacaaatatagagtagtgagaaaagcactgcaagagattcctcgagatgagggcctatggaagctagctgtcagttttgaagctgacaaagcgcaagttataaaaatgttagagaaagccacacaatttattccacaaagtatggatctcttgactgcatatactaatttgcaaagctatcataatgctaaaatgactttgaattccttcagaaaaatccttccgcaagaaccggaaatttggattatctctacactcttggaagaacgaaataacccagatatacctgtagataaactagttagtttgctcaaggagggtttattggaactctctaaaaatgggtacaaagcgaccttgtcagcatggttgaaacgtgcagaggctctaaatgatgcgcccaattcaaatttaacctgtcaagccatcgtttacgctatattagaatggttaagagaaagtggcgagtatgagtctgagttgaataatgttgatcagatattagaaaaaatgccacactcaaaggtacaaattgctgtcttaaaaaagcttattcagtgggatccttgtgatacagttctttggtctagactgaaaatggccactgaaagctaccataaaattgaagagttattagcatttttccaggagctgctatttcagaccaagaatagtgatgatatacgagcaaatatgagggagaaaagccctggcttgttaatgatgtatgtaagcgaatattggaaggcccaaaaaggggatactaggcaaacactagttttgattgaccagattatagatttcgccccgcataatttggatttacgctttttcaagataaagttattaggtcgttcactacaacttgatgaattacgagatttttttcagcaaactttctcctctttagaggattttaagatcagtggcacggaaagattatattataaatacgtaaactttctgcggtaccaagatctgaatgaagaggctataaaattcttgaatgagagatgtttgaaatcatttcccatctgccacaaattttttttacagctgggtcaaatttatcattccatgggcaatattgaaatgagtagagaaacctatttgtctggtacaaggttagtgcccaattgccctttattatgggtttccctatcaaagattgacgagattgatctaaaaaatccagtaagggcaagatcaattttagatagaggattgttaaaaaatcctgacgatgtattattttacattgctaaaatccaaatggaaataagacttggtaacttagatcaggcggagttactcgtcacacaggcattgcaaaagtttccaagcaatgctttactttgggtggagcaaatcaagctgtttaagcatggaaacaaaagttcgttaaaaaaaacaatttttcaagatgctttaagaaggacacaaaacgatcatcgcgttcttttggagattggagtatccttttatgcagaagcgcaatatgaaacatcattaaaatggttagaaagagctctgaaaaagtgctcgcgttacggagatacatgggtttggctatttaggacatatgcaaggttaggcaaggatactgttgatctctacaatatgttcgatcaatgtgagcctacttacggacccgaatggatagccgcctccaagaacgtaaaaatgcaatactgcacacctagagagattttattgcgcttgatgaatgacaaataa

SEQ ID NO: 506 - DNA, 2700 bp, Artificial Sequence
  Description of Artificial Sequence: Synthetic polynucleotide
atggagaggccatcttttttggatcaagaaccacctgcaggttacgtaccaggtattggtcgtggagccactggattttctacaaaagaaaagcaagtggttagtaatgatgacaaaggaagaagaataccgaaaaggtaccgtgaaaatttgaacaaccatcttcaaagccaaccgaaagatgatgaagatgatgaagctgcaaatgtattcaaaacgcttgaattgaaattagcacaaaagaaaaagaaaagagctaatgaaaaggatgatgacaattctgttgattcttccaacgtgaaaagacaatttgccgatttgaaagaatctttagctgctgtaacggagagtgagtggatggatattccggatgccacagattttacaagaagaaacaagagaaatagaattcaagagcaattaaacagaaaaacttatgctgcaccggattctttgatacctgggaatgttgatttaaataaattaacggaagaaagagaaaaattattgcaatctcaaatagatgagaatcttgcacaattaacgaagaatgcaagtaaccctatacaggttaataaaccgaacgctgctaccgatgccttgagttacttaaaggacttagaaaacgatagagtaaattctctctctgacgcaacgttagaagatttacagaaaatgcgcacaattttaaagtcctacagaaaggccgatccaacaaatccacagggttggatagcttctgccagattagaagaaaaggcaagaaaatttagcgtagcaaaaaaaataatagaaaatggttgccaagagtgccctcgtagctccgatatttggttagaaaacattagattgcacgaatctgatgttcactactgtaaaacattagtggcaacggcaataaattttaatccaacgtctccgcttctttggttcaaagctattgatttggaaagcacaacggttaacaaatatagagtagtgagaaaagcattacaagagattcctagagatgagggcttatggaagttggctgtcagttttgaagctgacaaagcgcaagttataaaaatgttagagaaagccacacaatttattccacaaagtatggatctcttgactgcatatactaatttgcaaagctatcataatgctaaaatgactttgaattccttcagaaaaatccttccgcaagaaccggaaatttggattatctctacactcttggaagaaagaaataacccagatatacctgtagataaattggttagtttgctcaaggagggtttattggaactctctaaaaatgggtacaaagcgaccttgagtgcatggttgaaacgtgcagaggctttgaatgatgcgcccaatagtaatttaacctgtcaagccatcgtttacgctatattagaatggttaagagaaagtggcgagtatgagtctgagttgaataatgttgatcagatattagaaaaaatgccacactccaaggtacaaattgctgtcttaaaaaagcttattcagtgggatccttgtgatacagttctttggtctagattgaaaatggccactgaaagctaccataaaattgaagagttattagcatttttccaggagttactttttcagaccaagaatagtgatgatataagagcaaatatgagggagaaaagccctggcttgttaatgatgtatgtaagcgaatattggaaggcccaaaaaggggatactaggcaaacattagttttgattgaccagattatagatttcgccccgcataatttggatttacgctttttcaagataaagttattaggtcgttctttacaacttgatgaattaagagatttttttcagcaaactttctcctctttagaggattttaagatcagtggcacggaaagattatattataaatacgtaaactttttaagataccaagatttgaatgaagaggctataaaattcttgaatgagagatgtttgaaaagttttcccatctgccacaaattttttttacagttgggtcaaatttatcattccatgggcaatattgaaatgagtagagaaacctatttgtctggtacaaggttagtgcccaattgccctttattatgggtttccttatccaagattgacgagattgatttgaaaaatccagtaagggcaagatctattttagatagaggattgttaaaaaatcctgacgatgtattattttacattgctaaaatccaaatggaaataagacttggtaacttagatcaggcggagttactcgtcacacaggcattgcaaaagtttccaagcaatgctttactttgggtggagcaaatcaagttatttaagcatggaaacaaaagttctttaaaaaaaacaatttttcaagatgctttaagaaggacacaaaacgatcatcgcgttcttttggagattggagtatccttttatgcagaagcgcaatatgaaacaagtttaaaatggttagaaagagctttgaaaaagtgctctcgttacggagatacatgggtttggttatttaggacatatgcaaggttaggcaaggatactgttgatctctacaatatgttcgatcaatgtgagcctacttacggacccgaatggatagccgcctccaagaacgtaaaaatgcaatactgcacacctagagagattttattgcgcttgatgaatgacaaatga

SEQ ID NO: 507 - DNA, 1506 bp, Saccharomyces cerevisiae
atgattggctcacttagaaacaaatttgagcatttcaaagtttctgaaaagggaggtcaaaatttatctacaacactaccgaaactaccccctgcaaaggaccttgatagatcaactatctacaagtaccgttacaattatggtgtaaacttgggtgcgttatttgtgctcgaaccatggattttttctaaagaaaccatttgtacaatcgatgggaaagaatatgatagcgaatttgatgctatttcccaacaattgaagaagcattcttctgaagacgttgcgaaaatgttaagcgatcactataaaaagtacattgatcgaattgactgggaatggctatctaaagatgcccatattacagcgttacgtattccaattggatattggcatgtcgaagatgggaagcatttagattcgcttccatttgccccattgagaaaagtttatgagttagccaaaccttgggaaaaacttggcgaattaatcaataatgccaagaaaatgagcattggtgtattgatagatttgcatggtctaccaggaggcgctaattgcgactcacacagtggctcgaagagtggtgaagctgcgtttttccacaaggaaaagtacatgaccaaagtctacaaagatattttacctgcaattattaacacaatgactctgggcaacgaaaacatcattggtattcaagtggttaatgaggcatgttttgataataacccaaagggccaaaaattctattattcagaagccattaataccgttgaaaaacttcaaccaggtttacctgtcataatatccgatggttggtggccccaacaatgggcagactgggttaaagaaaaacattttagtgaaatagtggtcattgattctcatgtctaccgctgtttttctgattctgataagtcgaaggatgccaattccattatcaaggatttgccaaatactgtgaattttcctcatgaagatgccgattatactgttggtgaattttctggtgttcttgatggacaaacttggaataaaacttctggcgacagagacgctattgttcaaaaatacgtacaaacccaagcagatgtattttctcatgtagctagttggggttggtttttttggactttgcagtttgaatacggtgatggaggtgaatggggcttagctcccatgatgcagaaaggaaatttaccaaaacgtcctcacggtgatgacttacaagtcgacaagaagaaaatagattcaataatccatgaacacgaggcttattggaacggtaaaggtaaaaattttgaacactggaggtttgaggatggcataaagacagctgttgatgatataattgcctttaggaaatttgacaattcattaattggtagatggcattcatggaagtcgcaaagaagagctgaatacgtttctgccaaaaaagatagcgaatttatgtgggaatgggatcaaggctaccaacgtgggttagatgagtttaataagtattaa

SEQ ID NO: 508 - DNA, 1506 bp, Artificial Sequence
  Description of Artificial Sequence: Synthetic polynucleotide
atgattggctctcttagaaacaaatttgagcatttcaaagtttctgaaaagggaggtcaaaatttatctacaacattgccgaaattgccccctgcaaaggaccttgatagatctactatctacaagtaccgttacaattatggtgtaaacttgggtgcgttatttgtgctcgaaccatggattttttctaaagaaaccatttgtacaatcgatgggaaagaatatgatagcgaatttgatgctatttcccaacaattgaagaagcattcttctgaagacgttgcgaaaatgttaagcgatcactataaaaagtacattgatagaattgactgggaatggttatctaaagatgcccatattacagcgttacgtattccaattggatattggcatgtcgaagatgggaagcatttagattctcttccatttgccccattgagaaaagtttatgagttagccaaaccttgggaaaaacttggcgaattaatcaataatgccaagaaaatgagcattggtgtattgatagatttgcatggtttgccaggaggcgctaattgcgactctcacagtggctccaagagtggtgaagctgcgtttttccacaaggaaaagtacatgaccaaagtctacaaagatattttacctgcaattattaacacaatgactttgggcaacgaaaacatcattggtattcaagtggttaatgaggcatgttttgataataacccaaagggccaaaaattctattattctgaagccattaataccgttgaaaaacttcaaccaggtttacctgtcataatatccgatggttggtggccccaacaatgggcagactgggttaaagaaaaacattttagtgaaatagtggtcattgattctcatgtctaccgctgtttttctgattctgataagtccaaggatgccaattccattatcaaggatttgccaaatactgtgaattttcctcatgaagatgccgattatactgttggtgaattttctggtgttcttgatggacaaacttggaataaaacttctggcgacagagacgctattgttcaaaaatacgtacaaacccaagcagatgtattttctcatgtagctagttggggttggtttttttggactttgcagtttgaatacggtgatggaggtgaatggggcttagctcccatgatgcagaaaggaaatttaccaaaacgtcctcacggtgatgacttacaagtcgacaagaagaaaatagattctataatccatgaacacgaggcttattggaacggtaaaggtaaaaattttgaacactggaggtttgaggatggcataaagacagctgttgatgatataattgcctttaggaaatttgacaattctttaattggtagatggcattcttggaagtctcaaagaagagctgaatacgtttctgccaaaaaagatagcgaatttatgtgggaatgggatcaaggctaccaacgtgggttagatgagtttaataagtattga

SEQ ID NO: 509 - DNA, 201 bp, Saccharomyces cerevisiae
atgagacatcaatactatcaaccacaaccgatgtattatcaaccacaaccgcaacctatatacatacaacaagggccgccgccaccaagaaatgattgttgttgttgttgtaactgtggcgattgctgttcagcaattgcgaacgttttatgttgtctgtgtctaattgatctatgttgtagctgcgctggcggcatgtaa

SEQ ID NO: 510 - DNA, 201 bp, Artificial Sequence
  Description of Artificial Sequence: Synthetic polynucleotide
atgagacatcaatactatcaaccacaaccgatgtattatcaaccacaaccgcaacctatatacatacaacaagggccgccgccaccaagaaatgattgttgttgttgttgtaactgtggcgattgctgttctgcaattgcgaacgttttatgttgtttatgtttaattgatttatgttgtagctgcgctggcggcatgtga

SEQ ID NO: 511 - DNA, 1101 bp, Saccharomyces cerevisiae
atgaattacatggcttatgattatgatccccaacattcgttggaaacgtcctttaacaatttggcatttcatccccaccaacagtcacagcaacaagccctatacgaatctggtgaaagaaacgatgccaggccgggattaatgaacaccttaggtcaggcgagtaaaatgaataattccatgcttcctcaaggttcgtcggctagtcccttaacgggtcaacatagcttgaacagtacaacaaatttcaacatgcccccatcaatgaatacctataattaccagaatgtaccacaagcatctatgagaaatactctcaatcataacaatatcatgaatggggcaactgctaatgattattggctggatccaatgaataatatgacaaataacaaggatactaatgggaatcctaatgactcgatgtcatcaatgtctaatatgaccgctaaaacctcaatcaatagtacggcattcaagaattcatttgttccttttaatcatgtgacagcgctctcaatgaataatgtcaacagcaatgagatgaattcaaataaagatgacagaatggaagcattggaagtagaactacaaataaaggaaagtcaaatcgaatcactcgagaacgaaattcaaaggctaaagaaaattttcaacgaggggctaaactacaagcagaatgagcataagtatgagaaggaaaactgccatataccccaaactttcgaattgccagcttccttggaagtgatattcagaaaactgtcatcgtcactgcatgcaaaggaaaaggagttagcagagacgaaagaaaatctggaaagtatattaactgcactggcgctaaatccaacaaattcagtgactaagtatggcaggtatgatgcagaatcgattgctcacaaaatggtggtaagattagaaaacttaacaaacgagaacaaagaaatggccaagatgttagcatatggcagatcaaaagagacccaaattgaactgcagttggccaaaaaagaaaatctagaattaagagaaaaaatcgcatctttggaagcccatttggcttcaaaggagtcttcaaaggaggacgttgctaattga

SEQ ID NO: 512 - DNA, 1101 bp, Artificial Sequence
  Description of Artificial Sequence: Synthetic polynucleotide
atgaattacatggcttatgattatgatccccaacattctttggaaacgtcctttaacaatttggcatttcatccccaccaacagtctcagcaacaagccctttacgaatctggtgaaagaaacgatgccaggccgggattaatgaacaccttaggtcaggcgagtaaaatgaataattccatgcttcctcaaggttcttctgctagtcccttaacgggtcaacatagcttgaacagtacaacaaatttcaacatgcccccaagcatgaatacctataattaccagaatgtaccacaagcatctatgagaaatactctcaatcataacaatatcatgaatggggcaactgctaatgattattggcttgatccaatgaataatatgacaaataacaaggatactaatgggaatcctaatgactccatgtcttctatgtctaatatgaccgctaaaacctctatcaatagtacggcattcaagaattcttttgttccttttaatcatgtgacagcgctctctatgaataatgtcaacagcaatgagatgaatagtaataaagatgacagaatggaagcattggaagtagaattacaaataaaggaaagtcaaatcgaatctctcgagaacgaaattcaaaggttaaagaaaattttcaacgaggggttgaactacaagcagaatgagcataagtatgagaaggaaaactgccatataccccaaactttcgaattgccagcttccttggaagtgatattcagaaaattatcttcttctttgcatgcaaaggaaaaggagttagcagagacgaaagaaaatttggaaagtatattaactgcattagcgttgaatccaacaaattctgtgactaagtatggcaggtatgatgcagaaagtattgctcacaaaatggtggtaagattagaaaacttaacaaacgagaacaaagaaatggccaagatgttagcatatggcagaagtaaagagacccaaattgaattacagttggccaaaaaagaaaatttggaattaagagaaaaaatcgcatctttggaagcccatttggcttccaaggagtcttccaaggaggacgttgctaattga

SEQ ID NO: 513 - DNA, 2346 bp, Saccharomyces cerevisiae
atggcagaagcagtactagaaaacgttaacgttcctgcagtcgtttcaaaagatgagtgtatttattgctttgaatccccttataatgaaccattggccctcaatgcatcacctaaacattcattgaatatatgcttaaactgtttccaagctacgtgcaacagacatgttccactccatatccgagtcacagaatatgcttgcgataccatacattccaattatttaactattgctaaagtggagaaacctaagcaagaaaatgtagaagaaaataataacaacaaaaaaataaagctacaggtaattgagacgtcagaagacgacacccacaacactatttggagtttacaaaggttcaatggtgaaaatgttcccaggaccgtactttcgaagtcgacagactctgacatttcttctacggccttggagaagattgaaaagatattaaaggcgaagtcacaagacttcgaggataagaagaactcctgggtgttagaaatcagcacctgtccacatacagaaaactttcaaattccatctaagcccgaaaatactgtgaatttaaaccaatgctcttcctgtgatttgactcaaaatctctggttatgcctacattgtggtaatatcggatgtggcagggaacaaatcgggattgatggtcactcgcatgctttggatcattatcggagtaataataatcacccattagctatcaaattagggtctttaagctcttcaacctatgatctgtattgttacgcatgtgacgacgaaactagatttccagataatgttaatttaggcagtgcactacaaatatacggaattaacatacaagaaaagattgcggatgaaaagactctagttcaattacaagtggaacagaacgaaaattggcaatttagaatggtcgattctagcggtaaagaatttgaaaaattatccgctagtaagaattatggctgtggtctgatcaatttgggtaattcctgttacttaaattcggttatacaaagcttggtgaatggtggcgtcccgaattggtccttggattttctaggaagtaaatttccactggatgttgtatatccggacaataatttaaagtgccaatggatcaagctactcaatgccatgaaatgtgaacccgaactatatccaaatggtatcaaacctactactttcaagaaatgcattgggcaaaatcatcaggaattcagttccaatagacaacaggatgcgatggaatttctaaccttccttttagacttgttagacaagaaatttttttcaagtagttcttcaggtattccaaatcccaacgatttagttagatttatgatggaggataggctccaatgtaacatttgcgggaaggttaaatattcttatgaacccacagaggctatacagattcccttagaggagaatgatgaacctcaagatatgttagagagaatcaaggcgtattttgaagggcagacgattgaatttaaatgtgctaattgtaaggaaaaggttaccgcaaataaaaaacctggtttcaaatctcttcctcaaacacttattttgaacccaataaggattagattacagaactggattcctgttaagacaagtaatgagctttctttaccaggtttaatagacagggatgatatgctagatgtttcgtcttatttatcacaaggatttgatcctcaaactgaaaacttattgcctgatgaggacgaaaaccgtagctcttttacgccaaaccaatgcagtatttctcaattaattgaaatgggctttactcaaaatgctagcgtgcgcgccctatttaacaccggaaaccaagacgctgagagcgctatgaattggctattccagcatatggatgaccctgatttaaatgatccctttgtcccgcctcctaatgtccccaagaaagataagagagaagtggatgaggtatcattgacttcaatgttatccatgggactaaatcccaacttatgtcgtaaagccttgatactcaacaacggagatgttaatcgtagtgttgaatgggtatttaacaacatggatgatgatggaacatttcccgaacctgaagtgccaaatgaagaacagcaacaaaaaaaggatcttggatattcgaccgctaaaccgtacgctttaactgcagttatttgtcataagggaaattctgtccattctggtcactatgttgtttttattcgtaaactagtggcagacaaatggaagtgggttctttataacgatgagaaactagttgctgccgacagcattgaagatatgaaaaaaaatggttatatttatttctatacaagatgctaa

SEQ ID NO: 514 - DNA, 2346 bp, Artificial Sequence
  Description of Artificial Sequence: Synthetic polynucleotide
atggcagaagcagtattggaaaacgttaacgttcctgcagtcgtttccaaagatgagtgtatttattgctttgaatccccttataatgaaccattggccctcaatgcatctcctaaacattctttgaatatatgcttaaactgtttccaagctacgtgcaacagacatgttccactccatatcagggtcacagaatatgcttgcgataccatacattccaattatttaactattgctaaagtggagaaacctaagcaagaaaatgtagaagaaaataataacaacaaaaaaataaagttacaggtaattgagacgagtgaagacgacacccacaacactatttggagtttacaaaggttcaatggtgaaaatgttcccaggaccgtactttccaagagtacagactctgacatttcttctacggccttggagaagattgaaaagatattaaaggcgaagtctcaagacttcgaggataagaagaactcctgggtgttagaaatcagcacctgtccacatacagaaaactttcaaattccatctaagcccgaaaatactgtgaatttaaaccaatgctcttcctgtgatttgactcaaaatctctggttatgcttgcattgtggtaatatcggatgtggcagggaacaaatcgggattgatggtcactctcatgctttggatcattatagaagtaataataatcacccattagctatcaaattagggtctttaagctcttccacctatgatttatattgttacgcatgtgacgacgaaactagatttccagataatgttaatttaggcagtgcattacaaatatacggaattaacatacaagaaaagattgcggatgaaaagactttggttcaattacaagtggaacagaacgaaaattggcaatttagaatggtcgattctagcggtaaagaatttgaaaaattatccgctagtaagaattatggctgtggtttgatcaatttgggtaattcctgttacttaaattctgttatacaaagcttggtgaatggtggcgtcccgaattggtccttggattttttgggaagtaaatttccattagatgttgtatatccggacaataatttaaagtgccaatggatcaagttactcaatgccatgaaatgtgaacccgaattgtatccaaatggtatcaaacctactactttcaagaaatgcattgggcaaaatcatcaggaattcagttccaatagacaacaggatgcgatggaatttttaaccttccttttagacttgttagacaagaaatttttttctagtagttcttctggtattccaaatcccaacgatttagttagatttatgatggaggataggctccaatgtaacatttgcgggaaggttaaatattcttatgaacccacagaggctatacagattcccttagaggagaatgatgaacctcaagatatgttagagagaatcaaggcgtattttgaagggcagacgattgaatttaaatgtgctaattgtaaggaaaaggttaccgcaaataaaaaacctggtttcaaatctcttcctcaaacacttattttgaacccaataaggattagattacagaactggattcctgttaagacaagtaatgagctttctttaccaggtttaatagacagggatgatatgcttgatgtttcttcttatttatctcaaggatttgatcctcaaactgaaaacttattgcctgatgaggacgaaaaccgtagctcttttacgccaaaccaatgcagtatttctcaattaattgaaatgggctttactcaaaatgctagcgtgcgcgccttatttaacaccggaaaccaagacgctgagagcgctatgaattggcttttccagcatatggatgaccctgatttaaatgatccctttgtcccgcctcctaatgtccccaagaaagataagagagaagtggatgaggtatctttgacttctatgttatccatgggattgaatcccaacttatgtcgtaaagccttgatactcaacaacggagatgttaatcgtagtgttgaatgggtatttaacaacatggatgatgatggaacatttcccgaacctgaagtgccaaatgaagaacagcaacaaaaaaaggatcttggatattctaccgctaaaccgtacgctttaactgcagttatttgtcataagggaaattctgtccattctggtcactatgttgtttttattcgtaaattagtggcagacaaatggaagtgggttctttataacgatgagaaattggttgctgccgacagcattgaagatatgaaaaaaaatggttatatttatttctatacaagatgctga

SEQ ID NO: 515 - DNA, 243 bp, Saccharomyces cerevisiae
atgacacaacataaaagctcgatggtgtacatacccaccactaaggaagctaaaagacgtaatgggaaatcagaaggcatactaaatactattgaagaagtggtggaaaagctttattggacctactacatacatttacccttttatttaatggcctcttttgattcattcttcctccatgttttttttctcacaattttcagtttgagtttcttcggtatactaaagtattgcttcctttga

SEQ ID NO: 516 - DNA, 243 bp, Artificial Sequence
  Description of Artificial Sequence: Synthetic polynucleotide
atgacacaacataaaagcagtatggtgtacatacccaccactaaggaagctaaaagacgtaatgggaaaagtgaaggcatattgaatactattgaagaagtggtggaaaagctttattggacctactacatacatttacccttttatttaatggcctcttttgattctttcttcctccatgttttttttctcacaattttcagtttgagtttcttcggtatattgaagtattgcttcctttga

SEQ ID NO: 517 - DNA, 3327 bp, Saccharomyces cerevisiae
atgtcgatcacgaatggtacttctagaagcgtttcggcaatgggccatccggcggtagagaggtacactccaggccatattgtctgcgtaggcacacataaagttgaagtggtaaattatttagcagaaggtggctttgctcaaatttacgtggtgaaattcctagagtatcttaatgaatttgataatacagcaagtgttcccttaaagattggcgatgtcgcatgtctgaaaagagtattagttcaagatgagaatggattgaacgagatgagaaatgaagtggaggtaatgaagaaattgaaaggggccccaaatatagtacaatacttcgattccaacgcctctcgccgtcgtgatggcgttcaaggatttgaggttcttttgctaatggaattgtgtccaaacaaatctttgctagattatatgaaccaacgattgtcaacgaaactgacagaagctgaaattgtgaaaattatgtatgacgttgctctttctatctctcaaatgcactaccttcctgtgtccttgatccatcgcgatatcaagattgaaaatgtcttggtagatgccaaaaacaatttcaagctagctgattttgggtccacgtcgacatgtttcccaattgtcactactcatcaagatattgctcttttgactcaaaacatctatgtgcatactactccgcagtataggtcccctgaaatgattgacctttacagatgtctgcccattaacgaaaaatcagacatatgggctttgggagttttcctttacaaattattatttttcaccaccccttttgaaatgacaggtcaatttgctatattacattccaaatatgaatttcctgtcaacaaatattcatcaaaactaatcaacttaatcattatcatgttggcggaaaacccaaatttgagaccgaacatttatcaagtattataccatttatgtgagattttaaatgtggaagttccaatcgaggataagtatgcggaaggtgcctataatttttctaaatatacgcagtttcagaataaattacaaaatgttcaattgcaaatgtaccagctacaacaaaagaaaattatgcagaacaataaattgagtgactcagaagaaaacttactgaatgacatgtttctttcttcttttgaaatctcatccaaacttcccatgaacgctagtgacggtcatgccgctgtttctagaataccatctcaaaatgtcggccaagaacttgaagaagagaaagaaagtcaatccgatcagaggaagtctaccctgtccgaagataaatcgtcaagaacaacatcgaatgctaacagttctggtacagccaataatcctcaagaaatcaatacaatccagtctccaggtatagaggacaaatcaatttttgaaaataaaactcctggagagttatattatccaagcgtgagcgaattagatacttatttggacaaagaattggtcaaacaatcaagtgatccgactatttctgaacaaagtcctcgtttgaatacccaatcactaccacagaggcaaaagagcacaagctcttattcttcaggtggcagatcaatgaagagcacatcatatggtgcagcaacgatcgggtcagacgaagccttggcgaacgagaaaactgctggtattaataagatgaaacaacataaatcgaataatccctttccaaaaatgaatgttgcataccattctacgaatgaattgagcaatgacgcaagtaactttttcctggaagaacaacagcaaggccagagatatcagcaagctcaaaatcaaacaggtacacaagggaatacctttccagatgaatctcagtatcaatctagagttgaacaacagcagcaacaacaggaccaacccaaaggacctgctaattatagccaaagaaatttctacactgggagggatcggtccaataaacctatgcagttgggtggaactattgctggagatagtggtaatagaagagtcaactttcagaatatttctcaaaattacgccacgaactcccagtcaggatatctcccaagtcaaaattccccagcaattccaatggtgagacctgttatttccatgaatcagcagcaagcgcaacagatacaagcccagcaattgcaggcacaacagatgcaggcaaagcaacagatgcaagccaagcagcagatgcaagttcagcaacaactgcaagtccaacagcaaatgcaaattcaaaatgcaaataataatggtacttacgtctctgatagaacaaatcataccacagaagatatgagaaatgctcaggggggtgaacctccaattcttgcaggaaattctgcaaatgaaccaatgcactcatcctctaaaaatgaagctctcttaattgaactatctccattaaaagaagatgcaggaaagcaatctttccaagatacaaatgagcctcaaactggcggtatcgaagatgccggcggttcaggaactatcaaaggctcgaacaataatcgaaatggcgttttaaatttaagtttgaatgagatggacttatcaagagatgatactggtgctgctgtctcctccttttcatcgtcttcatcgtctgcatcaattcaacaagctaagctttctggacgcaaaggttccagtaagaggaacaattattcaacagacgaattgggagatagtatggtctccagcgaaagcattgatattgatttggatgatgcaaggagaggaaaaacagctgaaagaagaccactccataatgaaagaggtcataaagaccaggcaagatcaagtgatgctagtaagtctaatcaattcaaaagcaaggacttcagcagcgtatcaacaaggcaaccgcggcagtcattggatctgaatttccaggaagtaaatctgtcttcaccaacgttaactcaagagcatagaaataaaaacgactcgccagcaccaaattcacatcactcgtatagagtttcacctcatgcttccaccgcaataactgagaataagcgccacagtactggtcacgaactgtcaacccggtcaaatggcaagcatgaaacacacaggactggttccaagcaaaggcacgatttggaaagataccggcattcgaaggataaggatagcaatagcagcattactattagcacctcaactccatcagagatgagaaaatccttcgctagggcccgtcaatcgcttgatttggaaagggtccgtcgtgaagcgatggcaagtagtgcatccagtagtggtggcagtaacgggaaaaggagatcttttttctcagtctttagaagcgagaaatga

SEQ ID NO: 518 - DNA, 3327 bp, Artificial Sequence
  Description of Artificial Sequence: Synthetic polynucleotide
atgtccatcacgaatggtacttctagaagcgtttctgcaatgggccatccggcggtagagaggtacactccaggccatattgtctgcgtaggcacacataaagttgaagtggtaaattatttagcagaaggtggctttgctcaaatttacgtggtgaaattcttggagtatcttaatgaatttgataatacagcaagtgttcccttaaagattggcgatgtcgcatgtttgaaaagagtattagttcaagatgagaatggattgaacgagatgagaaatgaagtggaggtaatgaagaaattgaaaggggccccaaatatagtacaatacttcgattccaacgcctctcgccgtcgtgatggcgttcaaggatttgaggttcttttgttgatggaattgtgtccaaacaaatctttgttggattatatgaaccaaagattgagcacgaaattaacagaagctgaaattgtgaaaattatgtatgacgttgctctttctatctctcaaatgcactaccttcctgtgtccttgatccatcgcgatatcaagattgaaaatgtcttggtagatgccaaaaacaatttcaagttggctgattttgggtccacgagtacatgtttcccaattgtcactactcatcaagatattgctcttttgactcaaaacatctatgtgcatactactccgcagtataggtcccctgaaatgattgacctttacagatgtttgcccattaacgaaaaaagtgacatatgggctttgggagttttcctttacaaattattatttttcaccaccccttttgaaatgacaggtcaatttgctatattacattccaaatatgaatttcctgtcaacaaatattcttctaaattaatcaacttaatcattatcatgttggcggaaaacccaaatttgagaccgaacatttatcaagtattataccatttatgtgagattttaaatgtggaagttccaatcgaggataagtatgcggaaggtgcctataatttttctaaatatacgcagtttcagaataaattacaaaatgttcaattgcaaatgtaccagttacaacaaaagaaaattatgcagaacaataaattgagtgactctgaagaaaacttattgaatgacatgtttctttcttcttttgaaatctcttccaaacttcccatgaacgctagtgacggtcatgccgctgtttctagaataccatctcaaaatgtcggccaagaacttgaagaagagaaagaaagtcaatccgatcagaggaagtctaccttatccgaagataaatcttctagaacaacaagtaatgctaacagttctggtacagccaataatcctcaagaaatcaatacaatccagtctccaggtatagaggacaaatccatttttgaaaataaaactcctggagagttatattatccaagcgtgagcgaattagatacttatttggacaaagaattggtcaaacaaagtagtgatccgactatttctgaacaaagtcctcgtttgaatacccaatctttaccacagaggcaaaagagcacaagctcttattcttctggtggcagaagtatgaagagcacatcttatggtgcagcaacgatcgggagtgacgaagccttggcgaacgagaaaactgctggtattaataagatgaaacaacataaatctaataatccctttccaaaaatgaatgttgcataccattctacgaatgaattgagcaatgacgcaagtaactttttcttggaagaacaacagcaaggccagagatatcagcaagctcaaaatcaaacaggtacacaagggaatacctttccagatgaatctcagtatcaatctagagttgaacaacagcagcaacaacaggaccaacccaaaggacctgctaattatagccaaagaaatttctacactgggagggatagatccaataaacctatgcagttgggtggaactattgctggagatagtggtaatagaagagtcaactttcagaatatttctcaaaattacgccacgaactcccagtccggatatctcccaagtcaaaattccccagcaattccaatggtgagacctgttatttccatgaatcagcagcaagcgcaacagatacaagcccagcaattgcaggcacaacagatgcaggcaaagcaacagatgcaagccaagcagcagatgcaagttcagcaacaattacaagtccaacagcaaatgcaaattcaaaatgcaaataataatggtacttacgtctctgatagaacaaatcataccacagaagatatgagaaatgctcaggggggtgaacctccaattcttgcaggaaattctgcaaatgaaccaatgcactcttcctctaaaaatgaagctctcttaattgaattatctccattaaaagaagatgcaggaaagcaatctttccaagatacaaatgagcctcaaactggcggtatcgaagatgccggcggttctggaactatcaaaggctctaacaataatagaaatggcgttttaaatttaagtttgaatgagatggacttatctagagatgatactggtgctgctgtctcctccttttcttcttcttcttcttctgcatctattcaacaagctaagctttctggacgcaaaggttccagtaagaggaacaattattctacagacgaattgggagatagtatggtctccagcgaaagcattgatattgatttggatgatgcaaggagaggaaaaacagctgaaagaagaccactccataatgaaagaggtcataaagaccaggcaagaagtagtgatgctagtaagtctaatcaattcaaaagcaaggacttcagcagcgtatctacaaggcaaccgagacagtctttggatttgaatttccaggaagtaaatttatcttctccaacgttaactcaagagcatagaaataaaaacgactctccagcaccaaattctcatcactcctatagagtttctcctcatgcttccaccgcaataactgagaataagcgccacagtactggtcacgaattatctaccagatctaatggcaagcatgaaacacacaggactggttccaagcaaaggcacgatttggaaagatacagacattctaaggataaggatagcaatagcagcattactattagcacctctactccaagtgagatgagaaaatccttcgctagggcccgtcaatctcttgatttggaaagggtccgtcgtgaagcgatggcaagtagtgcatccagtagtggtggcagtaacgggaaaaggagatcttttttctctgtctttagaagcgagaaatga

SEQ ID NO: 519 - DNA, 1863 bp, Saccharomyces cerevisiae
atgctaaatggggaagactttgtagagcataatgatatcctatcgtctccggcaaaaagcaggaatgtaaccccaaaaagggttgacccacatggagaaagacaactgagaagaattcattcatcaaagaagaatttgttggaaagaatctcgcttgtaggcaacgaaaggaaaaatacatctccagatccggcactcaaacctaaaacgccaagtaaagctccccgtaaacgtggaagaccaagaaagatacaggaagaattaactgataggatcaagaaggatgagaaagatacaatttcctctaagaaaaagaggaaattggacaaagatacatcaggtaatgtcaatgaggaaagcaagacttctaacaacaagcaggtgatggaaaagacggggataaaagagaaaagagaacgcgaaaaaatacaggtagcgaccacaacatatgaagataatgtgactccacaaactgatgataattttgtatcaaattcacccgagccaccagaacctgcaacaccatctaagaagtctttaaccactaatcatgattttacttcgcccctaaagcaaattataatgaataatttaaaagaatataaagactcaacctccccaggtaaattaaccttgagtagaaattttactccaacccctgtaccgaaaaataaaaagctctaccaaacttcggaaaccaagtcagcaagctcgtttttggatacttttgaaggatatttcgaccaaagaaaaattgtcagaactaatgcgaagtcaaggcacaccatgtcaatggcacctgacgttaccagagaagagttttccctagtatcaaactttttcaacgaaaattttcaaaaacgtcccaggcaaaagttatttgaaattcagaaaaaaatgtttccccagtattggtttgaattgactcaaggattctccttattattttatggtgtaggttcgaaacgtaattttttggaagagtttgccattgactacttgtctccgaaaatcgcgtactcgcaactggcttatgagaatgaattacaacaaaacaaacctgtaaattccatcccatgccttattttaaatggttacaaccctagctgtaactatcgtgacgtcttcaaagagattaccgatcttttggtccccgctgagttgacaagaagcgaaactaagtactggggcaatcatgtgattttgcagatccaaaagatgattgatttctacaaaaatcaacctttagatatcaaattaatacttgtagtgcataatctggatggtcctagcataaggaaaaacacttttcagacgatgctaagcttcctctccgtcatcagacaaatcgccatagtcgcctctacagaccacatttacgctccgctcctctgggacaacatgaaggcccaaaactacaactttgtctttcatgatatttcgaattttgaaccgtcgacagtcgagtctacgttccaagatgtgatgaagatgggtaaaagcgataccagcagtggtgctgaaggtgcgaaatacgtcttacaatcacttactgtgaactccaagaagatgtataagttgcttattgaaacacaaatgcagaatatggggaatctatccgctaacacaggtcctaagcgtggtactcaaagaactggagtagaacttaaacttttcaaccatctctgtgccgctgattttattgcttctaatgagatagctctaaggtcgatgcttagagaattcatagaacataaaatggccaacataactaagaacaattctggaatggaaattatttgggtaccctacacgtatgcggaacttgaaaaacttctgaaaaccgttttaaatactctataa

SEQ ID NO: 520 - DNA, 1863 bp, Artificial Sequence
  Description of Artificial Sequence: Synthetic polynucleotide
atgttgaatggggaagactttgtagagcataatgatatcttatcttctccggcaaaaagcaggaatgtaaccccaaaaagggttgacccacatggagaaagacaattgagaagaattcattcttccaagaagaatttgttggaaagaatctctcttgtaggcaacgaaaggaaaaatacatctccagatccggcactcaaacctaaaacgccaagtaaagctccccgtaaacgtggaagaccaagaaagatacaggaagaattaactgataggatcaagaaggatgagaaagatacaatttcctctaagaaaaagaggaaattggacaaagatacatctggtaatgtcaatgaggaaagcaagacttctaacaacaagcaggtgatggaaaagacggggataaaagagaaaagagaacgcgaaaaaatacaggtagcgaccacaacatatgaagataatgtgactccacaaactgatgataattttgtatctaattctcccgagccaccagaacctgcaacaccatctaagaagtctttaaccactaatcatgattttacttctcccttgaagcaaattataatgaataatttaaaagaatataaagactctacctccccaggtaaattaaccttgagtagaaattttactccaacccctgtaccgaaaaataaaaagctctaccaaacttctgaaaccaagtctgcaagctcctttttggatacttttgaaggatatttcgaccaaagaaaaattgtcagaactaatgcgaagtccaggcacaccatgtccatggcacctgacgttaccagagaagagttttccttagtatccaactttttcaacgaaaattttcaaaaacgtcccaggcaaaagttatttgaaattcagaaaaaaatgtttccccagtattggtttgaattgactcaaggattctccttattattttatggtgtaggttccaaacgtaattttttggaagagtttgccattgactacttgtctccgaaaatcgcgtactctcaattggcttatgagaatgaattacaacaaaacaaacctgtaaattccatcccatgccttattttaaatggttacaaccctagctgtaactatcgtgacgtcttcaaagagattaccgatcttttggtccccgctgagttgacaagaagcgaaactaagtactggggcaatcatgtgattttgcagatccaaaagatgattgatttctacaaaaatcaacctttagatatcaaattaatacttgtagtgcataatttggatggtcctagcataaggaaaaacacttttcagacgatgttaagcttcctctccgtcatcagacaaatcgccatagtcgcctctacagaccacatttacgctccgctcctctgggacaacatgaaggcccaaaactacaactttgtctttcatgatatttctaattttgaaccgtccacagtcgagtctacgttccaagatgtgatgaagatgggtaaaagcgataccagcagtggtgctgaaggtgcgaaatacgtcttacaatctcttactgtgaactccaagaagatgtataagttgcttattgaaacacaaatgcagaatatggggaatttatccgctaacacaggtcctaagcgtggtactcaaagaactggagtagaacttaaacttttcaaccatctctgtgccgctgattttattgcttctaatgagatagctttgaggtctatgcttagagaattcatagaacataaaatggccaacataactaagaacaattctggaatggaaattatttgggtaccctacacgtatgcggaacttgaaaaacttttgaaaaccgttttaaatactttatga

SEQ ID NO: 521 - DNA, 933 bp, Saccharomyces cerevisiae
atgggtaagagcagcaaagataaaagagatttgtactatagaaaagcaaaagagcagggctatagggctagatctgctttcaaactacttcaactcaatgaccaatttcatttcctggatgatccaaacttaaaaagagttgtagatttgtgtgcagcaccaggttcatggtcacaagtgctctcgagaaaactgtttgatgaaagtcccagttcagataaggaggacaggaaaattgtctctgtcgatttacaaccgatgtcccccatacctcatgtgacaacgttgcaagccgatatcactcatcctaaaacattggcgaggattctaaaactgtttggcaacgaaaaggccgattttgtttgtagtgatggtgcacctgatgttactgggttacacgatcttgacgaatacgtgcaacaacagttaattatgagtgcgctgcaacttactgcatgcattctgaaaaaaggtggaacttttgtggcaaagatcttcagaggtcgtgatatagatatgctatattcccaattgggctatctattcgataaaatcgtttgcgcaaagccaagatcatcaagaggtacatctctggaagcttttattgtttgtttaggctataacccaccatccaattggacaccaaaattagatgtaaatacatccgttgatgaattttttcaaggctgttttttgaataaattgtgtatatcagacaaattgtctcattggaatgaagaggagagaaacatagccgaatttatggcttgtggaagtcttcaaagtttcgactcagatgccacttatcatgacctaccttcttcggttgcaggcacttcatcgtccttagatcctgttcaaagcccgacgaaccctccctacaagaaagctttggaattaaaaaggagcgggaaactcactagatcagtttga

SEQ ID NO: 522 - DNA, 933 bp, Artificial Sequence
  Description of Artificial Sequence: Synthetic polynucleotide
atgggtaagagcagcaaagataaaagagatttgtactatagaaaagcaaaagagcagggctatagggctagatctgctttcaaattacttcaactcaatgaccaatttcatttcttggatgatccaaacttaaaaagagttgtagatttgtgtgcagcaccaggttcttggtctcaagtgctcagcagaaaattatttgatgaaagtcccagttctgataaggaggacaggaaaattgtctctgtcgatttacaaccgatgtcccccatacctcatgtgacaacgttgcaagccgatatcactcatcctaaaacattggcgaggattttgaaattatttggcaacgaaaaggccgattttgtttgtagtgatggtgcacctgatgttactgggttacacgatcttgacgaatacgtgcaacaacagttaattatgagtgcgttgcaacttactgcatgcattttgaaaaaaggtggaacttttgtggcaaagatcttcagaggtcgtgatatagatatgctttattcccaattgggctatcttttcgataaaatcgtttgcgcaaagccaagaagtagtagaggtacatctttggaagcttttattgtttgtttaggctataacccaccatccaattggacaccaaaattagatgtaaatacatccgttgatgaattttttcaaggctgttttttgaataaattgtgtatatctgacaaattgtctcattggaatgaagaggagagaaacatagccgaatttatggcttgtggaagtcttcaaagtttcgacagtgatgccacttatcatgacttgccttcttctgttgcaggcacttcttcttccttagatcctgttcaaagcccgacgaaccctccctacaagaaagctttggaattaaaaaggagcgggaaactcactagatctgtttga

SEQ ID NO: 523 - DNA, 543 bp, Saccharomyces cerevisiae
atgtctacatatgaagaggaacatggaatacaacaaaactcaagggattaccaagaagtaggaggaacttcacaggaggagcagagaagacaggtcagatcccaactgcaaggtctatttcaaaactttggtaacaccagtggtgagggtgatgcacattcagattcaacactacttttacgattattatcgcaaatgcttccagaatcattacaggaagaatggttgcaagaaatggataaaggcaagagtgcgggctgtcctgatacttttgcagcctctttaccacgaatcaataaaaaaaagctcaaagcaactgacaactgctccatttgttacactaattatttagaagatgagtaccccttagtagttgaattacctcattgccatcataagttcgacttagagtgtttgtctgtctggctatctcgaagtacaacatgtccattatgcagagataatgttatgggccaccgaatcattaatgagattgatacaactgaagcagaactggaagaagattggggtatgtacggttaa

SEQ ID NO: 524 - DNA, 543 bp, Artificial Sequence
  Description of Artificial Sequence: Synthetic polynucleotide
atgtctacatatgaagaggaacatggaatacaacaaaacagcagggattaccaagaagtaggaggaacttctcaggaggagcagagaagacaggtcagatcccaattacaaggtttatttcaaaactttggtaacaccagtggtgagggtgatgcacattctgattctacattgcttttaagattattatctcaaatgcttccagaatctttacaggaagaatggttgcaagaaatggataaaggcaagagtgcgggctgtcctgatacttttgcagcctctttaccaagaatcaataaaaaaaagctcaaagcaactgacaactgctccatttgttacactaattatttagaagatgagtaccccttagtagttgaattacctcattgccatcataagttcgacttagagtgtttgtctgtctggttatctagaagtacaacatgtccattatgcagagataatgttatgggccacagaatcattaatgagattgatacaactgaagcagaattggaagaagattggggtatgtacggttga

SEQ ID NO: 525 - DNA, 1215 bp, Saccharomyces cerevisiae
atggaggaactaggtttaaaaagcacttttccatatgaatatggctcagactttacaatgataagaacggaaatgttaaatactacgaagagcgaaacaactattttattttccaatataaagagcattttggccattatttggaaatactcatttacatttttaagatctttttccgattccatcaaacttattattgacgatgttgtcactattggctcccgaaattttgcagagagattacagattgaagcgaaaaaaaacaatgaccaagaagatatctgggcatccacaataattttgggtgtgattatcgggtatttaatctcttctattaagagaaagaacacttttccaataatgcctacgagctcacctaaaatagatgattgtaggttcaagactggtgataccatatccattgtaataaactttaatgaagactgcctcaataatcgaagtgacgttaccgaagagagaaattatgaggaatccacagttttacattcaaaggagtcagttctcagcattggtaggcaaaatatggtaactttgaaccaaagcgatgaaaatttcacctatggcaattttgatgagtacgacttattaactaaagattatacaacagaggtcttaacgcgatcacctggctcgaatcccgagtttaaagcagtggtaaataatacattacttgatagcgcgaatgaaacgccgtttaaaggtattgaaaaaagtattaacgaaacaatggttaaagttcctatgggatgcgatgtatctctctcccattatggcagacaatacgcgcctggaaatatttcaattatgagaagcttcactgctcgagataatactaaatctgtgagtagagaaattcgtgatatctgtaaatcgtttttgattataaaaagccaatttggtgacgaacttttcctgactatgttcatggaaaaaccagttttctttgataacaacatcccaattgaaataactggagcataccgagaaaaacgagagcgattagatgaagtgattcataaggatcttatccgctatgatgaagttcaaaatttgacaaggattcgcaatttgctccgggttaaaagtcaaaagatttgttccaggagacataatagttcggttcccacaaaaaaattgttagttaatgataaaggcgcaacttcgattctactgtggtactctaactattcatag

SEQ ID NO: 526 - DNA, 1215 bp, Artificial Sequence
  Description of Artificial Sequence: Synthetic polynucleotide
atggaggaattgggtttaaaaagcacttttccatatgaatatggctctgactttacaatgataagaacggaaatgttaaatactacgaagagcgaaacaactattttattttccaatataaagagcattttggccattatttggaaatactcttttacatttttaagatctttttccgattccatcaaacttattattgacgatgttgtcactattggctccagaaattttgcagagagattacagattgaagcgaaaaaaaacaatgaccaagaagatatctgggcatccacaataattttgggtgtgattatcgggtatttaatctcttctattaagagaaagaacacttttccaataatgcctacgagctctcctaaaatagatgattgtaggttcaagactggtgataccatatccattgtaataaactttaatgaagactgcctcaataatagaagtgacgttaccgaagagagaaattatgaggaatccacagttttacattctaaggagtctgttctcagcattggtaggcaaaatatggtaactttgaaccaaagcgatgaaaatttcacctatggcaattttgatgagtacgacttattaactaaagattatacaacagaggtcttaacgagatctcctggcagtaatcccgagtttaaagcagtggtaaataatacattacttgatagcgcgaatgaaacgccgtttaaaggtattgaaaaaagtattaacgaaacaatggttaaagttcctatgggatgcgatgtatctctctcccattatggcagacaatacgcgcctggaaatatttccattatgagaagcttcactgctagagataatactaaatctgtgagtagagaaattcgtgatatctgtaaaagttttttgattataaaaagccaatttggtgacgaacttttcttgactatgttcatggaaaaaccagttttctttgataacaacatcccaattgaaataactggagcatacagagaaaaaagagagagattagatgaagtgattcataaggatcttatccgctatgatgaagttcaaaatttgacaaggattcgcaatttgctcagggttaaaagtcaaaagatttgttccaggagacataatagttctgttcccacaaaaaaattgttagttaatgataaaggcgcaacttctattttattatggtactctaactattcttga

SEQ ID NO: 527 - DNA, 1095 bp, Saccharomyces cerevisiae
atgaatgatgaaattaatgagccaccgcccaatatatgtgagcagtgcttaggtgatgaggctaatatacgaatgactaaaattccacaaggctctgaatgtaagatttgtaccttaccgttcaccttataccattttaagacgtctaaacgaagcaataatatcattaaaacattaatatgtgtacggtgcgccactcagagaaacatttgtcaatgctgtatgcttgattcaagatggcacatccctatacaactgcgggatcatttaatatcccttgtgaacgaggaaaacgttatgacggaggaagcaaaaaacgacatgatgaaaaggtttctgtcactaaaaaacgtgaaattaggaggagctcagattacgagtgatccgtcagaagcagataatatcgttgataaattgaaaaatatacttctgcgagcaacatcagatggcccaagtactccgttaataaaaaacacaactgcattgtataaaaatgaaaaaggtgcaaatgaggtcaaaaacttggaaaagtacgcgtccgtggacatttctcatattttgaagaaactacccttgaatgaatcgtttttaaaaaacccctccaccaaatcattttttctgtataatattgatgcctcgatccctgaatggaaaataactgatacagtttcgcaattattgggtataaagaaatggaaggatggaaattcattgtcattaatagtcaaccacaaggcgaagtgtggtggcctaagatttcaatctagtgaattgggggagcggtttgtcagtaaaataagtgagacacttgtcacaccaaagggcctaaagagaggagttttacttattgaccgttttagaatctttatcattccgtggtcgtctggcttttcagctgcgtcattcggaaccaacactgcagaaaatataaaacttagtttaagtttgaataagcttattcagttggagctagggctttcttttcctacaaaaagcacagataacgcaaagaatgacaagaaaaagacatcaaaaaaagttcataaggacagatcaaagaaatcgaaacctcgcgctaacaagttaacaatatag

SEQ ID NO: 528 - DNA, 1095 bp, Artificial Sequence
  Description of Artificial Sequence: Synthetic polynucleotide
atgaatgatgaaattaatgagccaccgcccaatatatgtgagcagtgcttaggtgatgaggctaatataagaatgactaaaattccacaaggctctgaatgtaagatttgtaccttaccgttcaccttataccattttaagacgtctaaaagaagcaataatatcattaaaacattaatatgtgtaagatgcgccactcagagaaacatttgtcaatgctgtatgcttgattccagatggcacatccctatacaattaagagatcatttaatatcccttgtgaacgaggaaaacgttatgacggaggaagcaaaaaacgacatgatgaaaaggtttttaagtttgaaaaacgtgaaattaggaggagctcagattacgagtgatccgagtgaagcagataatatcgttgataaattgaaaaatatacttttaagagcaacatctgatggcccaagtactccgttaataaaaaacacaactgcattgtataaaaatgaaaaaggtgcaaatgaggtcaaaaacttggaaaagtacgcgtccgtggacatttctcatattttgaagaaattgcccttgaatgaaagttttttaaaaaacccctccaccaaaagtttttttttatataatattgatgccagcatccctgaatggaaaataactgatacagtttctcaattattgggtataaagaaatggaaggatggaaattctttgtctttaatagtcaaccacaaggcgaagtgtggtggcttaagatttcaatctagtgaattgggggagagatttgtcagtaaaataagtgagacacttgtcacaccaaagggcttgaagagaggagttttacttattgaccgttttagaatctttatcattccgtggtcttctggcttttctgctgcgtctttcggaaccaacactgcagaaaatataaaacttagtttaagtttgaataagcttattcagttggagttagggctttcttttcctacaaaaagcacagataacgcaaagaatgacaagaaaaagacaagtaaaaaagttcataaggacagatccaagaaatctaaacctcgcgctaacaagttaacaatatga

SEQ ID NO: 529 - DNA, 663 bp, Saccharomyces cerevisiae
atgtccataggttacaaagacaacttgatgtcaactattctagctaaagataggaaatgtgaatttcccatcaatttcgaatgttcgccctcccagataactcttatgcctgaaatgttctcttttaacaatgaaaggaaataccaaaccctgatacccttgatgaaaacatcacatctaattgatgatgacttgaaagataaattgaataagtgcgctttcgattttttctccggaaaacaagcgaacagaacgagtgacgggactatttcaagattaacagcaagtggaaaaacgtcaccgatactgccattgcaaaatattaatattgtaaaagcagagaataccggtaacggtaaatcagatccatatagctcaattaaaataagcaaaccgacaaaaaccgtgataaaattgaaatctacgaaaaccaatacagcaggacagaggactcgtcatttctgtaagatctgctctactgggttcaccacttctggtcatctttcaagacataacagaatccatacaggtgaaaaaaatcatatctgtccgcatgagggctgtggacagaggtttagtagacatgataactgtaatcagcattatcgaactcatgcaaacaagaagaaaagaaactggaagaggagggaggctagcagttga

SEQ ID NO: 530 - DNA, 663 bp, Artificial Sequence
  Description of Artificial Sequence: Synthetic polynucleotide
atgtccataggttacaaagacaacttgatgtctactattttggctaaagataggaaatgtgaatttcccatcaatttcgaatgttctccctcccagataactcttatgcctgaaatgttctcttttaacaatgaaaggaaataccaaaccttaatacccttgatgaaaacatctcatttgattgatgatgacttgaaagataaattgaataagtgcgctttcgattttttctccggaaaacaagcgaacagaacgagtgacgggactatttctagattaacagcaagtggaaaaacgtctccgatattgccattgcaaaatattaatattgtaaaagcagagaataccggtaacggtaaatctgatccatatagctctattaaaataagcaaaccgacaaaaaccgtgataaaattgaaatctacgaaaaccaatacagcaggacagaggactcgtcatttctgtaagatctgctctactgggttcaccacttctggtcatctttctagacataacagaatccatacaggtgaaaaaaatcatatctgtccgcatgagggctgtggacagaggtttagtagacatgataactgtaatcagcattatagaactcatgcaaacaagaagaaaagaaactggaagaggagggaggctagcagttga

SEQ ID NO: 531 - DNA, 633 bp, Saccharomyces cerevisiae
atgtccgtttccaagattgctttcgttttaagtgccattgcctctttggccgtcgctgacaccagcgccgccgaaactgctgaattgcaagctattatcggtgacatcaactctcatctttctgactacttgggtctagaaactggcaacagtggattccaaattccatctgatgtcttgagtgtgtatcaacaagtcatgacttacaccgatgacgcttacactaccttgtttagtgaattggactttgatgctatcactaagacaattgttaaattgccatggtacaccacaagattgagttctgaaatcgctgctgctcttgcctccgtttccccagcttcttccgaggctgcatcttcttccgaggctgcatcttcttccaaggctgcatcttcttccgaagctacatcctctgccgctccatcctcttctgctgccccatcttcttctgctgccccatcatcatctgccgaatcatcttctaaggccgtttcttcttctgtcgctccaactacctcttctgtcagcacttctacagtcgaaactgcttccaatgccggtcaaagagtcaatgcaggcgctgcctctttcggtgctgttgttgcaggtgcagctgctttattgttataa

SEQ ID NO: 532 - DNA, 633 bp, Artificial Sequence
  Description of Artificial Sequence: Synthetic polynucleotide
atgtccgtttccaagattgctttcgttttaagtgccattgcctctttggccgtcgctgacaccagcgccgccgaaactgctgaattgcaagctattatcggtgacatcaactctcatctttctgactacttgggtttggaaactggcaacagtggattccaaattccatctgatgtcttgagtgtgtatcaacaagtcatgacttacaccgatgacgcttacactaccttgtttagtgaattggactttgatgctatcactaagacaattgttaaattgccatggtacaccacaagattgagttctgaaatcgctgctgctcttgcctccgtttccccagcttcttccgaggctgcatcttcttccgaggctgcatcttcttccaaggctgcatcttcttccgaagctacatcctctgccgctccatcctcttctgctgccccatcttcttctgctgccccatcttcttctgccgaaagctcttctaaggccgtttcttcttctgtcgctccaactacctcttctgtcagcacttctacagtcgaaactgcttccaatgccggtcaaagagtcaatgcaggcgctgcctctttcggtgctgttgttgcaggtgcagctgctttattgttatga

SEQ ID NO: 533 - DNA, 1830 bp, Saccharomyces cerevisiae
atgctatcttcagaagattttggatcttctgggaaaaaggaaacttctcctgattcgatatcgatacgttcctttagtgccgggaataatttccaatcatcatcaagtgagaaaacttattctaagcaaaaatccgggagtgacaaacttatacatagatttgcggattcattcaaaagagccgagggtagcactacaagaactaagcaaataaatgaaaatacgtctgatttagaggatggcgttgagtctatcacgtcggattccaagttgaaaaagtccatgaagtcgcgccatgttgtcatgatgtctttagggacaggtattgggactggtcttttggtagctaatgcaaaaggtctacattacggtggtcctgctgcgctaataattggttacatcttggtttctttcgtgacgtacttcatgatccaagctgcaggtgagatggcggtaacctatccgactttaccagcaaatttcaacgcatactcctccatattcatttccaaatcatttggattcgccacagtatggctttactgtttccaatggctaacggttttgcctttagagttaataaccgcgtctatgactattcaattttggaatgataaaataaatccggacatttatattcttattttctatgttttcttagtattcattcatttcttcggtgtaaaagcctatggtgaaacggaattcatcttcaattgctgtaaaattttaatgattgcaggtttcattattctttctattgttatcaactgtggtggggccggaaatgacggttatatcggggccacttattggcataatccaggtgcttttgcaggtgacacatcgattggtaggttcaaaaacgtttgctatattttagttactgcttacttctcctttggtggtatggaattatttgcactaagtgttcaggaacagtctaaccctagaaaatctactccggtggcagccaagagaagcatttatcgtatcgttgtgatttatcttttgactatgatcctcattggattcaatgttccatataatgatgaccaactaatgggcgcaggcggatccgctacacatgcatctccctatgtcttagccgcttctattcacggtgtgaaaattgttccacatattatcaacgctgttattttgatttctgtggtttcagtggcaaattcctctttgtatgctggtccaagactgatttgctctttggcccaacaaggctacgcacccaagtttttagattacgttgacagagagggcaggcccttgagagctcttattgtgtgttgcgttttcggcgtcattgcttttgttgcagcttcatcaaaggaagagatcgtgtttacatggttagcagctatcgcaggcttgagtgaattattcacatggacttccataatgttgtcccatctgcgattcagacaagcaatgaaagtacagggaaggtctctagacgagttgggatacaaggccacaacagggatttggggttccatatacggtgtcttttttaatattttagtctttgttgcccaattttgggtagcattggcccccttaggtaatgggggcaaatgcgatgcggaatccttctttcaaaattatttagcttttccaatatggttggccttttacttcggatatatggtttacaaccgtgattttacgctattaaatcccctcgacaagattgaccttgacttccacagacgcatttatgatccagagctaatgagacaagaggacgaagaaaataaagaaaaactaaggaatatgtctttgatgagaaaagcttatcatttctggtgttaa

SEQ ID NO: 534 - DNA, 1830 bp, Artificial Sequence
  Description of Artificial Sequence: Synthetic polynucleotide
atgctttcttctgaagattttggatcttctgggaaaaaggaaacttctcctgattctatatccatacgttcctttagtgccgggaataatttccaatcttcttccagtgagaaaacttattctaagcaaaaatccgggagtgacaaacttatacatagatttgcggattctttcaaaagagccgagggtagcactacaagaactaagcaaataaatgaaaatacgtctgatttagaggatggcgttgagtctatcacgtctgattccaagttgaaaaagtccatgaagagtcgccatgttgtcatgatgtctttagggacaggtattgggactggtcttttggtagctaatgcaaaaggtttgcattacggtggtcctgctgcgttaataattggttacatcttggtttctttcgtgacgtacttcatgatccaagctgcaggtgagatggcggtaacctatccgactttaccagcaaatttcaacgcatactcctccatattcatttccaaaagttttggattcgccacagtatggctttactgtttccaatggttgacggttttgcctttagagttaataaccgcgtctatgactattcaattttggaatgataaaataaatccggacatttatattcttattttctatgttttcttagtattcattcatttcttcggtgtaaaagcctatggtgaaacggaattcatcttcaattgctgtaaaattttaatgattgcaggtttcattattctttctattgttatcaactgtggtggggccggaaatgacggttatatcggggccacttattggcataatccaggtgcttttgcaggtgacacatccattggtaggttcaaaaacgtttgctatattttagttactgcttacttctcctttggtggtatggaattatttgcattaagtgttcaggaacagtctaaccctagaaaatctactccggtggcagccaagagaagcatttatcgtatcgttgtgatttatcttttgactatgatcctcattggattcaatgttccatataatgatgaccaattgatgggcgcaggcggatccgctacacatgcatctccctatgtcttagccgcttctattcacggtgtgaaaattgttccacatattatcaacgctgttattttgatttctgtggtttctgtggcaaattcctctttgtatgctggtccaagattgatttgctctttggcccaacaaggctacgcacccaagtttttagattacgttgacagagagggcaggcccttgagagctcttattgtgtgttgcgttttcggcgtcattgcttttgttgcagcttcttccaaggaagagatcgtgtttacatggttagcagctatcgcaggcttgagtgaattattcacatggacttccataatgttgtcccatttgagattcagacaagcaatgaaagtacagggaaggtctttggacgagttgggatacaaggccacaacagggatttggggttccatatacggtgtcttttttaatattttagtctttgttgcccaattttgggtagcattggcccccttaggtaatgggggcaaatgcgatgcggaatccttctttcaaaattatttagcttttccaatatggttggccttttacttcggatatatggtttacaaccgtgattttacgttattaaatcccctcgacaagattgaccttgacttccacagacgcatttatgatccagagttgatgagacaagaggacgaagaaaataaagaaaaattgaggaatatgtctttgatgagaaaagcttatcatttctggtgttga

SEQ ID NO: 535 - DNA, 1860 bp, Saccharomyces cerevisiae
atggacgatagtgtcagtttcattgccaaagaggccagtccagcacaatattcgcacagtttgcatgaaagaacacacagtgaaaaacaaaagagagactttacaataacagaaaaacaagatgaggtatctggacaaacagcggagcctcgaaggacggacagcaaatccatattacagaggaaatgcaaagaattcttcgactcttttaaaaggcagctgccaccagaccgtaattccgaactagagtcccaagaaaaaaacaacctgacaaagtcgatcaaatctcgtcacttagtcatgatcagtctcggtaccggtataggtactggtttactggtcggtaatggtcaggtgctgggaacagctggtcctgccgggttagtccttggttacggaatagcatcgatcatgctttactgtatcatccaagcggcaggcgagttaggtctctgttatgcaggactaaccggcaattacaccagatatccttctattttagtcgacccttcgttgggttttgcagtttctgtggtttacaccattcaatggctaactgttctgcccttacaattggtcactgcggcaatgacagttaagtactggacgagtgtaaatgcagacatctttgttgccgtggttttcgtttttgtaattatcattaatctatttgggtccagaggctatgctgaagccgagttcattttcaattcctgtaagatattgatggtaatcggattcgtcattctggcgattatcatcaattgtggtggtgcaggtgacagaagatacatcggtgctgagtactggcacaatcctggtccatttgcccacggtttcaaaggtgtatgtacggttttctgttatgctgcattcagctacggtggaattgaagttctacttctatctgccgctgagcaggaaaacccaacaaaatctattcccaatgcctgcaaaaaagtggtataccgtattctgctgatttacatgctcaccaccattttggtttgctttcttgttccatacaacagtgacgaattattagggtctagtgactcctctggatcccatgcctccccatttgtcattgctgttgcatcacatggtgtcaaagttgtgcctcactttataaatgctgttattttgatttctgtcatttctgttgcaaactcttcgttatattctgggccaagattgttattatcattggcagaacaaggcgtcttacctaaatgcttagcatatgttgatagaaacggcaggcctttactttgtttttttgtttcccttgtctttggatgcattgggtttgtagccactagtgacgctgaagaacaggttttcacctggttattggcaatttctagtctttcgcaattatttatctggatgtcaatgtccttgtcacatataagatttagagatgccatggcaaagcaaggtcgttcgatgaacgaagttggatacaaagcacaaactggctattggggttcatggcttgcagttttaattgcaatcttcttccttgtgtgccagttctgggtagccatcgcacctgttaatgaacatggaaaacttaacgtcaaagtgtttttccaaaattatttggcaatgcccatcgttttgtttgcctattttggtcacaagatatacttcaaatcatggagcttttggattccagccgaaaaaattgatttggactcacatagaaacatatttgtgtctccatcgcttacagagatcgacaaagttgacgataacgatgatcttaaagagtatgaaaattcagaatcgtcggaaaatccaaacagctcgcgttcaagaaagttttttaagaggatgaccaatttctggtgctaa

SEQ ID NO: 536 - DNA, 1860 bp, Artificial Sequence
  Description of Artificial Sequence: Synthetic polynucleotide
atggacgatagtgtcagtttcattgccaaagaggccagtccagcacaatattctcacagtttgcatgaaagaacacacagtgaaaaacaaaagagagactttacaataacagaaaaacaagatgaggtatctggacaaacagcggagcctagaaggacggacagcaaatccatattacagaggaaatgcaaagaattcttcgactcttttaaaaggcagttaccaccagaccgtaattccgaattagagtcccaagaaaaaaacaacttaacaaagtctatcaaatctcgtcacttagtcatgatcagtctcggtaccggtataggtactggtttattggtcggtaatggtcaggtgttgggaacagctggtcctgccgggttagtccttggttacggaatagcatctatcatgctttactgtatcatccaagcggcaggcgagttaggtctctgttatgcaggattaaccggcaattacaccagatatccttctattttagtcgacccttctttgggttttgcagtttctgtggtttacaccattcaatggttgactgttttgcccttacaattggtcactgcggcaatgacagttaagtactggacgagtgtaaatgcagacatctttgttgccgtggttttcgtttttgtaattatcattaatttatttgggtccagaggctatgctgaagccgagttcattttcaattcctgtaagatattgatggtaatcggattcgtcattttggcgattatcatcaattgtggtggtgcaggtgacagaagatacatcggtgctgagtactggcacaatcctggtccatttgcccacggtttcaaaggtgtatgtacggttttctgttatgctgcattcagctacggtggaattgaagttttacttttatctgccgctgagcaggaaaacccaacaaaatctattcccaatgcctgcaaaaaagtggtataccgtattttattgatttacatgctcaccaccattttggtttgctttcttgttccatacaacagtgacgaattattagggtctagtgactcctctggatcccatgcctccccatttgtcattgctgttgcatctcatggtgtcaaagttgtgcctcactttataaatgctgttattttgatttctgtcatttctgttgcaaactcttctttatattctgggccaagattgttattatctttggcagaacaaggcgtcttacctaaatgcttagcatatgttgatagaaacggcaggcctttactttgtttttttgtttcccttgtctttggatgcattgggtttgtagccactagtgacgctgaagaacaggttttcacctggttattggcaatttctagtctttctcaattatttatctggatgtccatgtccttgtctcatataagatttagagatgccatggcaaagcaaggtcgttccatgaacgaagttggatacaaagcacaaactggctattggggttcttggcttgcagttttaattgcaatcttcttccttgtgtgccagttctgggtagccatcgcacctgttaatgaacatggaaaacttaacgtcaaagtgtttttccaaaattatttggcaatgcccatcgttttgtttgcctattttggtcacaagatatacttcaaaagttggagcttttggattccagccgaaaaaattgatttggactctcatagaaacatatttgtgtctccaagtcttacagagatcgacaaagttgacgataacgatgatcttaaagagtatgaaaattctgaaagttctgaaaatccaaacagcagccgttccagaaagttttttaagaggatgaccaatttctggtgctga

SEQ ID NO: 537 - DNA, 714 bp, Saccharomyces cerevisiae
atgaaaacggcctacttggcgtcattggtgctcatcgtatcgacagcatatgttattaggttgatagcgattctgccttttttccacactcaagcaggtacagaaaaggatacgaaagatggagttaacctactgaaaatacgaaaatcgtcaaagaaaccgctcaagatttttgtattcttaggatcgggaggtcatactggtgaaatgatccgtcttctagaaaattaccaggatcttttactgggtaagtcgattgtgtacttgggttattctgatgaggcttccaggcaaagattcgcccactttataaaaaaatttggtcattgcaaagtaaaatactatgaattcatgaaagctagggaagttaaagcgactctcctacaaagtgtaaagaccatcattggaacgttggtacaatcttttgtgcacgtggttagaatcagatttgctatgtgtggttcccctcatctgtttttattgaatgggcctggaacatgctgtataatatccttttggttgaaaattatggaacttcttttgcccctgttgggttcctcccatatagtttatgtagaatcgctggcaaggattaatactcctagtctgaccggaaaaatattatattgggtagtggatgaattcattgtccagtggcaagaattgagggacaattatttaccaagatccaagtggttcggcatccttgtttaa

SEQ ID NO: 538 - DNA, 714 bp, Artificial Sequence
  Description of Artificial Sequence: Synthetic polynucleotide
atgaaaacggcctacttggcgtctttggtgctcatcgtatctacagcatatgttattaggttgatagcgattttaccttttttccacactcaagcaggtacagaaaaggatacgaaagatggagttaacttattgaaaataagaaaatcttccaagaaaccgctcaagatttttgtattcttaggatctggaggtcatactggtgaaatgatccgtcttttagaaaattaccaggatcttttattgggtaagtctattgtgtacttgggttattctgatgaggcttccaggcaaagattcgcccactttataaaaaaatttggtcattgcaaagtaaaatactatgaattcatgaaagctagggaagttaaagcgactctcttacaaagtgtaaagaccatcattggaacgttggtacaatcttttgtgcacgtggttagaatcagatttgctatgtgtggttcccctcatttatttttattgaatgggcctggaacatgctgtataatatccttttggttgaaaattatggaacttcttttgcccttattgggttcctcccatatagtttatgtagaatctttggcaaggattaatactcctagtttaaccggaaaaatattatattgggtagtggatgaattcattgtccagtggcaagaattgagggacaattatttaccaagatccaagtggttcggcatccttgtttga

SEQ ID NO: 539 - DNA, 636 bp, Saccharomyces cerevisiae
atgctaagacgctctaaaaattccagcactaacacaaacgcagacaccaagaaaagacaatccatgcatttaggatccaaaagttcgctaatctcgctgactagcgaatttggccatggacactccaagacgaagcagaaaaaggaggagggcacagctccttctcaattcctgtctcctacgaataagagaagcacatctagtcagtcaaagttaaaaaggagcagcttgttactggacgaaacactgcttaaagactaccactcggccatgaggcacatgcaaacaaacgctgcaaaggaagaaaagctgcggatggctccatcaccaacgcagtcaacgaggagcgaatcagacgccagtctttcctccaccaagagctcgatctcttccatattttcccaagataatgactattccattcacgatttgttgtacgaagatattgaagagatggataaaacagacgctttcaaaattaacaacacaatagcaatcgatgattctaaagctctctttgtcttctgttcaaacgactcctcctcaaggacagcgtctatcgaaacattgcacgaatcaaatttggacaacctggatatgggttccagtagaaggacatcgttggactttttttaa

SEQ ID NO: 540 - DNA, 636 bp, Artificial Sequence
  Description of Artificial Sequence: Synthetic polynucleotide
atgttgagacgctctaaaaattccagcactaacacaaacgcagacaccaagaaaagacaatccatgcatttaggatccaaaagttctttgatctctttgactagcgaatttggccatggacactccaagacgaagcagaaaaaggaggagggcacagctccttctcaattcttatctcctacgaataagagaagcacatctagtcagtccaagttaaaaaggagcagcttgttattagacgaaacattgcttaaagactaccactccgccatgaggcacatgcaaacaaacgctgcaaaggaagaaaagttgagaatggctccatctccaacgcagagcacgaggagcgaaagtgacgccagtctttcctccaccaagagctctatctcttccatattttcccaagataatgactattccattcacgatttgttgtacgaagatattgaagagatggataaaacagacgctttcaaaattaacaacacaatagcaatcgatgattctaaagctctctttgtcttctgttctaacgactcctccagcaggacagcgtctatcgaaacattgcacgaaagtaatttggacaaccttgatatgggttccagtagaaggacatctttggactttttttga

SEQ ID NO: 541 - DNA, 645 bp, Saccharomyces cerevisiae
atgtcatttaacagtccattttttgatttctttgacaacatcaacaacgaagttgatgcctttaacagattgctgggtgaaggcggcttaagaggctacgcaccaagacgtcagttagcaaacacacccgcaaaggattctactggcaaggaagttgctagaccaaataactatgctggcgctctttatgatcccagagatgaaaccttagatgattggttcgacaatgacttgtccctgttcccatctggtttcggtttccctagaagtgtcgcagttccagttgatattttggaccatgacaacaactacgagttgaaagtcgtggttcctggtgtcaaaagcaagaaggacattgatattgagtaccatcaaaacaagaaccaaattttggtttctggtgaaattccatctaccttgaatgaagagagtaaagacaaggtcaaggtcaaggagagcagctctggtaagttcaagagagtcatcactttgccagactacccaggtgtggatgcagacaacattaaagcagactacgcaaatggtgttttgacattaacagttccaaaattgaagcctcagaaggatggtaagaaccacgtcaagaagattgaggtttcttctcaagaatcgtggggtaactaa

SEQ ID NO: 542 - DNA, 645 bp, Artificial Sequence
  Description of Artificial Sequence: Synthetic polynucleotide
atgagttttaacagtccattttttgatttctttgacaacatcaacaacgaagttgatgcctttaacagattgttgggtgaaggcggcttaagaggctacgcaccaagacgtcagttagcaaacacacccgcaaaggattctactggcaaggaagttgctagaccaaataactatgctggcgctctttatgatcccagagatgaaaccttagatgattggttcgacaatgacttgtcccttttcccatctggtttcggtttccctagaagtgtcgcagttccagttgatattttggaccatgacaacaactacgagttgaaagtcgtggttcctggtgtcaaaagcaagaaggacattgatattgagtaccatcaaaacaagaaccaaattttggtttctggtgaaattccatctaccttgaatgaagagagtaaagacaaggtcaaggtcaaggagagcagctctggtaagttcaagagagtcatcactttgccagactacccaggtgtggatgcagacaacattaaagcagactacgcaaatggtgttttgacattaacagttccaaaattgaagcctcagaaggatggtaagaaccacgtcaagaagattgaggtttcttctcaagaaagttggggtaactga

SEQ ID NO: 543 - DNA, 162 bp, Saccharomyces cerevisiae
atgcatatattaacgcgatcgagtaaaaatgcctttcccagaagtagaagtaggcaagacatccatatttcaagccacatccatagagatacctccaacagcgcgttgttgaagattttggtaattacaagaacgaggttagattccttcgttaaaacttag

SEQ ID NO: 544 - DNA, 162 bp, Artificial Sequence
  Description of Artificial Sequence: Synthetic polynucleotide
atgcatatattaacgagaagtagtaaaaatgcctttcccagaagtagaagtaggcaagacatccatatttctagccacatccatagagatacctccaacagcgcgttgttgaagattttggtaattacaagaacgaggttagattccttcgttaaaacttga

SEQ ID NO: 545 - DNA, 2877 bp, Saccharomyces cerevisiae
atggcggtaataagcgttaaacctcgacgaagagagaagatcctacaggaggtaaaaaacagctcggtatatcaaacggtatttgattccggtactactcaaatgcagataccgaaatatgagaacaagccattcaagcctccaagaagggttggatcaaataagtacacacaactcaaaccaaccgccactgcagtcacaacagcccctatatctaaagccaaagttactgtcaacttgaaaagaagcatttcggcgggacctactttaaatcttgccaagaagccgaataatctgtcctcaaatgaaaacactagatattttactatcatgtacaggaagcctactaccaaaaagcacaagacttggagtggtgatggctacgctaccttaaaagccagtagcgataagttatgcttttataacgaagcagggaaatttcttgggtcaagtatgctaccaagtgattcagattctctcttcgaaactcttttcaaagcaggctccaatgaagtacaattggattacgaattgaaggaaaatgcagaaatacgtagcgccaaagaagccttatcacaaaacatgggaaatcccagcccaccgaccacaagcacaacagaaacagtgccttctacgaagaatgacggtggcaaataccaaatgcctctgtctcagctgttttcactaaacactgtgaaaagattcaaatcagtaacaaagcaaacaaatgaacacatgaccacagtacctaaaaccagtcaaaattccaaagccaaaaaatattatccagtatttgatgtcaacaaaatcgataatcctatagtaatgaacaaaaatgcagccgctgaagttgacgtaattgttgatccattactgggcaaattcttgcgccctcatcagagggaaggggtgaagttcatgtatgattgcttaatgggcttggcaagaccaactattgaaaatccggatatcgattgtactactaaaagtttagtgttagaaaatgactcagatattagtggatgccttttggctgatgatatgggtttaggtaaaacactaatgagtataactttgatttggacattaattaggcaaactccttttgcatcaaaagtttcatgttcgcaatcaggcataccattaactggactttgtaagaagattttagtcgtttgtcccgttactttaataggaaattggaaaagagaatttggaaaatggttaaatttgtcaagaataggtgttttgacattaagctcaaggaattctcctgatatggataaaatggctgtcagaaattttttaaaagtgcaacgaacttatcaagtcttgattattggctacgaaaaactcttgagtgtttctgaagaattagagaaaaataaacatttgattgacatgctggtgtgtgacgaaggccatcgactaaaaaacggggcttctaaaattttaaatacgctgaagagtttagacataagaaggaagcttttgcttacgggaactcctatacaaaatgatcttaatgagtttttcactattatagatttcataaacccaggaatccttggaagcttcgcttctttcaaaagaagattcattatccctataactagagccagagacactgcaaacagatacaacgaagaattgttggaaaagggggaagaaaggtcaaaagagatgatagaaattacgaaaagatttattttgagacgaacaaatgcgattttagaaaagtaccttcctccaaagacggatataattttattctgtaaaccatacagccaacagatattggcattcaaagatattttgcagggcgcacgtttagattttggacaattgacgttcagttcttcgctaggactaataacattactgaaaaaggtttgtaactctcctggattggttggctcagatccctattacaaatcacatataaaggatacccaatctcaggacagctatagtcgttctttgaactctggtaagttaaaggtattaatgacattactagaaggtattaggaagggtaccaaggagaaggtcgtcgtagtgtctaactacactcaaacattggatataattgaaaatttgatgaatatggctgggatgtcacattgcagactcgacggttccatacctgctaaacaaagggactctatcgtcacatctttcaatcggaatccagccatatttggattcttgttgagtgcaaaatcgggaggtgtaggattgaatctagtcggtgcttcgcgacttattttatttgataatgattggaatccttcagtagatttgcaagcgatgtcacgaattcatagagatggtcaaaaaaagccgtgcttcatatatagacttgtcacaactgggtgtatcgatgagaaaatattgcaaaggcaattaatgaagaacagtttgagccaaaaatttctaggtgactcggagatgagaaataaagaatcttctaatgatgatcttttcaataaagaggacttgaaggacctgttttctgtccatacagataccaagagtaacacacatgacttaatttgttcttgcgatggtttaggtgaggaaattgaatatcctgaaacaaatcaacagcagaacaccgtagagctgagaaagcgtagcactacgacatggacaagtgcgctggatttacaaaagaaaatgaatgaagcagccaccaacgatgatgccaaaaagtcacaatacattaggcaatgtctcgttcattataagcatatcgatccagcaagacaagatgaattatttgatgaggttatcacagattcgttcaccgaattgaaagatagtattacctttgcgtttgtaaagcccggcgagatatgtctcagagaacaatga

SEQ ID NO: 546 - DNA, 2877 bp, Artificial Sequence
  Description of Artificial Sequence: Synthetic polynucleotide
atggcggtaataagcgttaaacctaggagaagagagaagatcttacaggaggtaaaaaacagctctgtatatcaaacggtatttgattccggtactactcaaatgcagataccgaaatatgagaacaagccattcaagcctccaagaagggttggaagtaataagtacacacaactcaaaccaaccgccactgcagtcacaacagcccctatatctaaagccaaagttactgtcaacttgaaaagaagcattagtgcgggacctactttaaatcttgccaagaagccgaataatttatcctctaatgaaaacactagatattttactatcatgtacaggaagcctactaccaaaaagcacaagacttggagtggtgatggctacgctaccttaaaagccagtagcgataagttatgcttttataacgaagcagggaaatttcttgggagtagtatgcttccaagtgattctgattctctcttcgaaactcttttcaaagcaggctccaatgaagtacaattggattacgaattgaaggaaaatgcagaaatacgtagcgccaaagaagccttatctcaaaacatgggaaatcccagcccaccgaccacaagcacaacagaaacagtgccttctacgaagaatgacggtggcaaataccaaatgcctttatctcagttattttctttgaacactgtgaaaagattcaaatctgtaacaaagcaaacaaatgaacacatgaccacagtacctaaaaccagtcaaaattccaaagccaaaaaatattatccagtatttgatgtcaacaaaatcgataatcctatagtaatgaacaaaaatgcagccgctgaagttgacgtaattgttgatccattattaggcaaattcttgcgccctcatcagagggaaggggtgaagttcatgtatgattgcttaatgggcttggcaagaccaactattgaaaatccggatatcgattgtactactaaaagtttagtgttagaaaatgacagtgatattagtggatgccttttggctgatgatatgggtttaggtaaaacattgatgagtataactttgatttggacattaattaggcaaactccttttgcatccaaagtttcttgttctcaaagtggcataccattaactggactttgtaagaagattttagtcgtttgtcccgttactttaataggaaattggaaaagagaatttggaaaatggttaaatttgtccagaataggtgttttgacattaagcagtaggaattctcctgatatggataaaatggctgtcagaaattttttaaaagtgcaaagaacttatcaagtcttgattattggctacgaaaaactcttgagtgtttctgaagaattagagaaaaataaacatttgattgacatgttggtgtgtgacgaaggccatagattgaaaaacggggcttctaaaattttaaatacgttgaagagtttagacataagaaggaagcttttgcttacgggaactcctatacaaaatgatcttaatgagtttttcactattatagatttcataaacccaggaatccttggaagcttcgcttctttcaaaagaagattcattatccctataactagagccagagacactgcaaacagatacaacgaagaattgttggaaaagggggaagaaaggtccaaagagatgatagaaattacgaaaagatttattttgagaagaacaaatgcgattttagaaaagtaccttcctccaaagacggatataattttattctgtaaaccatacagccaacagatattggcattcaaagatattttgcagggcgcacgtttagattttggacaattgacgttcagttcttctttgggattgataacattattgaaaaaggtttgtaactctcctggattggttggcagtgatccctattacaaatctcatataaaggatacccaatctcaggacagctatagtcgttctttgaactctggtaagttaaaggtattaatgacattattggaaggtattaggaagggtaccaaggagaaggtcgtcgtagtgtctaactacactcaaacattggatataattgaaaatttgatgaatatggctgggatgtcccattgcagactcgacggttccatacctgctaaacaaagggactctatcgtcacatctttcaatagaaatccagccatatttggattcttgttgagtgcaaaaagtggaggtgtaggattgaatttggtcggtgcttctaggcttattttatttgataatgattggaatccttctgtagatttgcaagcgatgtctagaattcatagagatggtcaaaaaaagccgtgcttcatatatagacttgtcacaactgggtgtatcgatgagaaaatattgcaaaggcaattaatgaagaacagtttgagccaaaaatttttaggtgactctgagatgagaaataaagaatcttctaatgatgatcttttcaataaagaggacttgaaggacttattttctgtccatacagataccaagagtaacacacatgacttaatttgttcttgcgatggtttaggtgaggaaattgaatatcctgaaacaaatcaacagcagaacaccgtagagttaagaaagcgtagcactacgacatggacaagtgcgttggatttacaaaagaaaatgaatgaagcagccaccaacgatgatgccaaaaagtctcaatacattaggcaatgtctcgttcattataagcatatcgatccagcaagacaagatgaattatttgatgaggttatcacagattctttcaccgaattgaaagatagtattacctttgcgtttgtaaagcccggcgagatatgtctcagagaacaatga

SEQ ID NO: 547 - DNA, 2931 bp, Saccharomyces cerevisiae
atgaaattaaaaagtgtattcagatcagttctaaagtaccggaaaacaaatttgagtttgcttctattaatcacctattcgattattacgttactctatatctttgatcatgaacgttataaactcaatctaccaaaagaggatgagcaccctgaattcaatgacttattagaaacagcatggggggacttacagattatcacggcctcttttcatccgtacacgtccaaagaaaatgataaagtacatgattacttgctcaaaagggttcttgaaattacagggaattcttcgtttgcaagtgtttcagatgacaaagaaagcgagagatccatattatttcagcaacaagatcctttcaatgagtcatctaggttttcgagagtgacatattttgaatcttctaatatattagttaagcttgagggtaaaaatcctgaggaagaagggttacttctttcagctcatttcgactctgtacccacaggatatggagctaccgatgacggcatgggtgtagtgtctttactagcgaacctcaagtaccatataaagcacagaccgaacaggactttaattttcaactttaataataatgaagagtttggcctactaggtgcatcaacttattttgatcactcatggtctaatttaaccaagtatgtgataaatttagagggaactggtgctggtggtaaagctgtactgttccgaacttcagatacttcaacagcaagaatataccaacagtctgttaaggaaaatccatttggtaactctatctaccagcaaggtttttatagcagatatgtcaggagtgagacagactacaagatttacgaagaaaatggcatgagaggctgggatgtcgcattctacaaaccgagaaacctttatcataccataaaggattcaatacaatatacctccaaggcatctttatggcatatgctacatacttccttacaattaagtgcatatgtggcttctaattcattggatacagctgaccaaacgccggcttgttattttgattttatcggtttgaagtttttcgttataagcgctaaaacgcttttctattggaactgcatatttctattagtttcacccgttgtggccattggcttgtatttaatttctcgtgatagaatgacttggaaatcttattcatggctatcgtggacacgctttcctctttcattagccgctggtattattgtccaaaagcttttctctaacgacataattcgttccaatcctttgacgttctcaaggaactacttttggcctatctcggcttttttcactcaagtaatttttaccagttatgttctgattaattgctccaatttttttttcccctgtgccgatatgaaaagcctatcaattatcgaattgttcattattttatggaccattttactttttacgtcgaagttattgtatagttccgactataggtataccgggctttatcctctctcgattttctttcttctgagcacaatagctgctatattgagactacttgcactagcgttgggaatgagaacaaggaagaggcttggtagagaatgtagggaccatcactccaattacagctcccattctcaaatagatatggaacgagacggtcaggaaaacttggaacaaccccaagatcaacttacatcgtcacaagacgatcaagcaagtatccaagatgataatgtgtcaactacttcagctggcccatcacataatgttgacgaggatcatggtatggattcatcgtcacaacaacatgatgaaagggtaccattactgaaggggtctaatagcatggaggaaggattgagtactagagaaaattctctaaaacttgagtataccgattatgcctggatcattcaatttttgctaattgtaccaataccatcatttattttgtttaacagtgtggatgttatcatggacgcactaaaccatactgtccaggaaggaagtaaggctacatttgatgtactcaggttcggaatggtgggcagtattttgatcgcgctaccaattttaccttttttctataaggtcaactatatcacaatttctttaactgcactgcttttcttgatttccgcatccaaaacgctcctagtgcacccctttaccaatagtaacccattaaaagtaaggttttctcaaaatattgatttgtctcaagggaacgctgccagtgtacatgtccttggaagagaaggaaattttttaaaacctatgctgcaagatttaccaagtataaaatatagctctacacatattaactgtacttccgtaaccaatggaatggaactttgtatgtatgatggaatgcaacctaatttattgagcacgaatggaaatacgaacatcagcagtatggtcaaggttcatgttttacataataaccgaaactcaacagagagatctccttacgaaccaatagttgcagagttacttttggaggtgaaggagaacagggcttgcactttaacttttgaaagtagacatcaggcgaagtcacctgtcagagaaatcacggtatatcaaaagaaaaattcggccccacagaaagctaatatcacgaagacgatcaagtctgcttctggcataaacgaactgcaattgcataaacttgatttcgatcaggaaacttaccatatcggagtccagtggtttccaaaacttttgacggatggaaatgtagaggatgacaagttggggacaaaagacgaactgtctgtttctattagctgttattggggagaatatgattcggaatcggttgtaaatggtaccgctgttaggaaaattccagcatttgatgaattgataaattacgcacctctaagtttttcctttaccaacgaacagaaaggattagttattgtcaaggatgctataattttataa

SEQ ID NO: 548 - DNA, 2931 bp, Artificial Sequence
  Description of Artificial Sequence: Synthetic polynucleotide
atgaaattaaaaagtgtattcagatctgttttgaagtacagaaaaacaaatttgagtttgcttttattaatcacctattctattattacgttactctatatctttgatcatgaacgttataaactcaatttaccaaaagaggatgagcaccctgaattcaatgacttattagaaacagcatggggggacttacagattatcacggcctcttttcatccgtacacgtccaaagaaaatgataaagtacatgattacttgctcaaaagggttcttgaaattacagggaattcttcttttgcaagtgtttctgatgacaaagaaagcgagagatccatattatttcagcaacaagatcctttcaatgagtcttctaggttttccagagtgacatattttgaatcttctaatatattagttaagcttgagggtaaaaatcctgaggaagaagggttacttctttctgctcatttcgactctgtacccacaggatatggagctaccgatgacggcatgggtgtagtgtctttattggcgaacctcaagtaccatataaagcacagaccgaacaggactttaattttcaactttaataataatgaagagtttggcttattgggtgcatctacttattttgatcactcttggtctaatttaaccaagtatgtgataaatttagagggaactggtgctggtggtaaagctgtattattcagaacttctgatacttctacagcaagaatataccaacagtctgttaaggaaaatccatttggtaactctatctaccagcaaggtttttatagcagatatgtcaggagtgagacagactacaagatttacgaagaaaatggcatgagaggctgggatgtcgcattctacaaaccgagaaacctttatcataccataaaggattctatacaatatacctccaaggcatctttatggcatatgttgcatacttccttacaattaagtgcatatgtggcttctaattctttggatacagctgaccaaacgccggcttgttattttgattttatcggtttgaagtttttcgttataagcgctaaaacgcttttctattggaactgcatatttttattagtttctcccgttgtggccattggcttgtatttaatttctcgtgatagaatgacttggaaatcttattcttggttatcttggacacgctttcctctttctttagccgctggtattattgtccaaaagcttttctctaacgacataattcgttccaatcctttgacgttctctaggaactacttttggcctatctctgcttttttcactcaagtaatttttaccagttatgttttgattaattgctccaatttttttttcccctgtgccgatatgaaaagcttatccattatcgaattgttcattattttatggaccattttactttttacgtccaagttattgtatagttccgactataggtataccgggctttatcctctctccattttctttcttttgagcacaatagctgctatattgagattacttgcattagcgttgggaatgagaacaaggaagaggcttggtagagaatgtagggaccatcactccaattacagctcccattctcaaatagatatggaaagagacggtcaggaaaacttggaacaaccccaagatcaacttacatcttctcaagacgatcaagcaagtatccaagatgataatgtgtccactactagtgctggcccatctcataatgttgacgaggatcatggtatggattcttcttctcaacaacatgatgaaagggtaccattattgaaggggtctaatagcatggaggaaggattgagtactagagaaaattctttgaaacttgagtataccgattatgcctggatcattcaatttttgttaattgtaccaataccatcttttattttgtttaacagtgtggatgttatcatggacgcattgaaccatactgtccaggaaggaagtaaggctacatttgatgtactcaggttcggaatggtgggcagtattttgatcgcgttaccaattttaccttttttctataaggtcaactatatcacaatttctttaactgcattacttttcttgatttccgcatccaaaacgctcttggtgcacccctttaccaatagtaacccattaaaagtaaggttttctcaaaatattgatttgtctcaagggaacgctgccagtgtacatgtccttggaagagaaggaaattttttaaaacctatgttacaagatttaccaagtataaaatatagctctacacatattaactgtacttccgtaaccaatggaatggaactttgtatgtatgatggaatgcaacctaatttattgagcacgaatggaaatacgaacatcagcagtatggtcaaggttcatgttttacataataacagaaactccacagagagatctccttacgaaccaatagttgcagagttacttttggaggtgaaggagaacagggcttgcactttaacttttgaaagtagacatcaggcgaagtctcctgtcagagaaatcacggtatatcaaaagaaaaattctgccccacagaaagctaatatcacgaagacgatcaagtctgcttctggcataaacgaattacaattgcataaacttgatttcgatcaggaaacttaccatatcggagtccagtggtttccaaaacttttgacggatggaaatgtagaggatgacaagttggggacaaaagacgaattatctgtttctattagctgttattggggagaatatgattctgaatctgttgtaaatggtaccgctgttaggaaaattccagcatttgatgaattgataaattacgcacctttgagtttttcctttaccaacgaacagaaaggattagttattgtcaaggatgctataattttatga

SEQ ID NO: 549 - DNA, 1065 bp, Saccharomyces cerevisiae
atggactatggctacttttttcccgcacaacgtattgaagaaacaaatggtgtggatttttggatagacagtaatgctgaatttacacagtctaaaagacctgactcttcaacatccactctttcgagggttttaacggacaccacgaatgtatccaataatagtggatcactcaaaagaaaaaccatcaagaacaaaatattcccacaaaggaaaatattcaacgatagcgaaaattttgactttggtaaagccaacactgattgtaagcatgtgtttaaaagtatttctaagcaactgatttttcttccaaggtgtttccaacatcacagtatccgaggctggatgaaagacagatactccgaatttggttataaaataaaaagaaatcaaaattgtcccccctcagcatgtgtacaggcactatacaatactagtagatccaataccgaagagtcaaaccccaacagtctggattctctgataatgtataaatacatgcgatactctgaaaagaaaaaggaattgatgtgcagattttgccaggggaataattggattctagctgaaaactacctaaaacatttattctttgcgcacggcattttgtctgaatttaagcctcacactttataccatttcgagtctaagctgttaaaaatccagggaaaacttaatttcaaaattcaagtattaaaagagccagagtttagcaaaaaaattttgaactctcttactgtatccatcattccctctcctttggcctactacactcaaacgttgaacgggggatttaggagaatccatgtgaaatgcccccactgcgaaaattggatccgtttgggttggtgtgaatacgatgaaatcattagggattcctttcaggatttcgagtctctaagaaacctcaatgctgattataatgggatgtcgtatattcaaacacgcaatagagaagacattgaaggtatatacgagaattattttacacactacatccaatgcgacttagccacgttccgaacgaaatgtttatatgtccaagttataacaaaaagcaattga

SEQ ID NO: 550 - DNA, 1065 bp, Artificial Sequence
  Description of Artificial Sequence: Synthetic polynucleotide
atggactatggctacttttttcccgcacaacgtattgaagaaacaaatggtgtggatttttggatagacagtaatgctgaatttacacagtctaaaagacctgactcttctacatccactctttctagggttttaacggacaccacgaatgtatccaataatagtggatctctcaaaagaaaaaccatcaagaacaaaatattcccacaaaggaaaatattcaacgatagcgaaaattttgactttggtaaagccaacactgattgtaagcatgtgtttaaaagtatttctaagcaattgatttttcttccaaggtgtttccaacatcacagtatcagaggctggatgaaagacagatactccgaatttggttataaaataaaaagaaatcaaaattgtcccccctctgcatgtgtacaggcattgtacaatactagtagatccaataccgaagagagcaaccccaacagtttggattctttgataatgtataaatacatgagatactctgaaaagaaaaaggaattgatgtgcagattttgccaggggaataattggattttggctgaaaactacttgaaacatttattctttgcgcacggcattttgtctgaatttaagcctcacactttataccatttcgagtctaagcttttaaaaatccagggaaaacttaatttcaaaattcaagtattaaaagagccagagtttagcaaaaaaattttgaactctcttactgtatccatcattccctctcctttggcctactacactcaaacgttgaacgggggatttaggagaatccatgtgaaatgcccccactgcgaaaattggatccgtttgggttggtgtgaatacgatgaaatcattagggattcctttcaggatttcgagtctttgagaaacctcaatgctgattataatgggatgtcttatattcaaacacgcaatagagaagacattgaaggtatatacgagaattattttacacactacatccaatgcgacttagccacgttcagaacgaaatgtttatatgtccaagttataacaaaaagcaattga

SEQ ID NO: 551 - DNA, 489 bp, Saccharomyces cerevisiae
atggtgatgctccattctaaaaacgttaaagggtttctggaaaacactttgaaaccgtatgatttgcattcggtagacttcaagacatcgtctttgcaatcgtctatgattataaccgccactaatgggggtatactgtcctatgcgacgtcaaacaacgatgtaccgaaaaattccataaacgaaataaactcggtcaataacttgaaaatgatgagcttattgattaaggataagtggtcagaggatgaaaacgatactgaggaacagcactccaatagctgttaccctgtggaaatcgactcctttaagacaaaaatatatacttacgaaatggaagatttacatacctgtgtcgcacagatacccaatagcgaccttttgctattgttcattgcggaaggtagcttcccttacggactactggtaattaaaattgaaagagctatgagagagttgactgatttgtttggctacaagctaggttga

SEQ ID NO: 552 - DNA, 489 bp, Artificial Sequence
  Description of Artificial Sequence: Synthetic polynucleotide
atggtgatgctccattctaaaaacgttaaagggtttttggaaaacactttgaaaccgtatgatttgcattctgtagacttcaagacatcttctttgcaatcttctatgattataaccgccactaatgggggtatattatcctatgcgacgtccaacaacgatgtaccgaaaaattccataaacgaaataaactctgtcaataacttgaaaatgatgagcttattgattaaggataagtggtctgaggatgaaaacgatactgaggaacagcactccaatagctgttaccctgtggaaatcgactcctttaagacaaaaatatatacttacgaaatggaagatttacatacctgtgtcgcacagatacccaatagcgaccttttgttgttgttcattgcggaaggtagcttcccttacggacttttggtaattaaaattgaaagagctatgagagagttgactgatttgtttggctacaagttgggttga

SEQ ID NO: 553 - DNA, 1290 bp, Saccharomyces cerevisiae
atgcaattcaagaacgctttgactgctactgctattctaagtgcctccgctctagctgctaactcaactacttctattccatcttcatgtagtattggtacttctgccactgctactgctcaagctgatttggacaaaatctccggttgtagtaccattgttggtaacttgaccatcaccggtgacttgggttccgctgctttggctagtatccaagagattgatggttccttgactatcttcaactccagttctttatcttctttctccgctgactctatcaagaaaatcaccggtgatttgaacatgcaagaattgatcattttgaccagtgcttctttcggttctttgcaagaagtagactccattaacatggtgactttgcctgccatttctaccttctccaccgatttacaaaatgctaacaacattattgtttctgacaccactttggaaagtgtcgaaggtttctccactttgaagaaggttaatgtttttaacatcaacaacaacagatatctaaactctttccaatcttccttggaaagtgtctctgactctttacaattctcttccaacggtgacaacactactttggccttcgacaatttggtctgggctaacaacatcactttgagagatgttaactctatttctttcggtagtttgcaaactgttaacgcttccttaggtttcattaacaacactttgccaagtttgaacttgacccaattgagcaaggttggtcaatctttgtctatcgtctccaacgatgaattatccaaggccgctttcagtaacttgactactgttggtggtggtttcatcattgctaacaacacacaattgaaggtcattgacggttttaacaaggttcaaactgttggtggtgccattgaagttactggtaacttctcaaccttggacttatcttctttgaagtctgttagaggtggtgctaacttcgactcttcttccagtaacttctcctgtaacgctttgaagaagttgcaaagtaacggtgctattcaaggtgactcttttgtttgcaagaacggtgccacatctacctccgttaagctatcctctacttctactgaatcatccaagagctctgctacatcttccgcttcttctagtggtgatgcctccaatgctcaagctaacgtttcagcttccgctagctcttcttcctcttcttctaagaagtctaagggtgctgctccagaacttgttccagccacttcattcatgggtgtcgttgctgctgttggcgttgccttactataa

SEQ ID NO: 554 - DNA, 1290 bp, Artificial Sequence
  Description of Artificial Sequence: Synthetic polynucleotide
atgcaattcaagaacgctttgactgctactgctattttaagtgcctccgctttggctgctaactctactacttctattccatcttcttgtagtattggtacttctgccactgctactgctcaagctgatttggacaaaatctccggttgtagtaccattgttggtaacttgaccatcaccggtgacttgggttccgctgctttggctagtatccaagagattgatggttccttgactatcttcaactccagttctttatcttctttctccgctgactctatcaagaaaatcaccggtgatttgaacatgcaagaattgatcattttgaccagtgcttctttcggttctttgcaagaagtagactccattaacatggtgactttgcctgccatttctaccttctccaccgatttacaaaatgctaacaacattattgtttctgacaccactttggaaagtgtcgaaggtttctccactttgaagaaggttaatgtttttaacatcaacaacaacagatatttgaactctttccaatcttccttggaaagtgtctctgactctttacaattctcttccaacggtgacaacactactttggccttcgacaatttggtctgggctaacaacatcactttgagagatgttaactctatttctttcggtagtttgcaaactgttaacgcttccttaggtttcattaacaacactttgccaagtttgaacttgacccaattgagcaaggttggtcaatctttgtctatcgtctccaacgatgaattatccaaggccgctttcagtaacttgactactgttggtggtggtttcatcattgctaacaacacacaattgaaggtcattgacggttttaacaaggttcaaactgttggtggtgccattgaagttactggtaacttctccaccttggacttatcttctttgaagtctgttagaggtggtgctaacttcgactcttcttccagtaacttctcctgtaacgctttgaagaagttgcaaagtaacggtgctattcaaggtgactcttttgtttgcaagaacggtgccacatctacctccgttaagttatcctctacttctactgaatcttccaagagctctgctacatcttccgcttcttctagtggtgatgcctccaatgctcaagctaacgtttctgcttccgctagctcttcttcctcttcttctaagaagtctaagggtgctgctccagaacttgttccagccacttctttcatgggtgtcgttgctgctgttggcgttgccttattatga

SEQ ID NO: 555 - DNA, 2895 bp, Saccharomyces cerevisiae
atggcccccccaccattccgtcctgaaaatgccattaagagagccgatgaacttatttctgttggcgaaaaacaagctgctttacaatctttgcatgatttcataactgccagaagaatccgttgggctacaccttcaactgttgagccagtcgtgtttaaattcttggaaattggtgttgaactaaagaaaggtaagctgctaaaagacggtttgcaccagtacaaaaaattaattcaaggatctaccgaaggtttggtttctgtcggtgccgttgcacgtaaattcattgatttagtcgaatctaaaatcgcttctgaacaaactagagctgacgaacttcaaaagcaagaaatcgatgatgatttggaaggtggtgttaccccagaaaatttgctgatttctgtttacgagtcagatcaatctgtggctggtttcaatgatgaagccattacttcatggttaagatttacttgggaatcatatcgtgcagtcttagatttattgagaaacaacgctttgttggaaattacttattctggtgtcgttaaaaaaactatgcatttctgtttgaagtatcagcgtaaaaacgaattcaagagattagctgaaatgttacgtcaacatttagatgctgctaactaccaacaaagtaaatcaggaaacaatttagttgacttgagcgatgctgataccttgcaacgttatttagatcaacgtttccaacaagtcgatgtttctgtcaagttggaattgtggcacgaggcttatagatccattgaggatgttttccacttaatgaaaatatccaaacgtgctcctaaaccatctactttggctaattactacgagaatctcgtaaaggtcttctttgtttccggtgatccattgttgcacactactgcctggaagaagttttataagttatattctaccaatccaagagccacggaagaagaattcaaaacatattcttctacaattttcctatccgctatttctacccaactagacgaaattccatctattggctacgatcctcatttacgtatgtaccgtttattaaacttggacgccaagccaactagaaaggaaatgttgcaatccattattgaagacgaatccatttatggtaaagttgacgaggaattgaaagaattgtacgatatcattgaagttaactttgatgtcgacacagtgaaacaacagctggaaaatttattagtcaaattgtcttctaaaacctacttcagccaatacatcgcacctttaagagacgtcattatgagaagggtttttgttgctgcctctcaaaaattcactactgtctcccagtccgaattatacaagctcgctaccctacctgctccgttagacttatctgcttgggacatcgaaaaatcgctgttacaagctgctgtggaagattatgtttcaattaccatcgatcatgaatctgctaaggttacattcgctaaagatccatttgacattttcgcatcaactgcttctaaagaagtctctgaagaagaaaacacagagccagaagtccaagaagaaaaggaggaaactgacgaagctcttgggccacaagaaactgaagacggtgaagaaaaggaagaagaatctgatcctgttattatccgcaattcttacatccacaacaagttgcttgaattatccaatgtcctacacgatgttgacagtttcaacaatgcttcatacatggaaaaggttagaattgcccgtgaaactttaattaagaagaacaaggatgaccttgaaaagatttccaagattgttgacgaacgtgtcaagagatctcaagagcaaaagcaaaaacatatggaacatgctgccctacatgctgaacaggatgctgaggtcagacaacagcgtattttggaagaaaaagctgctattgaagctaaattggaagaagaggctcaccgtcgcttaattgaaaagaagaaacgtgaatttgaagctatcaaagaaagagaaatcacaaagatgattactgaggtgaatgctaagggacatgtttacattgaccctaacgaagctaaaagcttagatcttgacaccattaaacaggttattatagctgaggtatcaaagaacaagagtgaattggaaagtcgtatggaatatgctatgaagaagttagatcatacggaaagagctttgagaaaggtcgaattgccattgctgcaaaaagaagttgacaagctacaagaaacagacacagcaaattatgaagctatgaagaaaaaaattgtcgacgccgccaaggccgaatacgaagccagaatggctgatcgtaagaacttggtcatggtctatgatgattatttgaagttcaaggagcatgtttcgggcactaaggaaagcgaattagctgccatccgcaaccaaaagaaggctgaattggaagctgccaaaaaggccagaattgaagaagttcgtaagcgtcgttacgaggaagccattgcaaggcgtaaggaagaaattgcaaatgctgaaagacagaagcgtgctcaagaactcgctgaggctacccgtaaacaaagagaaatcgaagaagctgctgccaagaaatcaactccatactctttccgcgcaggaaacagggaacctccaagtacaccaagcactctaccaaaggcgaccgtttctccagataaagctaaattggatatgatcgctcaaaaacaaagagaaatggaagaagccatcgaacagagactagccggtagaacagctggtgggtcctccccagctactccagctactccagcaaccccagcaaccccaactccatcttctggtccaaagaaaatgactatggctgaaaagttgagagccaagagattggccaaggggggcaggtaa

SEQ ID NO: 556 - DNA, 2895 bp, Artificial Sequence
  Description of Artificial Sequence: Synthetic polynucleotide
atggcccccccaccattccgtcctgaaaatgccattaagagagccgatgaacttatttctgttggcgaaaaacaagctgctttacaatctttgcatgatttcataactgccagaagaatccgttgggctacaccttccactgttgagccagtcgtgtttaaattcttggaaattggtgttgaattgaagaaaggtaagttattgaaagacggtttgcaccagtacaaaaaattaattcaaggatctaccgaaggtttggtttctgtcggtgccgttgcacgtaaattcattgatttagtcgaatctaaaatcgcttctgaacaaactagagctgacgaacttcaaaagcaagaaatcgatgatgatttggaaggtggtgttaccccagaaaatttgttaatttctgtttacgagtctgatcaatctgtggctggtttcaatgatgaagccattacttcttggttaagatttacttgggaaagttatcgtgcagtcttagatttattgagaaacaacgctttgttggaaattacttattctggtgtcgttaaaaaaactatgcatttctgtttgaagtatcagcgtaaaaacgaattcaagagattagctgaaatgttacgtcaacatttagatgctgctaactaccaacaaagtaaaagtggaaacaatttagttgacttgagcgatgctgataccttgcaacgttatttagatcaacgtttccaacaagtcgatgtttctgtcaagttggaattgtggcacgaggcttatagatccattgaggatgttttccacttaatgaaaatatccaaacgtgctcctaaaccatctactttggctaattactacgagaatctcgtaaaggtcttctttgtttccggtgatccattgttgcacactactgcctggaagaagttttataagttatattctaccaatccaagagccacggaagaagaattcaaaacatattcttctacaattttcttatccgctatttctacccaattggacgaaattccatctattggctacgatcctcatttacgtatgtaccgtttattaaacttggacgccaagccaactagaaaggaaatgttgcaatccattattgaagacgaatccatttatggtaaagttgacgaggaattgaaagaattgtacgatatcattgaagttaactttgatgtcgacacagtgaaacaacagttagaaaatttattagtcaaattgtcttctaaaacctacttcagccaatacatcgcacctttaagagacgtcattatgagaagggtttttgttgctgcctctcaaaaattcactactgtctcccagtccgaattatacaagctcgctaccttacctgctccgttagacttatctgcttgggacatcgaaaaatctttattacaagctgctgtggaagattatgtttctattaccatcgatcatgaatctgctaaggttacattcgctaaagatccatttgacattttcgcatctactgcttctaaagaagtctctgaagaagaaaacacagagccagaagtccaagaagaaaaggaggaaactgacgaagctcttgggccacaagaaactgaagacggtgaagaaaaggaagaagaatctgatcctgttattatccgcaattcttacatccacaacaagttgcttgaattatccaatgtcttgcacgatgttgacagtttcaacaatgcttcttacatggaaaaggttagaattgcccgtgaaactttaattaagaagaacaaggatgaccttgaaaagatttccaagattgttgacgaacgtgtcaagagatctcaagagcaaaagcaaaaacatatggaacatgctgccttgcatgctgaacaggatgctgaggtcagacaacagcgtattttggaagaaaaagctgctattgaagctaaattggaagaagaggctcaccgtcgcttaattgaaaagaagaaacgtgaatttgaagctatcaaagaaagagaaatcacaaagatgattactgaggtgaatgctaagggacatgtttacattgaccctaacgaagctaaaagcttagatcttgacaccattaaacaggttattatagctgaggtatccaagaacaagagtgaattggaaagtcgtatggaatatgctatgaagaagttagatcatacggaaagagctttgagaaaggtcgaattgccattgttgcaaaaagaagttgacaagttacaagaaacagacacagcaaattatgaagctatgaagaaaaaaattgtcgacgccgccaaggccgaatacgaagccagaatggctgatcgtaagaacttggtcatggtctatgatgattatttgaagttcaaggagcatgtttctggcactaaggaaagcgaattagctgccatccgcaaccaaaagaaggctgaattggaagctgccaaaaaggccagaattgaagaagttcgtaagcgtcgttacgaggaagccattgcaaggcgtaaggaagaaattgcaaatgctgaaagacagaagcgtgctcaagaactcgctgaggctacccgtaaacaaagagaaatcgaagaagctgctgccaagaaatctactccatactctttccgcgcaggaaacagggaacctccaagtacaccaagcactttaccaaaggcgaccgtttctccagataaagctaaattggatatgatcgctcaaaaacaaagagaaatggaagaagccatcgaacagagattggccggtagaacagctggtgggtcctccccagctactccagctactccagcaaccccagcaaccccaactccatcttctggtccaaagaaaatgactatggctgaaaagttgagagccaagagattggccaaggggggcaggtga

SEQ ID NO: 557 - DNA, 2277 bp, Saccharomyces cerevisiae
atgttcaagatacctggttttggaaaagctgctgcaaatcatactccaccagatatgacaaacatggatacccgtacacgccatttaaaggtgtcaaactgtccaaataactcctatgcactcgcaaacgtagctgctgtctcaccaaatgatttccctaataacatttatattattatcgataatttatttgttttcacaactagacactccaacgacattccaccgggaaccattggatttaacggtaaccagcgtacctggggtggttggtccctaaatcaagacgtgcaagcaaaagcatttgatttattcaagtattccggtaagcaatcgtatcttggttcaatagatatagatatctcattcagagctagaggtaaggcggtaagcacggtattcgatcaagatgagttagccaaacaatttgttcgttgctacgaatctcaaatattttctcccacccagtaccttatcatggagttccaaggccatttctttgacttaaaaattagaaatgtccaagcaatcgatttgggtgatattgaaccaacctccgctgttgcaactgggatagagacaaagggaattttgacaaaacaaacacaaattaattttttcaaaggaagagatggtttagttaatttgaaatcatcaaattcattaagaccaagatcaaatgctgtgatcagaccggatttcaagtttgaagatttgggtgtcggtggtttggataaagagtttactaaaattttcagaagagcgtttgcaagtcgaatctttcctccttcagttatagaaaaactgggtatttctcatgttaaaggtttgctattgtacggtcctccaggtactggtaagaccttaattgcaagaaagattggtacaatgctgaatgccaaagagcccaaaatcgtcaatggtccagaaattttgagtaagtacgttggttcttcagaagaaaacattcgtaatttatttaaggatgcagaagcagaatatagggccaagggtgaggaatcttccttacatattattattttcgatgagctggattctgttttcaagcagagaggttcaagaggtgatggtaccggtgtaggggacaatgtagttaatcaattgttagctaaaatggatggtgttgatcaattgaataatattttggttattggtatgaccaatcgtaaagatttaatagacagtgctcttttgcgtccaggtagatttgaagtccaagttgaaattcatttacccgatgaaaaaggaagactccaaattttcgacattcagacgaagaaaatgagggaaaataatatgatgagcgacgatgttaacttagctgagttagctgcgttaacaaaaaacttctctggtgctgagattgagggtttagtgaagagtgcaagttcttttgcaatcaacaaaaccgtcaacatcgggaaaggtgccacaaaacttaacactaaagatatagcaaaacttaaagtaacaagagaagactttttaaatgcactcaacgatgttactcccgcttttgggattagtgaagaagatttgaaaacatgtgtggaaggtggaatgatgctttattccgaacgagttaactcaatattgaagaacggagcccgttacgtccgccaagttcgcgagagtgataaatccaggttagtatctctattaatccacggccctgcagggtccggtaaaacagctttagccgctgaaattgctttaaaatctggattcccattcatcaggttaatttctcccaacgagttgtcaggcatgtcagaaagcgcaaaaattgcctatattgataacactttcagagatgcgtataaatctccactaaacattcttgttattgattcgttagagactctagttgattgggtaccaattggtccaagattctctaataacattttacaaatgctaaaggttgcattgaagcgtaaacccccacaagaccgtcgtttattgatcatgactactacatcagcttattcggtacttcaacaaatggatatcttgagttgcttcgacaatgagatagcagttccaaatatgaccaatttagatgaattgaacaacgtcatgatagaatcaaactttcttgacgatgctggtagagttaaagttattaatgaattatcaaggagctgtcctaacttcaatgtcggtattaaaaagaccttgaccaacattgaaaccgcaaggcacgatgaagatcccgtgaacgagcttgttgagttgatgacccaatccgcataa

SEQ ID NO: 558 - DNA, 2277 bp, Artificial Sequence
  Description of Artificial Sequence: Synthetic polynucleotide
atgttcaagatacctggttttggaaaagctgctgcaaatcatactccaccagatatgacaaacatggatacccgtacacgccatttaaaggtgtctaactgtccaaataactcctatgcactcgcaaacgtagctgctgtctctccaaatgatttccctaataacatttatattattatcgataatttatttgttttcacaactagacactccaacgacattccaccgggaaccattggatttaacggtaaccagcgtacctggggtggttggtccttgaatcaagacgtgcaagcaaaagcatttgatttattcaagtattccggtaagcaaagttatcttggttccatagatatagatatctctttcagagctagaggtaaggcggtaagcacggtattcgatcaagatgagttagccaaacaatttgttcgttgctacgaatctcaaatattttctcccacccagtaccttatcatggagttccaaggccatttctttgacttaaaaattagaaatgtccaagcaatcgatttgggtgatattgaaccaacctccgctgttgcaactgggatagagacaaagggaattttgacaaaacaaacacaaattaattttttcaaaggaagagatggtttagttaatttgaaatcttccaattctttaagaccaagatctaatgctgtgatcagaccggatttcaagtttgaagatttgggtgtcggtggtttggataaagagtttactaaaattttcagaagagcgtttgcaagtagaatctttcctccttctgttatagaaaaattgggtatttctcatgttaaaggtttgttgttgtacggtcctccaggtactggtaagaccttaattgcaagaaagattggtacaatgttgaatgccaaagagcccaaaatcgtcaatggtccagaaattttgagtaagtacgttggttcttctgaagaaaacattcgtaatttatttaaggatgcagaagcagaatatagggccaagggtgaggaatcttccttacatattattattttcgatgagttagattctgttttcaagcagagaggttccagaggtgatggtaccggtgtaggggacaatgtagttaatcaattgttagctaaaatggatggtgttgatcaattgaataatattttggttattggtatgaccaatcgtaaagatttaatagacagtgctcttttgcgtccaggtagatttgaagtccaagttgaaattcatttacccgatgaaaaaggaagactccaaattttcgacattcagacgaagaaaatgagggaaaataatatgatgagcgacgatgttaacttagctgagttagctgcgttaacaaaaaacttctctggtgctgagattgagggtttagtgaagagtgcaagttcttttgcaatcaacaaaaccgtcaacatcgggaaaggtgccacaaaacttaacactaaagatatagcaaaacttaaagtaacaagagaagactttttaaatgcactcaacgatgttactcccgcttttgggattagtgaagaagatttgaaaacatgtgtggaaggtggaatgatgctttattccgaaagagttaacagcatattgaagaacggagcccgttacgtccgccaagttcgcgagagtgataaatccaggttagtatctttattaatccacggccctgcagggtccggtaaaacagctttagccgctgaaattgctttaaaatctggattcccattcatcaggttaatttctcccaacgagttgagcggcatgtctgaaagcgcaaaaattgcctatattgataacactttcagagatgcgtataaatctccattgaacattcttgttattgattctttagagactttggttgattgggtaccaattggtccaagattctctaataacattttacaaatgttgaaggttgcattgaagcgtaaacccccacaagaccgtcgtttattgatcatgactactacatctgcttattctgtacttcaacaaatggatatcttgagttgcttcgacaatgagatagcagttccaaatatgaccaatttagatgaattgaacaacgtcatgatagaatctaactttcttgacgatgctggtagagttaaagttattaatgaattatctaggagctgtcctaacttcaatgtcggtattaaaaagaccttgaccaacattgaaaccgcaaggcacgatgaagatcccgtgaacgagcttgttgagttgatgacccaatccgcatga

SEQ ID NO: 559 - DNA, 3999 bp, Saccharomyces cerevisiae
atgactgaaagaataccaataaagaattatcaaagaacaaatgccaaagctttacttaaattgactgaaaaactttttaacaagaacttttttgatctctatttaacctctcagcaattggtcgttcttgaatacctgctgtcgatttcaagtgaagaagacaaactgaaagcatgggactatttcttaaagggaaacatagcattaaatgtcgaaaaatcatttccattaacccaagaagaagaacatcacggagcggtctctcctgccgttgacacacgatcagatgatgtatcatcacaaacaattaaggacaataacaatactaataccaacaccagtatcagcaatgaaaatcatgttgaaaatgaaattgaagataaaggcgataacgcaatagcaaatgaagataattttgtgaataatgacgaaagtgataatgttgaagaagacttattcaaattagatctagaggacttgaagcagcaaataagcggaacaaggtttattggaaacttatccttgaaaatcagatacgtcttgtggcagtgcgccatagattatatatactgtgatcgtaatgagtttggtgatgaaaatgatacagaatacaccctattagatgttgaagagaaggaggaagaggaaattggtaaaaatgagaagccacaaaacaaagaaggtatttcgaagttcgccgaggatgaagattacgacgatgaagacgagaactatgatgaagacagtacagacgtaaaaaatgtcgatgatcctccaaaaaatctcgattctatttcctcttctaatatcgaaattgacgatgaacgacgcttggtgctaaatatctcaatatcaaaagaaacactgtcaaagttaaaaacaaataatgtagaagaaattatgggaaattggaacaaaatttaccacagttttgaatacgataaagaaactatgataaagcgattaaaacttgaagaaagcgataaaatgatagagaaaggaaagaagaaacgaagtcgaagtgatttagaagcagctaccgatgaacaagatcgcgaaaatacaaatgatgagccagatactaatcaaaaattgcccactcctgaaggttcaacattcagcgatactgggaacaagcgccccaaacaaagtaatttagatttaacagtcaatctaggcatcgaaaatttatcattaaagcaccttctatcatctatccagcaaaaaaaatcccaattaggaatatcagattacgaattaaaacatctgattatggatgtcagaaaaaatcggtcaaaatggacatcggatgaaagaattgggcaagaggaattatacgaagcctgtgaaaaggttgttttggaacttagaaactacactgagcattctacaccatttctgaataaagtgagcaaaagagaagcccccaattatcatcaaatcatcaaaaagtccatggacctgaatactgttttaaaaaaactgaaaagctttcaatatgactccaaacaagaatttgtagacgatattatgctaatatggaaaaattgtttgacctataattcagatccttcacattttttgagagggcatgctattgctatgcagaagaaatctcttcagttgattcgcatgattccaaatatcacaatccgaaacagggctgatttagaaaaggaaattgaagatatggaaaaagacaaagactacgaattagatgaggaagaggaagttgctggttctggaagaaaaggattgaatatgggagctcatatgttggccaaagagaatggcaaggtgtcagaaaaagatagctctaaaaccgtcaaggatgaagcaccaaccaatgatgacaaactaacttctgtcatccctgagggggaaaaagagaaagataaaactgcttcatctactgtaacggtacacgaaaatgtaaataagaacgaaataaaagaaaatgggaaaaatgaagagcaagatatggttgaggaaagtagtaagactgaggattcatcaaaagatgctgatgctgccaaaaaggatacggaagacggactacaagataaaactgcagaaaataaggaggctggggaaaataatgaagaggaagaggatgatgatgacgaagatgaagacgaagacatggtcgactcccaatcttatttacttgaaaaggatgacgatagagacgatttggaaatatccgtgtggaaaactgtaactgccaaagttcgtgcggaaatttgcttaaaaagaactgaatattttaaaaatggaaaattaaatagtgattcagaggcgtttttgaaaaacccacaaagaatgaaaaggttcgaccagctttttcttgaatataaagagcagaaagctttagaatcatatcgtcaaaaaatagagcaaaattccattatgaaaaatggctttggaacagtactaaaacaggaagacgatgaccaattgcagtttcataatgatcactctttaaatggaaatgaagcttttgaaaagcaacccaatgatattgagttagatgataccagattcctacaggaatatgatattagtaacgccattcctgacatagtatacgagggagtaaatactaaaacattagacaagatggaagacgcttccgtggaccgcatgcttcaaaatggtatcaacaaacaaagcagatttctggctaacaaggatttaggactaacacctaaaatgaaccaaaatatcacactgattcagcaaattaggcacatatgccataaaatatccctgatcagaatgttacagagccctttatcggctcaaaactccagaagcaatcccaacgctttccttaacaaccacatttataattacactattattgatgactcactcgatattgatccggtgtcacagcttccaacgcatgattacaaaaacaacagggagctgatatggaaattcatgcataagaacatatctaaggttgctatggccaatgggtttgaaactgcccatccatcagcaataaacatgcttactgaaatcgccggggattacctatctaatctgataaagactttgaagcttcatcatgaaactaactccttaaatagaggaacaaatgtggaaatgctgcaaacaacactgttggaaaacggtatcaacaggccagacgatctattttcctatgttgaatctgaatttggtaaaaaaactaagaaacttcaggacatcaaacagaaactagaaagctttttgagagccttattaaggccaactttgcaggagttgtccgagagaaactttgaagacgagagccaaagcttttttacaggtgactttgccagcgaattgactggtgaagacttctttggttttagagagcttggattagaaaaggagtttggagttttgagttcatctgttccattacagttactgactactcagtttcaaactgttgacggggaaaccaaagtgcaggccaaaaagatccaaccggaagaatcagacagcattgtgtataagaaaattacaaaaggtatgctggatgctggttcattctggaatactctacttcccctattacaaaaagattatgaacgttccaaggcctatatagcaaagcaaagcaagtcatctgcaaatgataaaacctcaatgacttccacagaagacaattctttcgctttactagaagaggatcagtttgtctcaaagaaaaccgcaacgaaggcaagattacctcctactggtaagataagtaccacatacaaaaagaaaccgatcgcaagcgcgtttatacttccagaagaagacttggaaaacgacgtaaaagcggatccaacaacaactgtaaacgccaaagtgggtgcagaaaatgatggagattcttccttatttttgcgaacgcctcaacctttagatcctttggatatggatgatgcttttgatgataccaatatgggcagcaatagttcatttagcttgagccttcctcgccttaatcaataa

SEQ ID NO: 560 - DNA, 3999 bp, Artificial Sequence
  Description of Artificial Sequence: Synthetic polynucleotide
atgactgaaagaataccaataaagaattatcaaagaacaaatgccaaagctttacttaaattgactgaaaaactttttaacaagaacttttttgatctctatttaacctctcagcaattggtcgttcttgaatacttgctttctatttccagtgaagaagacaaattgaaagcatgggactatttcttaaagggaaacatagcattaaatgtcgaaaaaagttttccattaacccaagaagaagaacatcacggagcggtctctcctgccgttgacacaagaagtgatgatgtatcttctcaaacaattaaggacaataacaatactaataccaacaccagtatcagcaatgaaaatcatgttgaaaatgaaattgaagataaaggcgataacgcaatagcaaatgaagataattttgtgaataatgacgaaagtgataatgttgaagaagacttattcaaattagatttagaggacttgaagcagcaaataagcggaacaaggtttattggaaacttatccttgaaaatcagatacgtcttgtggcagtgcgccatagattatatatactgtgatcgtaatgagtttggtgatgaaaatgatacagaatacaccttattagatgttgaagagaaggaggaagaggaaattggtaaaaatgagaagccacaaaacaaagaaggtatttccaagttcgccgaggatgaagattacgacgatgaagacgagaactatgatgaagacagtacagacgtaaaaaatgtcgatgatcctccaaaaaatctcgattctatttcctcttctaatatcgaaattgacgatgaaaggcgcttggtgttgaatatctccatatccaaagaaacattatccaagttaaaaacaaataatgtagaagaaattatgggaaattggaacaaaatttaccacagttttgaatacgataaagaaactatgataaagagattaaaacttgaagaaagcgataaaatgatagagaaaggaaagaagaaaagaagtagaagtgatttagaagcagctaccgatgaacaagatcgcgaaaatacaaatgatgagccagatactaatcaaaaattgcccactcctgaaggttctacattcagcgatactgggaacaagcgccccaaacaaagtaatttagatttaacagtcaatttgggcatcgaaaatttatctttaaagcaccttttatcttctatccagcaaaaaaaatcccaattaggaatatctgattacgaattaaaacatttgattatggatgtcagaaaaaatagaagtaaatggacatctgatgaaagaattgggcaagaggaattatacgaagcctgtgaaaaggttgttttggaacttagaaactacactgagcattctacaccatttttgaataaagtgagcaaaagagaagcccccaattatcatcaaatcatcaaaaagtccatggacttgaatactgttttaaaaaaattgaaaagctttcaatatgactccaaacaagaatttgtagacgatattatgttgatatggaaaaattgtttgacctataattctgatccttctcattttttgagagggcatgctattgctatgcagaagaaatctcttcagttgattcgcatgattccaaatatcacaatcagaaacagggctgatttagaaaaggaaattgaagatatggaaaaagacaaagactacgaattagatgaggaagaggaagttgctggttctggaagaaaaggattgaatatgggagctcatatgttggccaaagagaatggcaaggtgtctgaaaaagatagctctaaaaccgtcaaggatgaagcaccaaccaatgatgacaaattaacttctgtcatccctgagggggaaaaagagaaagataaaactgcttcttctactgtaacggtacacgaaaatgtaaataagaacgaaataaaagaaaatgggaaaaatgaagagcaagatatggttgaggaaagtagtaagactgaggattcttctaaagatgctgatgctgccaaaaaggatacggaagacggattacaagataaaactgcagaaaataaggaggctggggaaaataatgaagaggaagaggatgatgatgacgaagatgaagacgaagacatggtcgactcccaatcttatttacttgaaaaggatgacgatagagacgatttggaaatatccgtgtggaaaactgtaactgccaaagttcgtgcggaaatttgcttaaaaagaactgaatattttaaaaatggaaaattaaatagtgattctgaggcgtttttgaaaaacccacaaagaatgaaaaggttcgaccagctttttcttgaatataaagagcagaaagctttagaaagttatcgtcaaaaaatagagcaaaattccattatgaaaaatggctttggaacagtattgaaacaggaagacgatgaccaattgcagtttcataatgatcactctttaaatggaaatgaagcttttgaaaagcaacccaatgatattgagttagatgataccagattcttacaggaatatgatattagtaacgccattcctgacatagtatacgagggagtaaatactaaaacattagacaagatggaagacgcttccgtggaccgcatgcttcaaaatggtatcaacaaacaaagcagatttttggctaacaaggatttaggattaacacctaaaatgaaccaaaatatcacattaattcagcaaattaggcacatatgccataaaatatccttaatcagaatgttacagagccctttatctgctcaaaactccagaagcaatcccaacgctttccttaacaaccacatttataattacactattattgatgactctctcgatattgatccggtgtcccagcttccaacgcatgattacaaaaacaacagggagttgatatggaaattcatgcataagaacatatctaaggttgctatggccaatgggtttgaaactgcccatccatctgcaataaacatgcttactgaaatcgccggggattacttgtctaatttgataaagactttgaagcttcatcatgaaactaactccttaaatagaggaacaaatgtggaaatgttacaaacaacattattggaaaacggtatcaacaggccagacgatttattttcctatgttgaatctgaatttggtaaaaaaactaagaaacttcaggacatcaaacagaaattagaaagctttttgagagccttattaaggccaactttgcaggagttgtccgagagaaactttgaagacgagagccaaagcttttttacaggtgactttgccagcgaattgactggtgaagacttctttggttttagagagcttggattagaaaaggagtttggagttttgagttcttctgttccattacagttattaactactcagtttcaaactgttgacggggaaaccaaagtgcaggccaaaaagatccaaccggaagaaagtgacagcattgtgtataagaaaattacaaaaggtatgcttgatgctggttctttctggaatactttacttcccttattacaaaaagattatgaacgttccaaggcctatatagcaaagcaaagcaagtcttctgcaaatgataaaacctccatgacttccacagaagacaattctttcgctttattggaagaggatcagtttgtctccaagaaaaccgcaacgaaggcaagattacctcctactggtaagataagtaccacatacaaaaagaaaccgatcgcaagcgcgtttatacttccagaagaagacttggaaaacgacgtaaaagcggatccaacaacaactgtaaacgccaaagtgggtgcagaaaatgatggagattcttccttatttttgagaacgcctcaacctttagatcctttggatatggatgatgcttttgatgataccaatatgggcagcaatagttcttttagcttgagccttcctcgccttaatcaatga

SEQ ID NO: 561 - DNA, 447 bp, Saccharomyces cerevisiae
atgtcttcttctaaacgtattgctaaagaactaagtgatctagaaagagatccacctacttcatgttcagccggtccagtcggcgatgatctatatcactggcaagcatccatcatgggacctgccgattccccatatgccggcggtgttttcttcttgtctatccatttcccaaccgactacccattcaagccaccaaagatctccttcacaaccaagatatatcatccaaatatcaatgccaatggtaacatctgtctggacatcctaaaggatcaatggtctccagctctaactctatcgaaggtcctattatccatctgttctttgttaacagacgctaatcctgacgatcctttagtaccagaaatcgctcatatctacaagactgacagacccaagtacgaagctacagccagagaatggacaaagaaatacgctgtataa

SEQ ID NO: 562 - DNA, 447 bp, Artificial Sequence
  Description of Artificial Sequence: Synthetic polynucleotide
atgtcttcttctaaacgtattgctaaagaattaagtgatttggaaagagatccacctacttcttgttctgccggtccagtcggcgatgatttatatcactggcaagcatccatcatgggacctgccgattccccatatgccggcggtgttttcttcttgtctatccatttcccaaccgactacccattcaagccaccaaagatctccttcacaaccaagatatatcatccaaatatcaatgccaatggtaacatctgtttggacatcttgaaggatcaatggtctccagctttgactttatccaaggtccttttatccatctgttctttgttaacagacgctaatcctgacgatcctttagtaccagaaatcgctcatatctacaagactgacagacccaagtacgaagctacagccagagaatggacaaagaaatacgctgtatga

SEQ ID NO: 563 - DNA, 1461 bp, Saccharomyces cerevisiae
atgagtcttaaagaagacgactttggcaaggataattctagaaatatagaatcatatactggtagaatttttgacgtatatatacaaaaagattcgtattcacagtcggccttggatgatatgtttccagaagccgtagtttcaaccgccgcttgtgtgaaaaatgaagcggaggataacatcaatctcatagacacgcatcctcaattcgaactggtaaatactggactgggtgctaaatcggacgatttgaaatctccatcagcaaaggctacgttcactgacaagcagaggaagaatgaagtaccaaatatatctgtgagcaactactttcccggacaaagtagcgaaacgtcgtcaacaacggaatcttggactatcggttgtgataagtggtcagaaaaggtagaagaggcattccttgaggcacttagactgataatgaaaaatgggaccacaaaaataaaaataagaaatgccaattttggaagaaacgagctgatttcattatatatcaagcacaaaaccaacgagttcagaaccaaaaagcaaatttcttcccatattcaagtctggaagaagaccatacaaaacaaaatcaaggactcgctgaccctatcatcaaaggagaaggagcttctacaccttatcgaacatggcgctgaacaaactactgaaaactcaaacctgttttatgacatatttgaagaaattatcgactctctaccttcagtcagtgattctggaagtttaacccctaaaaacctctatgtaagtaataatagcagtggattgtcagtacattcaaaactgcttacgccaatcactgcttccaacgagaaaaaaattgaaaatttcataaaaactaatgctgcatctcaagccaaaacccccctcatttacgctaagcacatttatgaaaacatagacggctacaagtgcgttccgtcaaagaggcctcttgaacaactttcccccacggaactccaccagggagatcgccccaataaggctagcttttccaacaagaaggcaatcctggagagtgcaaaaaaaatcgaaatagagcagagaaagataatcaacaaataccaaagaatttcccgcatacaagaacatgaaagtaatcctgagttcagttccaattccaattccggttcagagtacgaatcggaggaagaagtagtcccaagatcagccacagtcacacaactccaaagcagaccagtgccatactacaagaataatggaatgccctactcactctccaaagtacgaggaaggcccatgtatccaagacctgctgaagatgcttacaatgccaattatattcaaggtctgccccagtaccaaacatcttatttttcgcagctgttattatcatcaccccagcattacgaacattctccacatcaaaggaactttacgccatccaaccaatcgcatgggaacttttattaa

SEQ ID NO: 564 - DNA, 1461 bp, Artificial Sequence
  Description of Artificial Sequence: Synthetic polynucleotide
atgagtcttaaagaagacgactttggcaaggataattctagaaatatagaaagttatactggtagaatttttgacgtatatatacaaaaagattcttattctcagtctgccttggatgatatgtttccagaagccgtagtttctaccgccgcttgtgtgaaaaatgaagcggaggataacatcaatctcatagacacgcatcctcaattcgaattggtaaatactggattaggtgctaaaagtgacgatttgaaatctccatctgcaaaggctacgttcactgacaagcagaggaagaatgaagtaccaaatatatctgtgagcaactactttcccggacaaagtagcgaaacgtcttctacaacggaatcttggactatcggttgtgataagtggtctgaaaaggtagaagaggcattccttgaggcacttagattaataatgaaaaatgggaccacaaaaataaaaataagaaatgccaattttggaagaaacgagttgatttctttatatatcaagcacaaaaccaacgagttcagaaccaaaaagcaaatttcttcccatattcaagtctggaagaagaccatacaaaacaaaatcaaggactctttaaccttatcttccaaggagaaggagcttttacaccttatcgaacatggcgctgaacaaactactgaaaactccaacttgttttatgacatatttgaagaaattatcgactctttgccttctgtcagtgattctggaagtttaacccctaaaaacctctatgtaagtaataatagcagtggattgagtgtacattctaaattacttacgccaatcactgcttccaacgagaaaaaaattgaaaatttcataaaaactaatgctgcatctcaagccaaaacccccctcatttacgctaagcacatttatgaaaacatagacggctacaagtgcgttccgtccaagaggcctcttgaacaactttcccccacggaactccaccagggagatcgccccaataaggctagcttttccaacaagaaggcaatcttggagagtgcaaaaaaaatcgaaatagagcagagaaagataatcaacaaataccaaagaatttcccgcatacaagaacatgaaagtaatcctgagttcagttccaattccaattccggttctgagtacgaaagtgaggaagaagtagtcccaagatctgccacagtcacacaactccaaagcagaccagtgccatactacaagaataatggaatgccctactccctctccaaagtaagaggaaggcccatgtatccaagacctgctgaagatgcttacaatgccaattatattcaaggtttgccccagtaccaaacatcttatttttcccagcttttattatcttctccccagcattacgaacattctccacatcaaaggaactttacgccatccaaccaatctcatgggaacttttattga

SEQ ID NO: 565 - DNA, 2928 bp, Saccharomyces cerevisiae
atgttgtcgagactatctttattgagtaactcgagggcgttccaacaggccagatggcgcatttaccgcttaaaagtttcgccaactgtgcatgcttctcaataccatattctttctggtaggaaacttgctcaatctattcgagaaaaagccaatgatgagatacaagccattaagcttaagcatcctaatttcaagcctaccttgaaaatcattcaagtcggggccagaccagactcatctacgtacgtgaggatgaaattgaaagcttcaaaggacagcaatgtagactgtatcatagagaagttaccagcagaaatcactgaagttgagcttttgaagaaaattagtgacatcaatgatgatgactctatccatgggttgctaattcaactacctctaccgcgtcacttggatgaaaccacgattacaaacgctgtggactttaaaaaggacgttgatgggttccacagatataatgctggtgaattggctaaaaaaggagggaaaccatacttcataccatgtactccttatggttgcatgaaattacttgaagaagctcatgttaagttagatggtaagaacgccgtcgtgttaggcagatcaagtatcgtcggaaatccaattgcttcgttgttgaaaaatgcgaatgccactgttactgtctgtcatagtcatacaaggaacattgcagaagtggtctcccaagctgatatagttatcgcagcttgcggtattcctcaatacgttaaatcagactggattaaagaaggcgccgtggttattgatgtaggtatcaactacgtacctgatatcagtaagaaaagtgggcaaaaattagttggtgatgttgattttgattctgtaaaggaaaagacatcttatattacccctgttcctggtggagtgggtccaatgactgtcgctatgcttgtttccaatgtactattagctgctaaaaggcaattcgtggaatctgaaaagcttccagttatcaaacctcttccattacacttagaaagtccagtgccttcagatattgatatatcaagagctcagagtcctaagcatatcaagcaagttgccgaggagttgggaatccactctcacgaattagaattatacggccactataaggcaaaaatttctccaaatatttttaaaagattagaatctagagaaaacggtaagtacgtccttgttgcaggtattactccgactccattgggtgaaggtaaatccactacgactatggggttggtgcaggctttatccgctcatttagggaaaccatccatcgcgaacgttagacaaccatctcttggcccaaccctgggtgtcaaaggtggtgctgctggtggtggttatgcccaagttattcctatggacgagttcaatttacatttgaccggggatattcatgctatcagcgctgcgaacaatcttcttgcagcagctatcgacactagaatgttccatgaagccactcagaagaatgatagtacattttacaagagactagttccaagaaaaaaaggcatcagaaagtttaccccatccatgcagagaaggcttaaaagattggatattgaaaaagaagaccctgatgctttaacacctgaagaagtcaaaagatttgctagattgaacataaatcccgatactatcactatcagaagagttgtcgacatcaatgacaggatgttaagacaaattaccattggcgaagccgctacggagaagggttttacaaggaccactggattcgatatcactgttgcctctgaattaatggccattttagctctatctaaaagcttacacgagatgaaggaacgtattggacgcatggttattggtgctgattatgataacaaaccagtaacagtagaagatattggctgtaccggtgctctgactgcattattacgtgacgctataaagcctaacttaatgcaaactttggaagggacccccgtaatggttcacgctggtcctttcgccaacatctccatcggcgcatcatcagtaattgcagacttaatggcattgaagcttgttggttcagaaaagaacccgttaaatgacaagaacatccatgaacctggttatgtagttactgaagcaggattcgattttgccatgggtggtgaaagattctttgatatcaaatgtcgttcctctggattggtgccagatgcagttgtcttagtcgcaaccgtaagagctttgaaatctcatggaggtgctccaaatgttaagcccggacaatcattaccaaaagaatacacagaggaaaacatcgattttgttgccaagggtgttagtaatttggttaagcagattgaaaacatcaaaacgtttggaataccagtcgttgtagcaatcaacagatttgaaacagactcacaggcagagattgaggtaatcaagaaagcagccttgaatgctggcgcatctcatgccgttacttctaatcactggatggaaggtggtaaaggtgcagtagaattagcacatgctgtggtagatgcaacgaaagaaccaaagaactttaactttttgtacgacgtcaatagctccatcgaggacaagcttaccagcatcgtccaaaaaatgtatggtggggcaaaaatcgaagtatcaccagaagcccaaaaaaagatagacacctacaaaaaacaaggcttcggtaatcttcccatctgtattgctaagacacaatattcattatcccatgatccatcattaaagggtgttcctagaggttttacgttccccatcagggatgtgagagcttcaataggtgcaggttatttatacgctttggctgcagaaattcaaaccataccgggtctatcgacatatgctggttacatggcagtagaagtcgacgacgacggtgaaattgaaggtctattttaa

SEQ ID NO: 566 - DNA, 2928 bp, Artificial Sequence
  Description of Artificial Sequence: Synthetic polynucleotide
atgttgtccagattatctttattgagtaacagcagggcgttccaacaggccagatggcgcatttaccgcttaaaagtttctccaactgtgcatgcttctcaataccatattctttctggtaggaaacttgctcaatctattagagaaaaagccaatgatgagatacaagccattaagcttaagcatcctaatttcaagcctaccttgaaaatcattcaagtcggggccagaccagactcttctacgtacgtgaggatgaaattgaaagcttccaaggacagcaatgtagactgtatcatagagaagttaccagcagaaatcactgaagttgagcttttgaagaaaattagtgacatcaatgatgatgactctatccatgggttgttaattcaattacctttgccgcgtcacttggatgaaaccacgattacaaacgctgtggactttaaaaaggacgttgatgggttccacagatataatgctggtgaattggctaaaaaaggagggaaaccatacttcataccatgtactccttatggttgcatgaaattacttgaagaagctcatgttaagttagatggtaagaacgccgtcgtgttaggcagaagtagtatcgtcggaaatccaattgcttctttgttgaaaaatgcgaatgccactgttactgtctgtcatagtcatacaaggaacattgcagaagtggtctcccaagctgatatagttatcgcagcttgcggtattcctcaatacgttaaaagtgactggattaaagaaggcgccgtggttattgatgtaggtatcaactacgtacctgatatcagtaagaaaagtgggcaaaaattagttggtgatgttgattttgattctgtaaaggaaaagacatcttatattacccctgttcctggtggagtgggtccaatgactgtcgctatgcttgtttccaatgtattgttagctgctaaaaggcaattcgtggaatctgaaaagcttccagttatcaaacctcttccattacacttagaaagtccagtgccttctgatattgatatatctagagctcagagtcctaagcatatcaagcaagttgccgaggagttgggaatccactctcacgaattagaattatacggccactataaggcaaaaatttctccaaatatttttaaaagattagaatctagagaaaacggtaagtacgtccttgttgcaggtattactccgactccattgggtgaaggtaaatccactacgactatggggttggtgcaggctttatccgctcatttagggaaaccatccatcgcgaacgttagacaaccatctcttggcccaaccttgggtgtcaaaggtggtgctgctggtggtggttatgcccaagttattcctatggacgagttcaatttacatttgaccggggatattcatgctatcagcgctgcgaacaatcttcttgcagcagctatcgacactagaatgttccatgaagccactcagaagaatgatagtacattttacaagagattggttccaagaaaaaaaggcatcagaaagtttaccccatccatgcagagaaggcttaaaagattggatattgaaaaagaagaccctgatgctttaacacctgaagaagtcaaaagatttgctagattgaacataaatcccgatactatcactatcagaagagttgtcgacatcaatgacaggatgttaagacaaattaccattggcgaagccgctacggagaagggttttacaaggaccactggattcgatatcactgttgcctctgaattaatggccattttagctttatctaaaagcttacacgagatgaaggaacgtattggacgcatggttattggtgctgattatgataacaaaccagtaacagtagaagatattggctgtaccggtgctttgactgcattattacgtgacgctataaagcctaacttaatgcaaactttggaagggacccccgtaatggttcacgctggtcctttcgccaacatctccatcggcgcatcttctgtaattgcagacttaatggcattgaagcttgttggttctgaaaagaacccgttaaatgacaagaacatccatgaacctggttatgtagttactgaagcaggattcgattttgccatgggtggtgaaagattctttgatatcaaatgtcgttcctctggattggtgccagatgcagttgtcttagtcgcaaccgtaagagctttgaaatctcatggaggtgctccaaatgttaagcccggacaatctttaccaaaagaatacacagaggaaaacatcgattttgttgccaagggtgttagtaatttggttaagcagattgaaaacatcaaaacgtttggaataccagtcgttgtagcaatcaacagatttgaaacagactctcaggcagagattgaggtaatcaagaaagcagccttgaatgctggcgcatctcatgccgttacttctaatcactggatggaaggtggtaaaggtgcagtagaattagcacatgctgtggtagatgcaacgaaagaaccaaagaactttaactttttgtacgacgtcaatagctccatcgaggacaagcttaccagcatcgtccaaaaaatgtatggtggggcaaaaatcgaagtatctccagaagcccaaaaaaagatagacacctacaaaaaacaaggcttcggtaatcttcccatctgtattgctaagacacaatattctttatcccatgatccatctttaaagggtgttcctagaggttttacgttccccatcagggatgtgagagcttctataggtgcaggttatttatacgctttggctgcagaaattcaaaccataccgggtttatctacatatgctggttacatggcagtagaagtcgacgacgacggtgaaattgaaggtttattttga

SEQ ID NO: 567 - DNA, 570 bp, Saccharomyces cerevisiae
atggctaatttacgtactcaaaagagacttgccgcttctgtcgtcggtgtcggtaagagaaaggtttggttagatccaaatgaaacctctgaaattgctcaagccaactccagaaacgccattagaaaattggttaagaacggtaccatcgtaaagaaggccgttaccgtccactctaaatccagaaccagagcccatgctcaatctaagagagaaggtcgtcacagtggttacggtaagagaaagggtaccagagaagcccgtttaccatcccaagttgtctggatcagaagattacgtgtcttgagaagattattggctaagtaccgtgatgctggtaagattgacaagcacttgtaccatgttttgtacaaggaatctaagggtaacgctttcaaacacaagagagccttggttgaacacatcatccaagctaaggctgatgctcaacgtgaaaaggctttgaacgaagaagctgaagctagaagattgaagaacagagctgctcgtgacagaagagctcaaagagttgctgaaaagagagatgctttattgaaggaagacgcttaa

SEQ ID NO: 568 - DNA, 570 bp, Artificial Sequence
  Description of Artificial Sequence: Synthetic polynucleotide
atggctaatttacgtactcaaaagagacttgccgcttctgtcgtcggtgtcggtaagagaaaggtttggttagatccaaatgaaacctctgaaattgctcaagccaactccagaaacgccattagaaaattggttaagaacggtaccatcgtaaagaaggccgttaccgtccactctaaatccagaaccagagcccatgctcaatctaagagagaaggtcgtcacagtggttacggtaagagaaagggtaccagagaagcccgtttaccatcccaagttgtctggatcagaagattacgtgtcttgagaagattattggctaagtaccgtgatgctggtaagattgacaagcacttgtaccatgttttgtacaaggaatctaagggtaacgctttcaaacacaagagagccttggttgaacacatcatccaagctaaggctgatgctcaacgtgaaaaggctttgaacgaagaagctgaagctagaagattgaagaacagagctgctcgtgacagaagagctcaaagagttgctgaaaagagagatgctttattgaaggaagacgcttga

SEQ ID NO: 569 - DNA, 924 bp, Saccharomyces cerevisiae
atgagtagcgacgctaagcaacaagaaacaaactttgccattaatttcttaatgggtggtgtgagtgcggccatcgctaaaactgctgcctcaccaatcgaaagagtcaagatcttgatccaaaatcaagatgaaatgatcaagcaaggaactttagataaaaagtattccggtatcgtggattgtttcaagagaactgcaaagcaagagggactaatatccttttggcgaggaaatactgccaatgttattcgttattttcccactcaagctttgaacttcgccttcaaagataagattaagttgatgtttggtttcaagaaagaggaaggctatggtaaatggtttgcaggtaatctggcttctggtggtgcagctggtgctctttcgttattatttgtttattctttagattttgccagaaccagacttgctgctgatgcaaaatcgtcgaaaaagggtggcgctcgccaattcaatgggttgactgatgtttataaaaagaccttgaaatcggatggtatcgcaggattatacagaggattcatgccatcagtagtgggtatcgtggtttatagaggactatatttcggtatgtttgattctctcaagccactggtgctaactggttcattagatggttcattcttggcttcatttttattgggatgggtggtcactacaggtgcctcaacatgttcttatccattagacacagtgagaagaagaatgatgatgacttcaggtcaagcagtaaagtacaacggtgctatagattgtctcaaaaaaatcgtagcttctgaaggtgtagggtcattgttcaaaggctgcggggcaaatatcttgagaagtgttgctggagctggtgttatttccatgtatgaccagttgcaaatgatattgttcggtaaaaaattcaaatga

SEQ ID NO: 570 - DNA, 924 bp, Artificial Sequence
  Description of Artificial Sequence: Synthetic polynucleotide
atgagtagcgacgctaagcaacaagaaacaaactttgccattaatttcttaatgggtggtgtgagtgcggccatcgctaaaactgctgcctctccaatcgaaagagtcaagatcttgatccaaaatcaagatgaaatgatcaagcaaggaactttagataaaaagtattccggtatcgtggattgtttcaagagaactgcaaagcaagagggattgatatccttttggagaggaaatactgccaatgttattcgttattttcccactcaagctttgaacttcgccttcaaagataagattaagttgatgtttggtttcaagaaagaggaaggctatggtaaatggtttgcaggtaatttggcttctggtggtgcagctggtgctctttctttattatttgtttattctttagattttgccagaaccagacttgctgctgatgcaaaaagcagtaaaaagggtggcgctcgccaattcaatgggttgactgatgtttataaaaagaccttgaaatctgatggtatcgcaggattatacagaggattcatgccatctgtagtgggtatcgtggtttatagaggattgtatttcggtatgtttgattctctcaagccattggtgttgactggttctttagatggttctttcttggcttcttttttattgggatgggtggtcactacaggtgcctctacatgttcttatccattagacacagtgagaagaagaatgatgatgacttctggtcaagcagtaaagtacaacggtgctatagattgtctcaaaaaaatcgtagcttctgaaggtgtagggtctttgttcaaaggctgcggggcaaatatcttgagaagtgttgctggagctggtgttatttccatgtatgaccagttgcaaatgatattgttcggtaaaaaattcaaatga

SEQ ID NO: 571 - DNA, 258 bp, Saccharomyces cerevisiae
atgtcatctgctctatacaaacaaagcacaaattttactcattctaccggttctttcttgcaaagcgcacctgttgaactgacgacagtcagtgggtaccaggagtttttgaagaagcaagagaaaaagaactatgaaattcaaacagttttaagcgaggataaatcacatggttatgtgctaaaggacggcgaagtcatcgctaatatcattggtgaggccaaagattatcttttggatttggccggccaggcttga

SEQ ID NO: 572 - DNA, 258 bp, Artificial Sequence
  Description of Artificial Sequence: Synthetic polynucleotide
atgtcttctgctttgtacaaacaaagcacaaattttactcattctaccggttctttcttgcaaagcgcacctgttgaattgacgacagtcagtgggtaccaggagtttttgaagaagcaagagaaaaagaactatgaaattcaaacagttttaagcgaggataaatctcatggttatgtgttgaaggacggcgaagtcatcgctaatatcattggtgaggccaaagattatcttttggatttggccggccaggcttga

SEQ ID NO: 573 - DNA, 2841 bp, Saccharomyces cerevisiae
atgtcgcagacaattacatctctagatccgaattgtgttattgtattcaataaaacttcgagtgcaaacgagaagagtttgaatgtcgaattcaaacgtttgaatatacattctattatcgaacctggccatgatctgcaaacaagctatgcgtttattagaatccatcaggataatgcgaaaccgcttttttcatttttgcagaatctggacttcattgaatccatcataccatatcatgatactgaattgtccgatgatttgcataaactgatttctatcagcaaatcaaaaatactggaggctccaaaacagtatgagttgtacaacctatcgaatttgaccaataatcccaaacaatccttatattttgcattcttacagaactatataaaatggttgattcccttctccttttttggattatcaattagatttttatctaattttacgtatgaattcaattccacatactcgctgttcgccatcctatggacattgtcatttacagccttttggctttataaatatgaaccattttggtctgatagactgagtaaatactcatcattttctaccattgagtttcttcaagataaacagaaagcccaaaaaaaagctagttcggttatcatgttgaagaaatgttgttttattcctgtggctttgttgtttggcgcaatattactatcattccagctatattgttttgcgttggaaattttcatcaagcaaatttataacggcccaatgatttccatcttgtcttttttgcctactatacttatttgcacgtttactccggttttaactgtgatttacaacaaatatttcgtagaaccaatgacaaagtgggaaaatcatagcagtgttgtgaatgcaaagaaatctaaagaagctaagaactttgttattatttttctatccagttacgttcccctattaattacactatttctttatctgccaatggggcatttgttgaccgcagaaataagaactaaggttttcaatgccttttcaatattggcccgtttacctacccatgattcagattttattattgatacaaagcgctatgaagatcaatttttctactttattgttatcaaccaactgattcaatttagcatggaaaactttgttccaagccttgttagcattgctcagcagaaaattaatggaccaaatcctaactttgtcaaagctgagagtgaaatcggtaaagctcaactcagctcatcagatatgaaaatttggtcaaaggttaagtcgtaccaaacagacccctggggagcaacatttgatttggacgccaacttcaaaaagcttcttctacaattcgggtatcttgttatgttttctacaatttggccactagctccatttatctgtttgatagtcaatttgattgtttaccaagtcgatttgaggaaagctgtgctttatagtaaacctgagtattttccatttccaatctacgataagccatcctctgtgtctaatacccaaaaactgacggttggtctatggaactctgtcttagttatgttctccatcttaggttgtgttatcactgctactttgacctatatgtaccagagctgtaatataccaggtgtcggcgctcatacttccatccatacgaataaagcttggtacctagcaaatccaataaaccactcgtggataaatattgtactatatgctgtttttattgagcatgttagtgttgctattttcttccttttctctagtattttgaaatcttcccatgatgacgttgcaaatggcattgtgccaaagcatgtagttaacgtgcaaaacccaccaaaacaagaagtctttgaaaaaattccctcccctgaatttaattcgaataacgaaaaagaactagttcaaagaaaagggtctgcgaatgagaagttgcaccaagaactcggtgagaaacagcctgcctcttctgccaatggatatgaggcacatgctgccactcatgccaacaatgatccgtcttctttatcctcagcctcctcgccttcattatcttcttcttcttctagcagcaaaaccggtgtagtcaaagctgttgataacgatacagccggatctgctggtaaaaagccattggccacagaaagtactgaaaaaagaaattctttggtgaaggtgcctaccgttggctcatatggtgttgcgggcgccactttaccagaaacaattccaacatctaaaaattactacttaaggtttgatgaggacggtaaatccattagggatgcgaaatccagtgcagaatcttccaacgccaccaataacaacaccttaggcacggaaagtaagcttttgccagatggtgacgccgttgatgcactaagtagaaaaattgatcaaatacccaaaattgctgttactggtggcgaaaataacgaaaatacccaggccaaagacgatgctgccactaagactccactcattaaagatgcaaatattaagcctgttgtcaacgcagctgttaacgataaccaatcgaaggtttcagtggctactgaacaaacaaaaaagactgaagtaagcacgaaaaatggcccatcaagatctatttccacgaaggaaactaaggattctgcgagaccatctaataacaatactactactactactactacagatgctactcagccccaccatcatcatcaccaccaccgccatcgtgatgctggagtgaagaatgtcacgaacaattctaagacaaccgaatcctcttcctcttcatcggcggcaaaggaaaaaccaaaacataaaaaggggctattgcataagctgaaaaagaagctttaa

SEQ ID NO: 574 - DNA, 2841 bp, Artificial Sequence
  Description of Artificial Sequence: Synthetic polynucleotide
atgtctcagacaattacatctttagatccgaattgtgttattgtattcaataaaacttctagtgcaaacgagaagagtttgaatgtcgaattcaaacgtttgaatatacattctattatcgaacctggccatgatttgcaaacaagctatgcgtttattagaatccatcaggataatgcgaaaccgcttttttcttttttgcagaatttggacttcattgaatccatcataccatatcatgatactgaattgtccgatgatttgcataaattgatttctatcagcaaatctaaaatattggaggctccaaaacagtatgagttgtacaacttatccaatttgaccaataatcccaaacaatccttatattttgcattcttacagaactatataaaatggttgattcccttctccttttttggattatccattagatttttatctaattttacgtatgaattcaattccacatactctttattcgccatcttatggacattgagttttacagccttttggctttataaatatgaaccattttggtctgatagattaagtaaatactcttctttttctaccattgagtttcttcaagataaacagaaagcccaaaaaaaagctagttctgttatcatgttgaagaaatgttgttttattcctgtggctttgttgtttggcgcaatattattatctttccagttatattgttttgcgttggaaattttcatcaagcaaatttataacggcccaatgatttccatcttgtcttttttgcctactatacttatttgcacgtttactccggttttaactgtgatttacaacaaatatttcgtagaaccaatgacaaagtgggaaaatcatagcagtgttgtgaatgcaaagaaatctaaagaagctaagaactttgttattatttttctttccagttacgttcccttattaattacattatttctttatttaccaatggggcatttgttgaccgcagaaataagaactaaggttttcaatgccttttccatattggcccgtttacctacccatgattctgattttattattgatacaaagcgctatgaagatcaatttttctactttattgttatcaaccaattgattcaatttagcatggaaaactttgttccaagccttgttagcattgctcagcagaaaattaatggaccaaatcctaactttgtcaaagctgagagtgaaatcggtaaagctcaactcagctcttctgatatgaaaatttggtccaaggttaagtcctaccaaacagacccctggggagcaacatttgatttggacgccaacttcaaaaagcttcttttacaattcgggtatcttgttatgttttctacaatttggccattggctccatttatctgtttgatagtcaatttgattgtttaccaagtcgatttgaggaaagctgtgctttatagtaaacctgagtattttccatttccaatctacgataagccatcctctgtgtctaatacccaaaaattaacggttggtttatggaactctgtcttagttatgttctccatcttaggttgtgttatcactgctactttgacctatatgtaccagagctgtaatataccaggtgtcggcgctcatacttccatccatacgaataaagcttggtacttggcaaatccaataaaccactcttggataaatattgtattatatgctgtttttattgagcatgttagtgttgctattttcttccttttctctagtattttgaaatcttcccatgatgacgttgcaaatggcattgtgccaaagcatgtagttaacgtgcaaaacccaccaaaacaagaagtctttgaaaaaattccctcccctgaatttaatagtaataacgaaaaagaattggttcaaagaaaagggtctgcgaatgagaagttgcaccaagaactcggtgagaaacagcctgcctcttctgccaatggatatgaggcacatgctgccactcatgccaacaatgatccgtcttctttatcctctgcctcctccccttctttatcttcttcttcttctagcagcaaaaccggtgtagtcaaagctgttgataacgatacagccggatctgctggtaaaaagccattggccacagaaagtactgaaaaaagaaattctttggtgaaggtgcctaccgttggctcctatggtgttgcgggcgccactttaccagaaacaattccaacatctaaaaattactacttaaggtttgatgaggacggtaaatccattagggatgcgaaatccagtgcagaatcttccaacgccaccaataacaacaccttaggcacggaaagtaagcttttgccagatggtgacgccgttgatgcattaagtagaaaaattgatcaaatacccaaaattgctgttactggtggcgaaaataacgaaaatacccaggccaaagacgatgctgccactaagactccactcattaaagatgcaaatattaagcctgttgtcaacgcagctgttaacgataaccaatccaaggtttctgtggctactgaacaaacaaaaaagactgaagtaagcacgaaaaatggcccatctagatctatttccacgaaggaaactaaggattctgcgagaccatctaataacaatactactactactactactacagatgctactcagccccaccatcatcatcaccaccaccgccatcgtgatgctggagtgaagaatgtcacgaacaattctaagacaaccgaatcctcttcctcttcttctgcggcaaaggaaaaaccaaaacataaaaaggggttattgcataagttgaaaaagaagctttga

SEQ ID NO: 575 - DNA, 1065 bp, Saccharomyces cerevisiae
atgtcattgtgggtagataaatacagacctaagtccttgaatgctctttcacataatgaagagttgacaaattttctaaaatcgttatctgatcagcctcgtgatttacctcatcttttactgtatggaccaaatggtacaggtaagaaaacgcgttgtatggcattattggagtccatatttggacctggagtctatagattgaaaattgatgtcagacaatttgtcactgcttcgaacagaaaactagaactgaatgtggtcagctcgccataccatttagagatcacgccaagtgatatgggtaacaatgatagaattgtcatccaagaactattgaaagaagtggctcaaatggaacaagtggactttcaagattctaaggatggacttgcccatagatataagtgtgttattatcaacgaggcgaactcgttaacaaaagatgctcaagctgctttaagacgtaccatggaaaaatactccaaaaacattaggttgataatggtctgcgattcgatgtcgcctataattgctcctatcaaatcccgttgtctgttgattcgttgtcctgcaccaagcgatagcgaaatttcaactatcttgtctgatgtggtgacaaatgaaagaatacaactagaaacaaaggatattttaaaaagaattgctcaggcatcgaatggaaacttgcgagtctccctattaatgcttgaatctatggcactgaacaacgaattagcattgaaaagcagtagccctataataaaaccagattggattatagtgatccataaattaacgaggaaaatcgttaaagagagatctgtcaattctttaatcgaatgcagagctgtcctatacgatttactagctcattgtatacctgccaatatcatcttaaaggaactaacgttttctttgttggatgtggaaaccctgaataccacgaataaatcgtccataattgaatactcaagtgtttttgacgaaagattatcacttggaaacaaagcaatattccatttggaagggttcatagcaaaagttatgtgctgtctagattaa

SEQ ID NO: 576 - DNA, 1065 bp, Artificial Sequence
  Description of Artificial Sequence: Synthetic polynucleotide
atgtctttgtgggtagataaatacagacctaagtccttgaatgctctttctcataatgaagagttgacaaattttttgaaatctttatctgatcagcctcgtgatttacctcatcttttattatatggaccaaatggtacaggtaagaaaacgcgttgtatggcattattggagtccatatttggacctggagtctatagattgaaaattgatgtcagacaatttgtcactgcttctaacagaaaattagaattgaatgtggtcagctctccataccatttagagatcacgccaagtgatatgggtaacaatgatagaattgtcatccaagaattattgaaagaagtggctcaaatggaacaagtggactttcaagattctaaggatggacttgcccatagatataagtgtgttattatcaacgaggcgaactctttaacaaaagatgctcaagctgctttaagacgtaccatggaaaaatactccaaaaacattaggttgataatggtctgcgattctatgtctcctataattgctcctatcaaatcccgttgtttgttgattcgttgtcctgcaccaagcgatagcgaaatttctactatcttgtctgatgtggtgacaaatgaaagaatacaattggaaacaaaggatattttaaaaagaattgctcaggcatctaatggaaacttgagagtctccttattaatgcttgaatctatggcattgaacaacgaattagcattgaaaagcagtagccctataataaaaccagattggattatagtgatccataaattaacgaggaaaatcgttaaagagagatctgtcaattctttaatcgaatgcagagctgtcttgtacgatttattagctcattgtatacctgccaatatcatcttaaaggaattgacgttttctttgttggatgtggaaaccttgaataccacgaataaatcttccataattgaatactctagtgtttttgacgaaagattatctcttggaaacaaagcaatattccatttggaagggttcatagcaaaagttatgtgctgtttggattga

SEQ ID NO: 577 - DNA, 777 bp, Saccharomyces cerevisiae
atgttagaagcaaaatttgaagaagcatcccttttcaagagaataattgatggtttcaaagattgtgtccagttggtcaatttccaatgtaaagaagatggtatcattgcacaagctgtcgatgactcaagagttctattggtctccttggaaataggtgtcgaagccttccaagaatatagatgtgaccatcctgttacgttaggtatggatctaacctcactaagtaaaatcctacgttgtggtaacaacaccgatacattaacactaattgctgacaacacaccggattccatcatcttattatttgaggataccaagaaagaccgtatagccgaatactctctgaaattgatggatatcgatgctgatttcttaaagattgaagaattacagtacgactccaccctgtcattgccatcttccgaattctctaaaattgttcgtgacttgtcccaattgagtgattctattaatatcatgatcaccaaagaaacaataaagtttgtagctgacggtgatatcggatcaggttcagtcataataaaaccattcgtggatatggaacatcctgaaacaagcatcaaacttgaaatggatcaacctgtcgacttgacgttcggagctaaatatttattggacatcattaagggctcctccctttctgatagagttggtatcaggctctccagcgaagctcctgctttattccaatttgatttgaagagtgggttcctacagtttttcttggctcctaaatttaatgacgaagaataa

SEQ ID NO: 578 - DNA, 777 bp, Artificial Sequence
  Description of Artificial Sequence: Synthetic polynucleotide
atgttagaagcaaaatttgaagaagcatcccttttcaagagaataattgatggtttcaaagattgtgtccagttggtcaatttccaatgtaaagaagatggtatcattgcacaagctgtcgatgacagtagagttttattggtctccttggaaataggtgtcgaagccttccaagaatatagatgtgaccatcctgttacgttaggtatggatttgacctctttgagtaaaatcttacgttgtggtaacaacaccgatacattaacattaattgctgacaacacaccggattccatcatcttattatttgaggataccaagaaagaccgtatagccgaatactctttgaaattgatggatatcgatgctgatttcttaaagattgaagaattacagtacgactccaccttatctttgccatcttccgaattctctaaaattgttcgtgacttgtcccaattgagtgattctattaatatcatgatcaccaaagaaacaataaagtttgtagctgacggtgatatcggatctggttctgtcataataaaaccattcgtggatatggaacatcctgaaacaagcatcaaacttgaaatggatcaacctgtcgacttgacgttcggagctaaatatttattggacatcattaagggctcctccctttctgatagagttggtatcaggctctccagcgaagctcctgctttattccaatttgatttgaagagtgggttcttacagtttttcttggctcctaaatttaatgacgaagaatga

SEQ ID NO: 579 - DNA, 300 bp, Saccharomyces cerevisiae
atggccgcaactaaagaagcaaagcaaccaaaggaaccaaagaagaggaccaccaggagaaagaaggatcctaacgcccctaagaggggcttgtcagcttatatgttctttgctaatgaaaacagagacattgtccgttccgagaatcctgacgtaacttttggccaagtaggcagaatattgggtgagaggtggaaggccttaactgctgaagaaaagcaaccctatgaatctaaggctcaagcagacaagaagagatacgaatctgaaaaggaattgtacaatgctacacgtgcttga

SEQ ID NO: 580 - DNA, 300 bp, Artificial Sequence
  Description of Artificial Sequence: Synthetic polynucleotide
atggccgcaactaaagaagcaaagcaaccaaaggaaccaaagaagaggaccaccaggagaaagaaggatcctaacgcccctaagaggggcttgtctgcttatatgttctttgctaatgaaaacagagacattgtccgttccgagaatcctgacgtaacttttggccaagtaggcagaatattgggtgagaggtggaaggccttaactgctgaagaaaagcaaccctatgaatctaaggctcaagcagacaagaagagatacgaatctgaaaaggaattgtacaatgctacacgtgcttga

SEQ ID NO: 581 - DNA, 369 bp, Saccharomyces cerevisiae
atggtacccgcacctgggtcacgtgcattcccctcacccgtttttttaggtggtgtcttttttgtttttttttttaggtggcgcggcaactataaagtacagcaagtgaggttgaggcaatactgggagtttacactatgggagacagctcctaacaccaagcagaaaaacgactttttcgcaaaaacattaacatatataaaactagcgctatggccgcaactaaagaagcaaagcaaccaaaggaaccaaagaagaggaccaccaggagaaagaaggatcctaacgcccctaagaggggcttgtcagcttatatgttctttgctaatgaaaacagagacattgtccgttccgagaatcctgacgtaa

SEQ ID NO: 582 - DNA, 369 bp, Artificial Sequence
  Description of Artificial Sequence: Synthetic polynucleotide
atggtacccgcacctgggtctcgtgcattcccctctcccgtttttttaggtggtgtcttttttgtttttttttttaggtggcgcggcaactataaagtacagcaagtgaggttgaggcaatactgggagtttacattatgggagacagctcctaacaccaagcagaaaaacgactttttcgcaaaaacattaacatatataaaattagcgctttggccgcaattgaagaagcaaagcaaccaaaggaaccaaagaagaggaccaccaggagaaagaaggatcttaacgcccttgagaggggcttgtcagcttatatgttctttgttgatgaaaacagagacattgtccgttccgagaatcttaacgtga

SEQ ID NO: 583 - DNA, 330 bp, Saccharomyces cerevisiae
atgtcgttctttttaaatagtctaaggggcaaccaggaggtctcgcaagagaagctagacgttgcaggagtgcaattcgatgcgatgtgctcgactttcaacaatattctcagtacgtgtcttgagaaatgtattccgcatgagggctttggtgagcctgatctaacgaaaggtgagcaatgctgcatagacagatgtgtggcaaagatgcattacagcaatcgcctcattggaggatttgtacaaacacgaggtttcgggccagagaatcagctacgacattattcgcgatttgtggccaaagaaatagctgatgattccaaaaaatag

SEQ ID NO: 584 - DNA, 330 bp, Artificial Sequence
  Description of Artificial Sequence: Synthetic polynucleotide
atgagtttctttttaaatagtttgaggggcaaccaggaggtctctcaagagaagttggacgttgcaggagtgcaattcgatgcgatgtgctctactttcaacaatattctcagtacgtgtcttgagaaatgtattccgcatgagggctttggtgagcctgatttgacgaaaggtgagcaatgctgcatagacagatgtgtggcaaagatgcattacagcaatcgcctcattggaggatttgtacaaacaagaggtttcgggccagagaatcagttaagacattattctagatttgtggccaaagaaatagctgatgattccaaaaaatga

SEQ ID NO: 585 - DNA, 1404 bp, Saccharomyces cerevisiae
atgtttaagtctgttgtttattcggttctagccgctgctttagttaatgcaggtacaattcccctcggagagttagccgatgttgccaaaattggcactcaggaagacatattcccattcctgggtggtgccgggccatacttctctttccctggcgactatggtatttctcgtgacttgcctgaaggttgtgaaatgaaacaattgcaaatgcttgccagacatggtgaaagatacccaacttacagtaaaggtgctaccatcatgaaaacatggtataagttgagcaattacacacgtcaattcaacggctcattgtcattcttgaacgatgattacgagtttttcatccgtgatgacgatgatttggaaatggaaaccacttttgccaactcagacaatgttttgaatccatacactggtgagatggatgctaagagacatgctcgtgagtttttagcgcaatatggctacatgttcgaaaatcaaaccagtttcccaattttcgccgctagttctgaaagggttcatgacactgctcaatatttcattgatggtttaggtgaccaattcaacatctccttgcagactgtcagtgaagccatgtccgccggcgcaaacactttgagtgctggtaatgcgtgcccaggatgggatgaagatgctaacgatgacattttggacaaatacgataccacatacttggatgacattgccaagagattaaacaaagaaaacaagggtttgaatttgacctcaaaggacgccaacactttgtttgcatggtgtgcatacgaattgaacgctagaggctacagtgatgtttgtgatatcttcaccgaagatgaattggtacgttactcatacggccaggacctggtatcgttttaccaggatggaccaggttatgatatgatcagatccgtcggtgccaacttgtttaacgctactttgaagttgttaaagcaaagtgaaactcaagacttaaaagtctggttgagttttacccacgataccgatatcctaaactatttgaccaccgctggtataattgacgacaaaaacaacttaactgccgaatacgttccattcatgggcaacaccttccataagtcctggtacgttcctcaaggtgctcgtgtctacaccgaaaaattccaatgttctaacgacacctacgtcagatacgtcattaacgatgctgtcgttccaattgaaacctgttccaccggcccagggttctcttgtgaaatcaatgatttctacgactatgctgaaaagagagtagctggtactgacttcctaaaggtctgtaacgtcagcagtgtcagtaacgtcaccgaattgaccttctactgggactggaatactactcactacaacgataccctattaaaacaataa

SEQ ID NO: 586 - DNA, 1404 bp, Artificial Sequence
  Description of Artificial Sequence: Synthetic polynucleotide
atgtttaagtctgttgtttattctgttttggccgctgctttagttaatgcaggtacaattcccctcggagagttagccgatgttgccaaaattggcactcaggaagacatattcccattcttgggtggtgccgggccatacttctctttccctggcgactatggtatttctcgtgacttgcctgaaggttgtgaaatgaaacaattgcaaatgcttgccagacatggtgaaagatacccaacttacagtaaaggtgctaccatcatgaaaacatggtataagttgagcaattacacacgtcaattcaacggctctttgagtttcttgaacgatgattacgagtttttcatccgtgatgacgatgatttggaaatggaaaccacttttgccaacagcgacaatgttttgaatccatacactggtgagatggatgctaagagacatgctcgtgagtttttagcgcaatatggctacatgttcgaaaatcaaaccagtttcccaattttcgccgctagttctgaaagggttcatgacactgctcaatatttcattgatggtttaggtgaccaattcaacatctccttgcagactgtcagtgaagccatgtccgccggcgcaaacactttgagtgctggtaatgcgtgcccaggatgggatgaagatgctaacgatgacattttggacaaatacgataccacatacttggatgacattgccaagagattaaacaaagaaaacaagggtttgaatttgacctccaaggacgccaacactttgtttgcatggtgtgcatacgaattgaacgctagaggctacagtgatgtttgtgatatcttcaccgaagatgaattggtacgttactcctacggccaggacttggtatccttttaccaggatggaccaggttatgatatgatcagatccgtcggtgccaacttgtttaacgctactttgaagttgttaaagcaaagtgaaactcaagacttaaaagtctggttgagttttacccacgataccgatatcttgaactatttgaccaccgctggtataattgacgacaaaaacaacttaactgccgaatacgttccattcatgggcaacaccttccataagtcctggtacgttcctcaaggtgctcgtgtctacaccgaaaaattccaatgttctaacgacacctacgtcagatacgtcattaacgatgctgtcgttccaattgaaacctgttccaccggcccagggttctcttgtgaaatcaatgatttctacgactatgctgaaaagagagtagctggtactgacttcttgaaggtctgtaacgtcagcagtgtcagtaacgtcaccgaattgaccttctactgggactggaatactactcactacaacgataccttattaaaacaatga

SEQ ID NO: 587 - DNA, 1404 bp, Saccharomyces cerevisiae
atgtttaaatctgttgtttattcaattttagccgcttctttggccaatgcaggtaccattcccttaggcaaactagccgatgtcgacaagattggtacccaaaaagatatcttcccatttttgggtggtgccggaccatactactctttccctggcgactatggtatttctcgtgatttgcctgaaggttgtgaaatgaagcaactgcaaatggttggtagacatggtgaaagataccctactgtcagtctggctaagactatcaagagtacatggtataagttgagcaattacactcgtcaattcaacggctcattgtcattcttgaacgatgattacgagtttttcatccgtgatgacgatgatttggaaatggaaaccacttttgccaactcggacgatgttttgaacccatacactggtgaaatgaacgccaagagacatgctcgtgacttcttggctcaatacggttacatggtcgaaaaccaaaccagtttcgccgtttttacctctaattctaagagatgtcatgacactgctcaatatttcattgatggtttaggtgaccaattcaacatcaccttgcagactgtcagtgaagctgaatccgctggtgccaacactttgagtgcttgtaactcatgtcctgcttgggactacgatgccaatgatgacattgtaaatgaatacgacacaacctacttggatgacattgccaagagattgaacaaggaaaacaagggtttgaacttgacctcaactgacgctagtactttattctcgtggtgtgcatttgaagtgaacgctaaaggttacagtgatgtctgtgatattttcaccaaggatgaattagtccattactcctactaccaagacttgcacacttattaccatgagggtccaggttacgacattatcaagtctgtcggttccaacttgttcaatgcctcagtcaaattattaaagcaaagtgagattcaagaccaaaaggtttggttgagttttacccacgataccgatatcctaaactttttgaccaccgctggtataattgacgacaaaaacaacttaactgccgaatacgttccattcatgggcaacactttccacagatcctggtacgttcctcaaggtgctcgtgtctacaccgaaaaattccaatgttctaacgacacctacgtcagatacgtcattaacgatgctgttgttccaattgaaacctgttccactggtccagggttctcttgtgaaatcaatgacttctacgactatgctgaaaagagagtagccggtactgacttcctaaaggtctgtaacgtcagcagcgtcagtaactctactgaattgaccttctactgggactggaacactactcattacaacgccagtctattgagacaatag

SEQ ID NO: 588 - DNA, 1404 bp, Artificial Sequence
  Description of Artificial Sequence: Synthetic polynucleotide
atgtttaaatctgttgtttattctattttagccgcttctttggccaatgcaggtaccattcccttaggcaaattggccgatgtcgacaagattggtacccaaaaagatatcttcccatttttgggtggtgccggaccatactactctttccctggcgactatggtatttctcgtgatttgcctgaaggttgtgaaatgaagcaattacaaatggttggtagacatggtgaaagataccctactgtcagtttggctaagactatcaagagtacatggtataagttgagcaattacactcgtcaattcaacggctctttgagtttcttgaacgatgattacgagtttttcatccgtgatgacgatgatttggaaatggaaaccacttttgccaacagcgacgatgttttgaacccatacactggtgaaatgaacgccaagagacatgctcgtgacttcttggctcaatacggttacatggtcgaaaaccaaaccagtttcgccgtttttacctctaattctaagagatgtcatgacactgctcaatatttcattgatggtttaggtgaccaattcaacatcaccttgcagactgtcagtgaagctgaatccgctggtgccaacactttgagtgcttgtaactcttgtcctgcttgggactacgatgccaatgatgacattgtaaatgaatacgacacaacctacttggatgacattgccaagagattgaacaaggaaaacaagggtttgaacttgacctctactgacgctagtactttattcagttggtgtgcatttgaagtgaacgctaaaggttacagtgatgtctgtgatattttcaccaaggatgaattagtccattactcctactaccaagacttgcacacttattaccatgagggtccaggttacgacattatcaagtctgtcggttccaacttgttcaatgcctctgtcaaattattaaagcaaagtgagattcaagaccaaaaggtttggttgagttttacccacgataccgatatcttgaactttttgaccaccgctggtataattgacgacaaaaacaacttaactgccgaatacgttccattcatgggcaacactttccacagatcctggtacgttcctcaaggtgctcgtgtctacaccgaaaaattccaatgttctaacgacacctacgtcagatacgtcattaacgatgctgttgttccaattgaaacctgttccactggtccagggttctcttgtgaaatcaatgacttctacgactatgctgaaaagagagtagccggtactgacttcttgaaggtctgtaacgtcagcagcgtcagtaactctactgaattgaccttctactgggactggaacactactcattacaacgccagtttattgagacaatga

SEQ ID NO: 589 - DNA, 2262 bp, Saccharomyces cerevisiae
atgcgggttttaataactaacgatgatggtcccttaagtgatcagttttcaccatacattagaccttttattcagcacattaaaagaaattatcctgaatggaaaatcacggtttgtgtacctcatgtccagaaatcatgggtgggtaaggctcatcttgctggtaaaaatttgacagctcaattcatatattctaaagttgacgctgaagacaatactttttggggcccatttatccagccacaaattaggtcagaaaactctaaattaccttatgttctcaatgctgaaattccgaaagatacaattgagtggatattaatcgatggaactccagcatcgtgcgcaaacatcgggctgcacctattgtctaatgaaccgtttgatctagtactgtcgggtccaaatgttggtagaaatacatctgctgcttatattacctcttctggtaccgtaggaggcgcaatggaatctgttattactggaaatacaaaggccattgctatttcttgggcctattttaatggattgaaaaacgtctccccacttttaatggagaaggcctctaagagatctttagatgttatcaaacatcttgttaagaattgggacccaaaaacagatctatatagtatcaatattcctttagtggagagtttaagtgatgatacaaaggtttactatgcaccaatttgggaaaatagatggattccaatattcaacggccctcacattaacctagagaatagctttgctgagatcgaagacggtaatgaatcatcatcgatttcctttaattgggctccaaaatttggggcacataaggattctattcactatatggacgaatacaaggacaggactgttttaactgatgctgaagttattgaatccgaaatgatcagtgtcactcccatgaaagccactttcaagggtgtgaaccaccttcttggagagttgaaactgactgaggaagaaaataatttatcaaaaacaaataacctcatcgtggtaagtatagacccaatggaatatatatacaaacctctaacccacgccctgaaaaaatatctgccacaagtggagattgtatcaaacttgccagaatttgacaatggagggtgtgaaaaagaaatgaaggtttttcattacggtgattacgaacagctagatatggacaaactaatggaactgcccaataattacttcacaaactcttatatatataggaaggcattgataagaaaacactttctttcgcataccatacagacttatactgcgaagaacccagagtccattttaaagaaggcatatttggaatcattcactattgatttagattatgctgaatttctagacgacgcattagatgaaaattgggaattacgccaagagttggagaatgaaagccaagataaatggtggatcgtgaaaccgagtatgagcgataaaggtcaaggtatcagggtatttaagactattgaagatttacaggctattttcgattcctttgacgatgaagacagcgaagcagaagagagtggaaatgacgacgatgctgatgatgtaaatggcgaattcatggataataacaaggttaacatttcccaattgcgccactttattatacaagaatatttaaccaatccgttactattggcatctatggataatagaaagttccacataagatgttacgtcgtctgtaggggagatttgcaagtttttgtttatgatagaatgctagcgctctttgctgccaagccatttgttcctctagatccatatgcgtattccgtaactgatttgaaagatttggaatgccacttgactaacacatgtctgcagagcaaaaagaaggataaagattcttctgttttggagtttgactccatagaggaaattccaaatgagagaaagtccaatattaaggagcaaatccatagcataacgaacgacgttttcttagctgctgtaaatgtaaatagattaaacttccaaccgttaccaaacgcatttgaaacatatggcgtagactttttgattgattcgaattacgaagttaaattactagagatcaacgctttcccagacttcaaacaaactgggaaagatttgaagaacctcattgatgaattatttgatgacactgtcaaatactgtgttacccccatctttaacgagaatagaaataagacagatgatgaaacagacccgaacttcgtaaaagtcattgattacacttcaaacggttggtga

SEQ ID NO: 590 - DNA, 2262 bp, Artificial Sequence
  Description of Artificial Sequence: Synthetic polynucleotide
atgagagttttaataactaacgatgatggtcccttaagtgatcagttttctccatacattagaccttttattcagcacattaaaagaaattatcctgaatggaaaatcacggtttgtgtacctcatgtccagaaaagttgggtgggtaaggctcatcttgctggtaaaaatttgacagctcaattcatatattctaaagttgacgctgaagacaatactttttggggcccatttatccagccacaaattaggtctgaaaactctaaattaccttatgttctcaatgctgaaattccgaaagatacaattgagtggatattaatcgatggaactccagcatcttgcgcaaacatcgggttgcacttattgtctaatgaaccgtttgatttagtattatctggtccaaatgttggtagaaatacatctgctgcttatattacctcttctggtaccgtaggaggcgcaatggaatctgttattactggaaatacaaaggccattgctatttcttgggcctattttaatggattgaaaaacgtctccccacttttaatggagaaggcctctaagagatctttagatgttatcaaacatcttgttaagaattgggacccaaaaacagatttatatagtatcaatattcctttagtggagagtttaagtgatgatacaaaggtttactatgcaccaatttgggaaaatagatggattccaatattcaacggccctcacattaacttggagaatagctttgctgagatcgaagacggtaatgaatcttcttccatttcctttaattgggctccaaaatttggggcacataaggattctattcactatatggacgaatacaaggacaggactgttttaactgatgctgaagttattgaatccgaaatgatcagtgtcactcccatgaaagccactttcaagggtgtgaaccaccttcttggagagttgaaattaactgaggaagaaaataatttatccaaaacaaataacctcatcgtggtaagtatagacccaatggaatatatatacaaacctttgacccacgccttgaaaaaatatttaccacaagtggagattgtatccaacttgccagaatttgacaatggagggtgtgaaaaagaaatgaaggtttttcattacggtgattacgaacagttagatatggacaaattaatggaattgcccaataattacttcacaaactcttatatatataggaaggcattgataagaaaacactttctttctcataccatacagacttatactgcgaagaacccagagtccattttaaagaaggcatatttggaatctttcactattgatttagattatgctgaatttttggacgacgcattagatgaaaattgggaattacgccaagagttggagaatgaaagccaagataaatggtggatcgtgaaaccgagtatgagcgataaaggtcaaggtatcagggtatttaagactattgaagatttacaggctattttcgattcctttgacgatgaagacagcgaagcagaagagagtggaaatgacgacgatgctgatgatgtaaatggcgaattcatggataataacaaggttaacatttcccaattgcgccactttattatacaagaatatttaaccaatccgttattattggcatctatggataatagaaagttccacataagatgttacgtcgtctgtaggggagatttgcaagtttttgtttatgatagaatgttggcgctctttgctgccaagccatttgttcctttggatccatatgcgtattccgtaactgatttgaaagatttggaatgccacttgactaacacatgtttacagagcaaaaagaaggataaagattcttctgttttggagtttgactccatagaggaaattccaaatgagagaaagtccaatattaaggagcaaatccatagcataacgaacgacgttttcttagctgctgtaaatgtaaatagattaaacttccaaccgttaccaaacgcatttgaaacatatggcgtagactttttgattgattctaattacgaagttaaattattggagatcaacgctttcccagacttcaaacaaactgggaaagatttgaagaacctcattgatgaattatttgatgacactgtcaaatactgtgttacccccatctttaacgagaatagaaataagacagatgatgaaacagacccgaacttcgtaaaagtcattgattacacttctaacggttggtga

SEQ ID NO: 591 - DNA, 1293 bp, Saccharomyces cerevisiae
atgactattaggagcagtatgaaaaacaacgcagaattggaaagcaagagtgtgttagctaatgaatcgaatataattagcacatttactagaaggataataaaggaaaaaagcggtaactatcaggtactgaaaagatcccttgatggaaaactaatctatcctgaggccactggcatatcctctaacagaggtaacaaacttttgcagagaagcgaagtagtaacaagaagagacttgaacaattctaagccaatgattgagcaaactgtgttctataacggttcggagcatcgccttctgcaaacaaatattgtcactgatagtagacgcaaaagaataaaattcacacctgacatcaacgtcgagcctgttttagtcggtgatgaaaacgacatcgatggtagtgagaaggaagacgaaaatatcactgatgagtattacggcgaagaagacgatgacgacctatcaaaactagtgaatgtaaaggagattttgactcccattctttccctaggggatataataaatcataaaactatctcaaggacattttcaagcccaattttgaaaaatttagccttgcaaataattctaatgattgaaaaagaacagatgtcagttgttagatattcccagtttttggaggtttttttaggagatcatcctgaaccaatttatgaatctaacttgaacctaccatcttataatcacaatttgacccttccagaggatagaggggcaagcgacgaggatgacattaacaacaaaaacaatatcaacgaggttaactcgaatagtttgtctactgaagctggtcatatcaataatggcatggaagaatttggagaggaagatcctttttttgcattgccaaggttggaacaatctaatgcgctgttatcgttgctgccatcttcttccggttctgcttctatatcaacattaacagcggccgaacaacaacagttaaatgaggaaattgagtctgcccgacagctgtcgcagattgcactacagaggaataaagaattcataagaaacttacaaaaaatcagaaagtctgtaataaaagccaatagaataagaggtaggattttaaattggagtcgggaatatttgggtatatctgacgatgatattactatcccggtggctctacgtgttgtgaagagaggtctgatcagtgctacaacaaataagacaacaaattttgaggaagaaattgaaaataccatggaagacggtgttgtagacgataatgaacctgatgaagaagctaatagagcctaa

SEQ ID NO: 592 - DNA, 1293 bp, Artificial Sequence
  Description of Artificial Sequence: Synthetic polynucleotide
atgactattaggagcagtatgaaaaacaacgcagaattggaaagcaagagtgtgttagctaatgaaagtaatataattagcacatttactagaaggataataaaggaaaaaagcggtaactatcaggtattgaaaagatcccttgatggaaaattaatctatcctgaggccactggcatatcctctaacagaggtaacaaacttttgcagagaagcgaagtagtaacaagaagagacttgaacaattctaagccaatgattgagcaaactgtgttctataacggttctgagcatcgccttttacaaacaaatattgtcactgatagtagacgcaaaagaataaaattcacacctgacatcaacgtcgagcctgttttagtcggtgatgaaaacgacatcgatggtagtgagaaggaagacgaaaatatcactgatgagtattacggcgaagaagacgatgacgacttatccaaattagtgaatgtaaaggagattttgactcccattctttccttaggggatataataaatcataaaactatctccaggacattttctagcccaattttgaaaaatttagccttgcaaataattttgatgattgaaaaagaacagatgtctgttgttagatattcccagtttttggaggtttttttaggagatcatcctgaaccaatttatgaatctaacttgaacttaccatcttataatcacaatttgacccttccagaggatagaggggcaagcgacgaggatgacattaacaacaaaaacaatatcaacgaggttaacagtaatagtttgtctactgaagctggtcatatcaataatggcatggaagaatttggagaggaagatcctttttttgcattgccaaggttggaacaatctaatgcgttattatctttgttaccatcttcttccggttctgcttctatatctacattaacagcggccgaacaacaacagttaaatgaggaaattgagtctgccagacagttatctcagattgcattacagaggaataaagaattcataagaaacttacaaaaaatcagaaagtctgtaataaaagccaatagaataagaggtaggattttaaattggagtagagaatatttgggtatatctgacgatgatattactatcccggtggctttgcgtgttgtgaagagaggtttgatcagtgctacaacaaataagacaacaaattttgaggaagaaattgaaaataccatggaagacggtgttgtagacgataatgaacctgatgaagaagctaatagagcctga

SEQ ID NO: 593 - DNA, 693 bp, Saccharomyces cerevisiae
atgggtgtttgcactatttttaggtggctctttgctgcttacttgctctcttcatataagtcgcttcctggggcatattttgttaggttttattattatgttattcaaaacttgttcttgcctatgtttacagggtttgaaaccgagaatattaagaaacttgagaaaaatgaatatggctgtttctcgtacaccagcctagatacctatgcctctccattcgaatgtgacttctactttcataagagcaatagcacctattttgcggaattggacatttcaagaggtaatctcatgtgcaagatttttcaaaaattgatgctgaattccaagcattatccatatattccagttgcgaacgttttcactaatttcttgaaggaaatcaagccttttcaaaagtactcggtttcatcaaggattatctgttgggatgagaaatggatttacgtcatgagtagattcacaattaaaaagggcaccgtcttatgctcattatcattgaccaaatacgtccttaaggacggtagaaagaccatcaaaccaaaggatgctcttgaatactgtggtttatataatgagaaggtcgccaaaatttctgaggacaatctaaagcttttaaccgagcgttgtggtttccacgagacagtaccattggaaaacttgagccaagagtactgttcagaaatctaa

SEQ ID NO: 594 - DNA, 693 bp, Artificial Sequence
  Description of Artificial Sequence: Synthetic polynucleotide
atgggtgtttgcactatttttaggtggctctttgctgcttacttgctctcttcttataagtctcttcctggggcatattttgttaggttttattattatgttattcaaaacttgttcttgcctatgtttacagggtttgaaaccgagaatattaagaaacttgagaaaaatgaatatggctgtttctcttacaccagcttagatacctatgcctctccattcgaatgtgacttctactttcataagagcaatagcacctattttgcggaattggacatttctagaggtaatctcatgtgcaagatttttcaaaaattgatgttgaattccaagcattatccatatattccagttgcgaacgttttcactaatttcttgaaggaaatcaagccttttcaaaagtactctgtttcttccaggattatctgttgggatgagaaatggatttacgtcatgagtagattcacaattaaaaagggcaccgtcttatgctctttatctttgaccaaatacgtccttaaggacggtagaaagaccatcaaaccaaaggatgctcttgaatactgtggtttatataatgagaaggtcgccaaaatttctgaggacaatttgaagcttttaaccgagcgttgtggtttccacgagacagtaccattggaaaacttgagccaagagtactgttctgaaatctga

SEQ ID NO: 595 - DNA, 4365 bp, Saccharomyces cerevisiae
atgggggcacaattatcactagtggtccaagcatcaccttccatagccattttttcatatatcgatgtcttagaggaagtacactacgtttcacagttaaactcatcaagattcttaaaaacatgcaaggcactggaccctaacggcgaaattgttatcaaagtgtttattaaaccaaaagaccaatatagcttacgaccttttctccaacgtataagggctcaatcgtttaagttgggacaactaccgcacgttttaaactacagtaaattgatcgagacaaatagagccggctacatgatacggcagcacttaaaaaataatttatatgacagattgagtttgagaccttacttacaagacattgaactgaaattcattgctttccagttgttaaatgcattaaaggacattcataatctgaatattgtccatggtgatataaagacagaaaatatcctagtaacaagttggaattggtgtatattgacagattttgctgcatttatcaaacccgtatatttgcctgaagataatccaggtgaatttttattctacttcgacacctcgaagagaagaacctgttatctagccccggagaggtttaactctaaactttaccaagatggaaaatctaacaatggtaggctaactaaagaaatggacatatttagtcttggatgtgttattgcagaaatatttgctgaaggaagacccatcttcaacttatcacagctattcaaatataaaagtaattcatatgacgtaaacagggaatttctcatggaggaaatgaattctaccgatttaaggaacttggttctagacatgattcaactagatccatccaaaagactttcatgtgatgaactactgaataaatatcgtggcattttcttccccgattatttctacactttcatttatgattatttcagaaatttggttactatgacaacaagcacaccgatatcagataacacttgcaccaatagtaccttggaagacaatgtaaaacttttagatgaaactacggaaaaaatatacagagatttttcccaaatatgtcattgtttggactttcctttaataaaagacgggggtgagattggttcagaccccccaattttggaatcttacaaaatagagatagaaattagtcggtttttaaacacaaacttatatttcccccaaaattaccatttagtcttacagcagtttaccaaagtatccgaaaagataaaatcagttaaagaggaatgtgccttactctttatctcttatttgtctcatagtataagaagtattgtttcgactgctacgaaacttaaaaatttagaactattagcagtatttgcacaattcgtttctgatgaaaataaaattgatcgagtcgtaccttatttcgtatgttgttttgaagatagtgaccaggacgtccaggccctatctttgttaacattaatccaggtactcacctctgtaagaaaattgaatcaattgaacgagaatatatttgtggactacttacttccgagactgaaaagattacttatttccaataggcagaataccaattatttaaggattgtgtttgctaattgtttgagcgacttggccattatcattaatagatttcaagaatttacatttgctcagcactgcaatgataactcaatggataacaacacggaaatcatggaaagcagtaccaagtattcagcaaaattgatccaaagtgtcgaagatttaactgtctcttttttaacagataatgatacttatgtaaagatggcacttttgcaaaacattcttccactttgtaaattttttggtagggaaagaacaaacgatattatactgagtcatttaataacctaccttaatgataaggacccagcattgcgagtttccttaattcaaacaatatccggaatatcaattcttttgggtaccgttacattagaacagtatattttaccattgttaatccagaccatcactgattcggaagaattagtagtgatcagtgttttacaaagcttaaaatctttgttcaagactgggttgattaggaaaaaatattatattgatatatcaaaaacaacatctcccttgttgttgcatcctaataattggataagacagtttactttgatgataattatagaaattattaataagttatcaaaagccgaagtgtactgcattctctatccaataataaggcctttcttcgaatttgacgttgagttcaacttcaaatcaatgataagctgttgcaagcaaccagtgtcaagatcggtttacaatctattgtgtagttggtctgttagagcgtcaaaatctttattttggaaaaaaatcatcacaaatcatgtagattcattcggaaataatagaatcgaatttataacaaaaaattactcaagtaaaaattatggatttaataaaagagatacgaaatcaagttcctcgctgaagggtattaaaacatcatccaccgtctattcacatgacaacaaggaaattcccttaactgctgaagacagaaattggattgataagttccacattattgggctaacagaaaaagatatttggaaaattgtggctttgaggggttatgtaataaggacagcgagagttatggcagcgaaccctgattttccatataataatagtaattaccgtccattagtacagaactcaccacctaacctaaaccttacgaatattatgccaagaaacattttctttgatgtagagtttgctgaagagtcgacaagtgagggacaagattctaacttagagaaccaacagatatataaatatgatgaaagtgagaaagatagcaataagctaaatattaacggtagcaaacagctatctaccgtcatggacataaatggatcactaatattcaaaaataagtccattgccactactacttctaatttgaagaacgtttttgttcagttagaaccaacgtcctatcacatgcattctccaaatcatggcttgaaagataatgcaaatgttaaaccagaaaggaaggtagtcgtcagcaacagctatgaaggcgacgttgaaagcatagaaaaattcctatcgactttcaaaattttacctcctctgagagattataaggagtttgggcctattcaagagattgtacggagtccaaacatgggtaatttgaggggcaagttgatagctactttgatggaaaacgaacccaattctattacgtcttctgctgtttctccaggagaaacaccctatttaataacaggttcagatcaaggtgtaatcaagatttggaacctgaaagagattatcgtgggcgaggtttactcttcttctttaacttatgactgctcctctaccgtaactcagataaccatgattcctaactttgacgcgtttgccgtttccagtaaagatggacaaataattgtattaaaggttaatcattaccaacaagaaagtgaagtcaaatttttgaattgcgaatgcatcaggaaaattaacttgaagaattttggtaaaaatgaatacgcagtgagaatgagagcatttgtgaatgaggaaaaatctctactagtagcattgacgaatttgtcaagggttattatatttgatattagaaccctggagaggttacaaattatagagaattctccaaggcatggtgccgtttcaagcatctgtatcgatgaagagtgttgtgtcctaattttggggacgactagaggtattattgatatatgggatatccgtttcaacgtgctgataaggagttggtcctttggggaccacgcaccaatcacgcatgtggaggtttgtcagttttatggaaagaattctgtaattgttgtaggaggtagttcaaaaacatttctaacaatatggaattttgttaaggggcattgtcagtatgctttcataaattctgatgaacagccatctatggagcactttttaccaattgagaaaggcttagaagaattaaatttttgtggaatcaggtctttaaacgcactaagcactatctcagtatctaatgataaaattcttcttaccgatgaagcaacaagttccattgttatgtttagcctaaatgagctttcttcttctaaagcagtaataagtccttcaagattcagtgacgtttttattcctacacaagttacggcaaatctcacaatgttattgagaaaaatgaaacgtactagcactcattcagtagatgattctctatatcatcatgatattataaattctatatctacatgtgaagttgatgagacacctttgctggttgcttgtgataactcagggcttattggaatcttccaataa

SEQ ID NO: 596 - DNA, 4365 bp, Artificial Sequence
  Description of Artificial Sequence: Synthetic polynucleotide
atgggggcacaattaagtttagtggtccaagcatctccttccatagccattttttcttatatcgatgtcttagaggaagtacactacgtttctcagttaaactcttctagattcttaaaaacatgcaaggcattggaccctaacggcgaaattgttatcaaagtgtttattaaaccaaaagaccaatatagcttaagaccttttctccaacgtataagggctcaaagttttaagttgggacaattgccgcacgttttaaactacagtaaattgatcgagacaaatagagccggctacatgataagacagcacttaaaaaataatttatatgacagattgagtttgagaccttacttacaagacattgaattgaaattcattgctttccagttgttaaatgcattaaaggacattcataatttgaatattgtccatggtgatataaagacagaaaatatccttgtaacaagttggaattggtgtatattgacagattttgctgcatttatcaaacccgtatatttgcctgaagataatccaggtgaatttttattctacttcgacacctccaagagaagaacctgttatttggccccggagaggtttaactctaaactttaccaagatggaaaatctaacaatggtaggttaactaaagaaatggacatatttagtcttggatgtgttattgcagaaatatttgctgaaggaagacccatcttcaacttatctcagttattcaaatataaaagtaattcttatgacgtaaacagggaatttctcatggaggaaatgaattctaccgatttaaggaacttggttttggacatgattcaattggatccatccaaaagactttcctgtgatgaattattgaataaatatcgtggcattttcttccccgattatttctacactttcatttatgattatttcagaaatttggttactatgacaacaagcacaccgatatctgataacacttgcaccaatagtaccttggaagacaatgtaaaacttttagatgaaactacggaaaaaatatacagagatttttcccaaatatgtcattgtttggactttcctttaataaaagacgggggtgagattggttctgaccccccaattttggaatcttacaaaatagagatagaaattagtagatttttaaacacaaacttatatttcccccaaaattaccatttagtcttacagcagtttaccaaagtatccgaaaagataaaatctgttaaagaggaatgtgccttactctttatctcttatttgtctcatagtataagaagtattgtttccactgctacgaaacttaaaaatttagaattattagcagtatttgcacaattcgtttctgatgaaaataaaattgatagggtcgtaccttatttcgtatgttgttttgaagatagtgaccaggacgtccaggccttatctttgttaacattaatccaggtactcacctctgtaagaaaattgaatcaattgaacgagaatatatttgtggactacttacttccgagattgaaaagattacttatttccaataggcagaataccaattatttaaggattgtgtttgctaattgtttgagcgacttggccattatcattaatagatttcaagaatttacatttgctcagcactgcaatgataactccatggataacaacacggaaatcatggaaagcagtaccaagtattctgcaaaattgatccaaagtgtcgaagatttaactgtctcttttttaacagataatgatacttatgtaaagatggcacttttgcaaaacattcttccactttgtaaattttttggtagggaaagaacaaacgatattatattgagtcatttaataacctaccttaatgataaggacccagcattgagagtttccttaattcaaacaatatccggaatatctattcttttgggtaccgttacattagaacagtatattttaccattgttaatccagaccatcactgattctgaagaattagtagtgatcagtgttttacaaagcttaaaatctttgttcaagactgggttgattaggaaaaaatattatattgatatatccaaaacaacatctcccttgttgttgcatcctaataattggataagacagtttactttgatgataattatagaaattattaataagttatccaaagccgaagtgtactgcattctctatccaataataaggcctttcttcgaatttgacgttgagttcaacttcaaatctatgataagctgttgcaagcaaccagtgtccagatctgtttacaatttattgtgtagttggtctgttagagcgtccaaatctttattttggaaaaaaatcatcacaaatcatgtagattctttcggaaataatagaatcgaatttataacaaaaaattactctagtaaaaattatggatttaataaaagagatacgaaatctagttcctctttgaagggtattaaaacatcttccaccgtctattctcatgacaacaaggaaattcccttaactgctgaagacagaaattggattgataagttccacattattgggttgacagaaaaagatatttggaaaattgtggctttgaggggttatgtaataaggacagcgagagttatggcagcgaaccctgattttccatataataatagtaattaccgtccattagtacagaactctccacctaacttgaaccttacgaatattatgccaagaaacattttctttgatgtagagtttgctgaagagtctacaagtgagggacaagattctaacttagagaaccaacagatatataaatatgatgaaagtgagaaagatagcaataagttgaatattaacggtagcaaacagctttctaccgtcatggacataaatggatctttgatattcaaaaataagtccattgccactactacttctaatttgaagaacgtttttgttcagttagaaccaacgtcctatcacatgcattctccaaatcatggcttgaaagataatgcaaatgttaaaccagaaaggaaggtagtcgtcagcaacagctatgaaggcgacgttgaaagcatagaaaaattcttgtctactttcaaaattttacctcctttgagagattataaggagtttgggcctattcaagagattgtaaggagtccaaacatgggtaatttgaggggcaagttgatagctactttgatggaaaacgaacccaattctattacgtcttctgctgtttctccaggagaaacaccctatttaataacaggttctgatcaaggtgtaatcaagatttggaacttgaaagagattatcgtgggcgaggtttactcttcttctttaacttatgactgctcctctaccgtaactcagataaccatgattcctaactttgacgcgtttgccgtttccagtaaagatggacaaataattgtattaaaggttaatcattaccaacaagaaagtgaagtcaaatttttgaattgcgaatgcatcaggaaaattaacttgaagaattttggtaaaaatgaatacgcagtgagaatgagagcatttgtgaatgaggaaaaatctttattggtagcattgacgaatttgagtagggttattatatttgatattagaaccttagagaggttacaaattatagagaattctccaaggcatggtgccgtttccagcatctgtatcgatgaagagtgttgtgtcttgattttggggacgactagaggtattattgatatatgggatatccgtttcaacgtgttgataaggagttggtcctttggggaccacgcaccaatcacgcatgtggaggtttgtcagttttatggaaagaattctgtaattgttgtaggaggtagttctaaaacatttttaacaatatggaattttgttaaggggcattgtcagtatgctttcataaattctgatgaacagccatctatggagcactttttaccaattgagaaaggcttagaagaattaaatttttgtggaatcaggtctttaaacgcattaagcactatctctgtatctaatgataaaattcttcttaccgatgaagcaacaagttccattgttatgtttagcttgaatgagctttcttcttctaaagcagtaataagtccttccagattcagtgacgtttttattcctacacaagttacggcaaatctcacaatgttattgagaaaaatgaaacgtactagcactcattctgtagatgattctttgtatcatcatgatattataaattctatatctacatgtgaagttgatgagacacctttgttggttgcttgtgataactctgggcttattggaatcttccaatga

SEQ ID NO: 597 - DNA, 2076 bp, Saccharomyces cerevisiae
atgagccagatcgttgattttgttgaggacaaagattcaagaaacgatgccagtattcagatcatcgatggaccctcaaatgttgaaattatcgctctctcggaatcaatggatcaagatgagtgcaaaagggcacatgtaagctctgcagagatgattccatcatcaccgcaaagaaaatctgtttcgaatgatgttgagaatgttgacctaaacaaatctatcgaactttctgcgccgttcttccaagatatcagtataagcaagctagatgacttttctacaacagtaaattccatcatagattcgtctctcagaaatgagaataatgcaaaaggaaacgcgaaaaaacttttggatgatctaataagtgatgaatggtcagctgatcttgagtcgagtggaaagaagcacaacaaatcacaatacaatttgagggacatcgcagagaaatggggagtacagtctttaaaaaatccagagcctattgctgttgactgcgaatataagacacaaggaatcggaaaaaccaatagtgacattagtgatagtccgaaatcacagataggagcagctgatatactgttcgattttccactgtctccagtaaaacatgagaacccaactgaagaaaagcacaattcgattgctaatgaaaattcttcaccagataatagcctgaaaccagcaggaaaacaaaatcatggtgaagatgggacatccatggcaaaaagggtatacaataaaggtgaagacgagcaagaacaccttccgaaaggaaagaagagaaccatagcgttatcaagaacactaatcaacagcaccaaactacctgatacagtagaactaaatctttctaaatttctcgattcctcagatagtattactactgatgtactttcaacccctgcaaaggggtctaacatagtaaggacaggtagtcaaccaatctttagcaacgctaattgttttcaggaagcaaaacgctcgaaaacattaacggctgaggatcccaaatgtactaaaaatactgccagagaggtatcacaactagagaattatattgcctatgggcaatactatactagagaagactcaaaaaacaaaatacgacacttgttaaaagaaaacaaaaatgcttttaagcgagttaaccagatatatcgagataatataaaagcacgctctcaaatgattatagagttttcgcctagccttctccagttatttaaaaaaggagacagtgatctgcaacaacaattggcaccagcagttgtgcaatcaagctataacgattctatgccgcttttaagatttcttcgaaaatgtgacagtatttacgactttagtaacgatttctattacccctgtgatcccaaaatagttgaagaaaacgttttgattctatattatgatgcgcaagaattttttgaacaatacacttcacaaaagaaagaattatataggaagatacgatttttctcaaagaatggaaaacatgtgattcttatactaagcgatataaataaactcaaaagagctattttccaattagaaaatgaaaagtacaaagctagggtagaacaacgattgtcaggaacagaagaagctttaagaccgagaagtaaaaaatcaagccaagttggaaaattagggataaaaaaatttgatttagagcaacgattgcgcttcattgatagagaatggcatgtcaaaatacatactgtaaattcacatatggagtttattaattctctgccgaacctagtgtcattaattggaaaacagcgcatggatcccgcaattcggtatatgaaatatgctcatttgaatgtaaaatccgctcaggatagtacagaaacgctaaagaaaacctttcatcagatagggagaatgcctgaaatgaaggcgaataatgtcgtgagcctataccccagttttcaatcattacttgaagatattgaaaagggaagactgcaatcagacaacgaaggtaaatacttgatgactgaggcagtagaaaaaagattgtacaaactgtttacttgtactgatccaaatgatactattgaatga

SEQ ID NO: 598 - DNA, 2076 bp, Artificial Sequence
  Description of Artificial Sequence: Synthetic polynucleotide
atgagccagatcgttgattttgttgaggacaaagattccagaaacgatgccagtattcagatcatcgatggaccctccaatgttgaaattatcgctctctctgaaagtatggatcaagatgagtgcaaaagggcacatgtaagctctgcagagatgattccatcttctccgcaaagaaaatctgtttctaatgatgttgagaatgttgacttgaacaaatctatcgaactttctgcgccgttcttccaagatatcagtataagcaagttggatgacttttctacaacagtaaattccatcatagattcttctctcagaaatgagaataatgcaaaaggaaacgcgaaaaaacttttggatgatttgataagtgatgaatggagtgctgatcttgagagcagtggaaagaagcacaacaaatctcaatacaatttgagggacatcgcagagaaatggggagtacagtctttaaaaaatccagagcctattgctgttgactgcgaatataagacacaaggaatcggaaaaaccaatagtgacattagtgatagtccgaaatctcagataggagcagctgatatattattcgattttccattatctccagtaaaacatgagaacccaactgaagaaaagcacaattctattgctaatgaaaattcttctccagataatagcttgaaaccagcaggaaaacaaaatcatggtgaagatgggacatccatggcaaaaagggtatacaataaaggtgaagacgagcaagaacaccttccgaaaggaaagaagagaaccatagcgttatctagaacattgatcaacagcaccaaattacctgatacagtagaattgaatctttctaaatttctcgattccagtgatagtattactactgatgtactttctacccctgcaaaggggtctaacatagtaaggacaggtagtcaaccaatctttagcaacgctaattgttttcaggaagcaaaacgctctaaaacattaacggctgaggatcccaaatgtactaaaaatactgccagagaggtatctcaattggagaattatattgcctatgggcaatactatactagagaagactctaaaaacaaaatacgtcacttgttaaaagaaaacaaaaatgcttttaagagagttaaccagatatatagagataatataaaagcacgctctcaaatgattatagagttttctcctagccttctccagttatttaaaaaaggagacagtgatttgcaacaacaattggcaccagcagttgtgcaaagcagctataacgattctatgccgcttttaagatttcttagaaaatgtgacagtatttacgactttagtaacgatttctattacccctgtgatcccaaaatagttgaagaaaacgttttgattctttattatgatgcgcaagaattttttgaacaatacacttctcaaaagaaagaattatataggaagataagatttttctccaagaatggaaaacatgtgattcttatattaagcgatataaataaactcaaaagagctattttccaattagaaaatgaaaagtacaaagctagggtagaacaaagattgagtggaacagaagaagctttaagaccgagaagtaaaaaaagtagccaagttggaaaattagggataaaaaaatttgatttagagcaaagattgcgcttcattgatagagaatggcatgtcaaaatacatactgtaaattctcatatggagtttattaattctttaccgaacttggtgtctttaattggaaaacagcgcatggatcccgcaattcgttatatgaaatatgctcatttgaatgtaaaatccgctcaggatagtacagaaacgttgaagaaaacctttcatcagatagggagaatgcctgaaatgaaggcgaataatgtcgtgagcttgtaccccagttttcaatctttacttgaagatattgaaaagggaagattacaatctgacaacgaaggtaaatacttgatgactgaggcagtagaaaaaagattgtacaaattatttacttgtactgatccaaatgatactattgaatga

SEQ ID NO: 599 - DNA, 873 bp, Saccharomyces cerevisiae
atggaaaagctattacagtggtctattgcgaattctcaaggggacaaagaagctatggctagggccggccaacctgatcctaaattgctacagcagttattcggtggtggtggtcctgacgatccaaccttaatgaaagaatccatggctgttattatgaatccggaggttgacttagaaacaaaactcgttgcatttgacaactttgaaatgttgattgagaacttagataatgctaataatatcgaaaatttaaaactgtgggagccattgttggatgttcttgttcagacgaaggatgaagaactacgtgctgctgctttatccattattggaacggctgtgcaaaacaacttggattcgcaaaataatttcatgaaatacgacaatggtctgcgaagccttatcgaaatagctagtgacaagacaaagccactcgacgtgagaacaaaagctttttacgcactatctaatctaataagaaaccacaaagatatctcagaaaagtttttcaaattaaatgggctcgactgcatagcacctgtattaagtgataacaccgccaaaccaaaactgaaaatgagagccattgccttattgaccgcatatttgtcatctgttaagattgatgaaaatataatcagtgtgctgagaaaggatggagtaattgaaagtacgattgagtgcttgtctgacgagagtaacttgaacatcatagatagagttctgtcttttctctctcacctgatatcttccggaataaaatttaatgaacaggaattgcacaaattgaacgaaggttacaaacatatcgagcctctaaaggacagacttaatgaagacgattatttagccgtaaagtatgtattatga

SEQ ID NO: 600 - DNA, 873 bp, Artificial Sequence
  Description of Artificial Sequence: Synthetic polynucleotide
atggaaaagcttttacagtggtctattgcgaattctcaaggggacaaagaagctatggctagggccggccaacctgatcctaaattgttacagcagttattcggtggtggtggtcctgacgatccaaccttaatgaaagaatccatggctgttattatgaatccggaggttgacttagaaacaaaactcgttgcatttgacaactttgaaatgttgattgagaacttagataatgctaataatatcgaaaatttaaaattatgggagccattgttggatgttcttgttcagacgaaggatgaagaattgcgtgctgctgctttatccattattggaacggctgtgcaaaacaacttggattctcaaaataatttcatgaaatacgacaatggtttaagaagccttatcgaaatagctagtgacaagacaaagccactcgacgtgagaacaaaagctttttacgcattatctaatttgataagaaaccacaaagatatcagtgaaaagtttttcaaattaaatgggctcgactgcatagcacctgtattaagtgataacaccgccaaaccaaaattgaaaatgagagccattgccttattgaccgcatatttgtcttctgttaagattgatgaaaatataatcagtgtgttgagaaaggatggagtaattgaaagtacgattgagtgcttgtctgacgagagtaacttgaacatcatagatagagttttatcttttctctctcacttgatatcttccggaataaaatttaatgaacaggaattgcacaaattgaacgaaggttacaaacatatcgagcctttgaaggacagacttaatgaagacgattatttagccgtaaagtatgtattatga

SEQ ID NO: 601 - DNA, 2262 bp, Saccharomyces cerevisiae
atggttgagttttctttgaagaaggccagaaacaattggaagcatgtaaagaagtctgcaagctctcctgctaagcaaaagacacctccatcgcctgctaagcctaaacaaaaaacaaaaaagaacccttatagtgatctcaaggatccggctaccagttatacgctaccaacaatcaatgcaagggagagaagtagggtagcaacttcaatgcagagaagactatcaattcataatacaaattatgctccacctacactagattactcaatgcccctacctgatatgccaaacatgatagttcccaatgataatgtggatagtagtcataataatagtagtttcaccactgagaacgaatcggtaagctctaaaggcccttccaacagtttaaatctttcaactgccgatctctccctgaacgacagctcctataataaggtgcctgctagatcagcaatgcgaaatactgtcaatccttccggcagtaatgatcctttcaataatagcacgtcgctaagaaagatgttggcaaacccgcattttaatgctaaagattttgttcatgataaactaggcaatgcgagtgccattactattgataaatttacctcaaatttaacagatttatcgatacaggtccaagaagaagtaaagttaaatatcaataaatcatataacgaaatcatgacggtaaacaacgacctaaatgttgctatgttggagcttaaaagggttagagcaaatataaatgatttaaacgaggttttggatcagtgcaccaaaatagctgaaaaaaggttacaattgcaggatcaaatagatcaagagagacaaggcaattttaacaatgttgaaagtcattctaatagtccagcgttacttccgcctttgaaagcaggacaaaatgggaatctcatgaggagggacagatcgagcgtcttgatattagagaaattttgggatacggaactggatcagctgtttaagaacgttgaaggtgctcagaagtttatcaattctacgaaaggaagacatattttaatgaatagtgccaattggatggaattaaatactaccactggtaaacccttgcagatggtacagattttcattttgaatgatttggtacttatcgccgataaatcaagagataagcaaaatgactttatagtaagccagtgctatcctttaaaggatgtcactgtcacgcaagaggaattttccactaagaggctacttttcaagtttagcaattcgaattcaagtttgtatgaatgtagagacgcagacgaatgctctaggttgttggacgttataagaaaggctaaggatgatttgtgcgacatattccatgtagaagaggagaactctaaacgtattagagagtcctttagatatttgcaatctacgcaacaaaccccaggtagagaaaacaacagaagccctaacaaaaacaaaagacgtagtatggggggttcaatcactcctggccgaaatgtaacaggcgcaatggatcaatatcttttgcagaacctaactctatcaatgcattcgaggccaaggtccagagatatgagttcaaccgcccagaggcttaaattcctggatgaaggcgtggaagagatagatattgaattagctaggcttaggtttgaaagtgccgtggaaacattattggatattgaatcacaattggaggatctttctgaaagaatttctgatgaagagttaatgttacttaacctgatatctttaaaaatcgaacaaagaagagaggccatttctagcaaactttctcagagcattttatcatcgaatgaaatagtgcatttgaaaagcggtactgaaaatatgattaagttaggattaccagagcaagctcttgacctattcttacagaatagatctaatttcattcaagatttgattctacagattggatcagtggacaatcctacgaactatttgactcaattggctgttatcaggttccaaaccattaaaaaaacagtggaggacttccaggatattttcaaagaactcggggctaagatttcttccatcctagtagattggtgtagcgacgaagtggataatcacttcaaattgatagacaagcaattactgaatgatgaaatgttatccccagggtccattaagtcatccagaaaacagatagatggattgaaggccgtaggtttggattttgtctacaaattggacgagtttatcaaaaagaacagtgataaaattcgctaa

SEQ ID NO: 602 - DNA, 2262 bp, Artificial Sequence
  Description of Artificial Sequence: Synthetic polynucleotide
atggttgagttttctttgaagaaggccagaaacaattggaagcatgtaaagaagtctgcaagctctcctgctaagcaaaagacacctccatctcctgctaagcctaaacaaaaaacaaaaaagaacccttatagtgatctcaaggatccggctaccagttatacgttaccaacaatcaatgcaagggagagaagtagggtagcaacttctatgcagagaagattatccattcataatacaaattatgctccacctacattagattactccatgcccttacctgatatgccaaacatgatagttcccaatgataatgtggatagtagtcataataatagtagtttcaccactgagaacgaaagtgtaagctctaaaggcccttccaacagtttaaatctttctactgccgatctctccttgaacgacagctcctataataaggtgcctgctagaagtgcaatgagaaatactgtcaatccttccggcagtaatgatcctttcaataatagcacgtctttgagaaagatgttggcaaacccgcattttaatgctaaagattttgttcatgataaattgggcaatgcgagtgccattactattgataaatttacctctaatttaacagatttatctatacaggtccaagaagaagtaaagttaaatatcaataaaagttataacgaaatcatgacggtaaacaacgacttgaatgttgctatgttggagcttaaaagggttagagcaaatataaatgatttaaacgaggttttggatcagtgcaccaaaatagctgaaaaaaggttacaattgcaggatcaaatagatcaagagagacaaggcaattttaacaatgttgaaagtcattctaatagtccagcgttacttccgcctttgaaagcaggacaaaatgggaatctcatgaggagggacagaagcagcgtcttgatattagagaaattttgggatacggaattagatcagttatttaagaacgttgaaggtgctcagaagtttatcaattctacgaaaggaagacatattttaatgaatagtgccaattggatggaattaaatactaccactggtaaacccttgcagatggtacagattttcattttgaatgatttggtacttatcgccgataaatctagagataagcaaaatgactttatagtaagccagtgctatcctttaaaggatgtcactgtcacgcaagaggaattttccactaagaggttacttttcaagtttagcaatagtaatagtagtttgtatgaatgtagagacgcagacgaatgctctaggttgttggacgttataagaaaggctaaggatgatttgtgcgacatattccatgtagaagaggagaactctaaacgtattagagagtcctttagatatttgcaatctacgcaacaaaccccaggtagagaaaacaacagaagccctaacaaaaacaaaagacgtagtatggggggttctatcactcctggcagaaatgtaacaggcgcaatggatcaatatcttttgcagaacttgactttatctatgcattccaggccaaggtccagagatatgagttctaccgcccagaggcttaaattcttggatgaaggcgtggaagagatagatattgaattagctaggcttaggtttgaaagtgccgtggaaacattattggatattgaatctcaattggaggatctttctgaaagaatttctgatgaagagttaatgttacttaacttgatatctttaaaaatcgaacaaagaagagaggccatttctagcaaactttctcagagcattttatcttccaatgaaatagtgcatttgaaaagcggtactgaaaatatgattaagttaggattaccagagcaagctcttgaccttttcttacagaatagatctaatttcattcaagatttgattttacagattggatctgtggacaatcctacgaactatttgactcaattggctgttatcaggttccaaaccattaaaaaaacagtggaggacttccaggatattttcaaagaactcggggctaagatttcttccatccttgtagattggtgtagcgacgaagtggataatcacttcaaattgatagacaagcaattattgaatgatgaaatgttatccccagggtccattaagtcttccagaaaacagatagatggattgaaggccgtaggtttggattttgtctacaaattggacgagtttatcaaaaagaacagtgataaaattcgctga

SEQ ID NO: 603 - DNA, 1608 bp, Saccharomyces cerevisiae
atgagtataacaagtgaagaactaaactacttgatatggaggtattgtcaagagatgggacacgaggtgagtgcattagcattgcaggatgaaacaagagtattggaatttgatgagaagtataaagaacacattcctttgggtacactggtgaatctagtacaaaggggaatcttgtatacagaaagtgagttaatggttgatagtaaaggtgatatcagcgctttaaatgaacatcatctttctgaagatttcaatttggttcaggcgctgcaaatagataaagaaaaatttcctgagatctcttctgaaggaaggttcactttggaaaccaattccgagagtaataaagcaggtgaagatggcgctagtactgttgaaagagaaacccaagaggacgatactaattctattgacagtagtgatgacctagacggatttgtcaaaatactgaaggagatagtaaaattagataatattgtttcctccacttggaatccattggatgaatctatactcgcatacggtgaaaaaaattctgttgcaagactagcgaggatagtagaaaccgatcaagaagggaaaaaatactggaaactcacgataatagcggagttgagacatccttttgctctgagtgcaagtagtggtaaaacgacgaatcaagtcacatgtcttgcttggtcacacgatggtaattcaattgtcacgggtgtagaaaatggtgagctaagactatggaataagacgggggcacttctgaatgttttaaattttcatagagcacctatagtatccgttaaatggaacaaagatggaacacatatcatatccatggacgtggaaaatgtcactatactctggaatgttataagcgggaccgtcatgcagcactttgaattaaaagaaaccggtggctcatccatcaacgcagagaaccatagtggcgatggttcacttggggttgacgttgaatgggtagacgatgacaaatttgtcattcctggccctaaaggtgctatatttgtataccaaattacagaaaaaacgcccactggtaaacttattggacaccatggacctatcagcgttttggagttcaatgacaccaataaacttctacttagtgcctcagacgatggtactctaagaatatggcatggcggtaacggcaattctcagaattgcttctacggacactcacaaagcatagtatcggcatcatgggtcggtgatgataaggtaatatcctgctcgatggatggctccgttcgcctatggtcgctgaagcagaatacgctattggctctatcaatcgtggatggtgtcccaatttttgctggaagaatatcacaagatggacagaagtacgcagttgctttcatggatgggcaggtaaacgtctacgatttaaaaaaactgaacagcaagtcacgaagtctttatggtaaccgtgatgggattttgaatccattaccaattcccctctacgctagctaccaaagcagccaagacaatgattatatatttgatctgtcatggaactgtgcgggaaacaagatttctgtagcatactcgcttcaagaaggttcagttgtagccatataa

SEQ ID NO: 604 - DNA, 1608 bp, Artificial Sequence
  Description of Artificial Sequence: Synthetic polynucleotide
atgagtataacaagtgaagaattgaactacttgatatggaggtattgtcaagagatgggacacgaggtgagtgcattagcattgcaggatgaaacaagagtattggaatttgatgagaagtataaagaacacattcctttgggtacattagtgaatttggtacaaaggggaatcttgtatacagaaagtgagttaatggttgatagtaaaggtgatatcagcgctttaaatgaacatcatctttctgaagatttcaatttggttcaggcgttgcaaatagataaagaaaaatttcctgagatctcttctgaaggaaggttcactttggaaaccaattccgagagtaataaagcaggtgaagatggcgctagtactgttgaaagagaaacccaagaggacgatactaattctattgacagtagtgatgacttggacggatttgtcaaaatattgaaggagatagtaaaattagataatattgtttcctccacttggaatccattggatgaatctatactcgcatacggtgaaaaaaattctgttgcaagattagcgaggatagtagaaaccgatcaagaagggaaaaaatactggaaactcacgataatagcggagttgagacatccttttgctttaagtgcaagtagtggtaaaacgacgaatcaagtcacatgtcttgcttggtctcacgatggtaattctattgtcacgggtgtagaaaatggtgagttaagattatggaataagacgggggcacttttgaatgttttaaattttcatagagcacctatagtatccgttaaatggaacaaagatggaacacatatcatatccatggacgtggaaaatgtcactatactctggaatgttataagcgggaccgtcatgcagcactttgaattaaaagaaaccggtggcagctccatcaacgcagagaaccatagtggcgatggttctcttggggttgacgttgaatgggtagacgatgacaaatttgtcattcctggccctaaaggtgctatatttgtataccaaattacagaaaaaacgcccactggtaaacttattggacaccatggacctatcagcgttttggagttcaatgacaccaataaacttttacttagtgccagtgacgatggtactttgagaatatggcatggcggtaacggcaattctcagaattgcttctacggacactctcaaagcatagtatctgcatcttgggtcggtgatgataaggtaatatcctgctctatggatggctccgttcgcttatggtctttgaagcagaatacgttattggctttatctatcgtggatggtgtcccaatttttgctggaagaatatctcaagatggacagaagtacgcagttgctttcatggatgggcaggtaaacgtctacgatttaaaaaaattgaacagcaagtctagaagtctttatggtaaccgtgatgggattttgaatccattaccaattcccctctacgctagctaccaaagcagccaagacaatgattatatatttgatttatcttggaactgtgcgggaaacaagatttctgtagcatactctcttcaagaaggttctgttgtagccatatga

SEQ ID NO: 605 - DNA, 990 bp, Saccharomyces cerevisiae
atgagtgaagaatttcctacgccgcagcttttggatgaattggaagatcaacagaaagttaccacgccgaatgagaagagagagttaagttctaatcgtgtgttgaaggatatttttgcgggtaccatcggtggtattgcacaagttcttgtagggcaaccgtttgatacaacaaaagttaggcttcaaacagccaccacaagaacaacaacgttggaggtattgcgtaacttggtaaagaatgagggtgtgtttgcattctacaaaggtgcgttaacaccgttattgggtgttggtatatgtgtctcagtacaatttggtgtgaatgaggcgatgaaaagatttttccaaaattacaacgcttctaagaacccgaatatgagctcacaggacgtagatctttcacgttcaaatactctgccactatcccagtactacgtttgtgggttgacaggtggtgtagtcaattcattcttggcatcgcccattgaacaaataagaattcgtttgcagacgcaaacatctaatggtggagacagagaattcaaaggtccttgggactgtattaaaaaattgaaagctcaaggtggattgatgaggggtttatttcccacaatgataagagccggacatgggcttggtacatattttcttgtctacgaagcattggttgccagagaaattggtacgggactaacaagaaacgaaattcctccttggaaattatgcttatttggtgcattttccgggacaatgttgtggttgacagtatacccattggacgttgtgaaatccattatacaaaacgatgatttacgaaaacctaaatacaagaattccatttcttacgtagcaaagaccatttatgcaaaagaaggtatcagagcctttttcaaagggtttgggccaacaatggttaggtccgcgcccgttaatggtgcgacattcctgacgtttgaattagtcatgagatttctgggggaagagtag

SEQ ID NO: 606 - DNA, 990 bp, Artificial Sequence
  Description of Artificial Sequence: Synthetic polynucleotide
atgagtgaagaatttcctacgccgcagcttttggatgaattggaagatcaacagaaagttaccacgccgaatgagaagagagagttaagttctaatcgtgtgttgaaggatatttttgcgggtaccatcggtggtattgcacaagttcttgtagggcaaccgtttgatacaacaaaagttaggcttcaaacagccaccacaagaacaacaacgttggaggtattgcgtaacttggtaaagaatgagggtgtgtttgcattctacaaaggtgcgttaacaccgttattgggtgttggtatatgtgtctccgtacaatttggtgtgaatgaggcgatgaaaagatttttccaaaattacaacgcttctaagaacccgaatatgagctctcaggacgtagatctttctcgttccaatactttaccattgtcccagtactacgtttgtgggttgacaggtggtgtagtcaattctttcttggcatctcccattgaacaaataagaattcgtttgcagacgcaaacatctaatggtggagacagagaattcaaaggtccttgggactgtattaaaaaattgaaagctcaaggtggattgatgaggggtttatttcccacaatgataagagccggacatgggcttggtacatattttcttgtctacgaagcattggttgccagagaaattggtacgggattaacaagaaacgaaattcctccttggaaattatgcttatttggtgcattttccgggacaatgttgtggttgacagtatacccattggacgttgtgaaatccattatacaaaacgatgatttaagaaaacctaaatacaagaattccatttcttacgtagcaaagaccatttatgcaaaagaaggtatcagagcctttttcaaagggtttgggccaacaatggttaggtccgcgcccgttaatggtgcgacattcttgacgtttgaattagtcatgagatttttgggggaagagtga

SEQ ID NO: 607 - DNA, 1089 bp, Saccharomyces cerevisiae
atgatcaataatcctaaggtagacagtgtagcggagaaacccaaagctgtgacatcaaagcagtcggagcaagcggcttcgccagaaccaacaccagccccccctgtttctagaaatcagtatccgatcacgttcaacttgacttcaaccgcaccctttcatcttcatgaccgtcatcgctacttacaagagcaagatctttacaagtgcgcttctagggattcgttgtcttccctgcagcaactcgcccatacacctaatgggtcgacaaggaagaaatatattgttgaggaccaatctccctatagttcggaaaatccagtcattgtgacctcttcctataaccatacggtttgcacaaactacttaagaccaagaatgcagtttacagggtaccagatatcaggatacaaacgctatcaggtaacagttaacttaaagactgtagatttgccaaagaaagattgcacgtcgctgtcccctcatttatctggatttttgtcgataagaggactcacgaaccaacacccggaaatcagtacatattttgaagcctacgcggtaaaccacaaggaattagggttcttgtcctctagctggaaagatgaacctgttttaaacgaattcaaagccacagaccaaacagacttagaacactggataaatttcccctcctttagacagcttttcctgatgagccaaaaaaacggtctcaactcaactgacgacaatggcactacaaatgcagccaagaagttgcctccacagcagcttcctactacaccaagcgcagacgctggtaacatatcaagaatttttagccaagagaaacaatttgacaactacttgaacgaacggtttatatttatgaaatggaaggaaaaatttttggtaccagatgccctattaatggaaggtgtagacggcgcatcttatgatgggttttattacattgtccatgatcaagttaccgggaacattcaagggttttactatcatcaagatgctgaaaagttccaacagctggaattagtaccatctttgaaaaataaagtcgagtccagtgattgttcttttgagtttgcttga

SEQ ID NO: 608 - DNA, 1089 bp, Artificial Sequence
  Description of Artificial Sequence: Synthetic polynucleotide
atgatcaataatcctaaggtagacagtgtagcggagaaacccaaagctgtgacatccaagcagtctgagcaagcggcttctccagaaccaacaccagccccccctgtttctagaaatcagtatccgatcacgttcaacttgacttctaccgcaccctttcatcttcatgaccgtcatcgctacttacaagagcaagatctttacaagtgcgcttctagggattctttgtcttccttacagcaactcgcccatacacctaatgggtctacaaggaagaaatatattgttgaggaccaatctccctatagttctgaaaatccagtcattgtgacctcttcctataaccatacggtttgcacaaactacttaagaccaagaatgcagtttacagggtaccagatatctggatacaaacgctatcaggtaacagttaacttaaagactgtagatttgccaaagaaagattgcacgtccttgtcccctcatttatctggatttttgagcataagaggactcacgaaccaacacccggaaatcagtacatattttgaagcctacgcggtaaaccacaaggaattagggttcttgtcctctagctggaaagatgaacctgttttaaacgaattcaaagccacagaccaaacagacttagaacactggataaatttcccctcctttagacagcttttcttaatgagccaaaaaaacggtctcaactctactgacgacaatggcactacaaatgcagccaagaagttgcctccacagcagcttcctactacaccaagcgcagacgctggtaacatatctagaatttttagccaagagaaacaatttgacaactacttgaacgaaagatttatatttatgaaatggaaggaaaaatttttggtaccagatgccttattaatggaaggtgtagacggcgcatcttatgatgggttttattacattgtccatgatcaagttaccgggaacattcaagggttttactatcatcaagatgctgaaaagttccaacagttagaattagtaccatctttgaaaaataaagtcgagtccagtgattgttcttttgagtttgcttga

SEQ ID NO: 609 - DNA, 567 bp, Saccharomyces cerevisiae
atgaatcctcaagtcagtaacatcatcatcatgttggtcatgatgcaactctcccgtcgcattgacatggaggacccaaccatcatcatgtacattagaattttatactgttcttccatcggtatctcttggatcatctaccaaatggccagaaagagaattgttgctaaaaacgacatgactaccatgaagtacgtcgaacctggtaatgctatgtccggcgaaggtgagaagctgcaagttactaccgtcagagactacgatttgaaggaaatagacagtgctatcaagtctatctacactggtatggctatgatgggtttcatgcatttgtacttgaaatacaccaacccattgttcatgcaatccatttctccagtgaaaagcgctttggaacacaacgaagtgaaaattcacctcttcggtaagcctgcaaccggcgatttgaagagaccattcaaggctccatctttgtttggtggtatgggtcaaactggtccaaagaccgacaagaaatctatcgaagaagctgaaagagccggtaacgctggtgttaaggctgaatga

SEQ ID NO: 610 - DNA, 567 bp, Artificial Sequence
  Description of Artificial Sequence: Synthetic polynucleotide
atgaatcctcaagtcagtaacatcatcatcatgttggtcatgatgcaactctcccgtcgcattgacatggaggacccaaccatcatcatgtacattagaattttatactgttcttccatcggtatctcttggatcatctaccaaatggccagaaagagaattgttgctaaaaacgacatgactaccatgaagtacgtcgaacctggtaatgctatgtccggcgaaggtgagaagttacaagttactaccgtcagagactacgatttgaaggaaatagacagtgctatcaagtctatctacactggtatggctatgatgggtttcatgcatttgtacttgaaatacaccaacccattgttcatgcaatccatttctccagtgaaaagcgctttggaacacaacgaagtgaaaattcacctcttcggtaagcctgcaaccggcgatttgaagagaccattcaaggctccatctttgtttggtggtatgggtcaaactggtccaaagaccgacaagaaatctatcgaagaagctgaaagagccggtaacgctggtgttaaggctgaatga

SEQ ID NO: 611 - DNA, 738 bp, Saccharomyces cerevisiae
atgccttatacttggaagtttttaggaatcagcaagcaactttcactggaaaatggtatagcaaagttgaaccaattgctaaacctggaagtagatttagacattcaaaccattcgagtacccagtgatcctgatggtggtaccgccgctgacgagtatatccgttacgaaatgaggttggacatctctaatttagatgagggcacttactctaagttcattttcttggggaactcaaaaatggaggtgccgatgtttttgtgctattgcgggacagataaccgcaatgaagtggtattgcagtggctgaaggcagagtacggtgtcattatgtggccgataaaatttgaacagaagaccatgataaagttagctgacgccagcattgtgcacgtaacgaaagagaacatcgaacaaattacctggtttagctcaaagttatattttgaaccagaaacacaagacaaaaacttgcggcaattcagtatagaaataccgagagaaagctgtgagggtttggctcttggctatggtaatactatgcacccgtataacgatgcaattgtaccctacatttataatgaaacggggatggcggtggaaagattaccgttgacttccgtcatattggcagggcacacgaaaataatgagagaatccattgtcacttcaacacgaagtctcaggaacagagttctagcagttgtactccaatcgattcagtttaccagcgagtaa

SEQ ID NO: 612 - DNA, 738 bp, Artificial Sequence
  Description of Artificial Sequence: Synthetic polynucleotide
atgccttatacttggaagtttttaggaatcagcaagcaactttctttggaaaatggtatagcaaagttgaaccaattgttgaacttggaagtagatttagacattcaaaccattagagtacccagtgatcctgatggtggtaccgccgctgacgagtatatccgttacgaaatgaggttggacatctctaatttagatgagggcacttactctaagttcattttcttggggaactccaaaatggaggtgccgatgtttttgtgctattgcgggacagataaccgcaatgaagtggtattgcagtggttaaaggcagagtacggtgtcattatgtggccgataaaatttgaacagaagaccatgataaagttagctgacgccagcattgtgcacgtaacgaaagagaacatcgaacaaattacctggtttagctctaagttatattttgaaccagaaacacaagacaaaaacttgagacaattcagtatagaaataccgagagaaagctgtgagggtttggctcttggctatggtaatactatgcacccgtataacgatgcaattgtaccctacatttataatgaaacggggatggcggtggaaagattaccgttgacttccgtcatattggcagggcacacgaaaataatgagagaatccattgtcacttctacaagaagtctcaggaacagagttttagcagttgtactccaatctattcagtttaccagcgagtga

SEQ ID NO: 613 - DNA, 2844 bp, Saccharomyces cerevisiae
atgggattttgggagaacaacaaagattccatcacttcagggctgaagagcgccggtaaatatggttaccaaggaacaaagtacgttgccaagacagggtataaggcaagtaagaagcactataacaacagcaaagcgcgtagggaaaggaagagtggtaagaaaaattcaagtgatgaggagtatgatagcgaagatgagatggagtacgaaagaaagccgaccgatataagaagtttaaaagacccaaagtcctttcctcccccacctttgaaacctggacaaaaaacttatacaggacaacagcaacagcaaatgccaaatggtcaggccagttatgcttttcagggtgcataccaaggccaacctggcgcaggatcgacggaacagtcacaatacgcacaaccacagtataatcagtatccacaacagcagctgcaacaaggtgtaatgccacagcaacagcagctgcaacaaggtgtagtgccacagcagccgcctatatatggagagcaagtaccaccgtatgggtcaaattctaatgcaaccagctaccagtcgctgccgcaacaaaatcaaccccaaaatgcaattccaagtcaggtatctctgaactctgcttctcagcaaagcacagggtttgtctcgcaaaatctgcaatatggtacccaatcaagtaatccggcaccatcaccgtctttccagaacggtcttcagtgtcatcagcagccgcaatacgtatcacatggctcaaccaatctcggacaatcccaatttccatcgggccaacagcagcagcccacgacacagtttggccagcaagttttaccatcacctgcacaaccacaacagcaacaacaagggcaaccattaccgcccccgcgcggtcaagtgatcttgccagcgcccggagagcctctgtcaaatggctttgggcaacagcaacagcaacagcaacagcaacagcagcctctgaaccaaaacaacgctttgttgccacaaatgaacgtggaaggagtttctgggatggctgcggttcagcctgtctatggccaagccatgtcaagtactacaaacatgcaagattcgaaccccagctatggagcttcacccatgcaaggtcagcctccagtcggtggacaaccgcctgtgcctgtaagaatgcagccacagccaccgcaaccaatgcaacagggaaacatctatccgattgagccttctcttgattctactggctcaaccccacattttgaagttactccatttgacccagacgcacctgctccgaagcccaaaatcgatattcccactgtagacgttagtagccttccaccacctcccactcatagggatagaggagcagttgtacaccaggaacctgcgccaagtgggaaaatacagcctaacacaacctcttcggcggcttcattgccagcaaagcattcaagaactactactgcagacaatgaaaggaactctggaaacaaagaaaacgatgaaagtacctccaagtcgtccattttaggacattatgatgtagatgtcaacatcatgccacctccaaaacctttcagacatggacttgattctgtaccttctgagcacaccacgaagaacgcaccagaacgggcagtgccaattctacctcctcggaacaatgttgagcctcctcctcccccatcacgaggcaattttgagaggacagagtcggtgctgtcaacgaatgccgctaatgtacaggaggatcccatttctaattttttacctccaccgaagccatttagacatactgaaactaaacaaaatcagaatagtaaagcatcacctgtagaaatgaagggtgaagttttgccagggcacccctctgaggaagatagaaacgttgaaccatcgttggtacctcaatcgaaaccgcaatcgcaatctcaattcagaagagctcatatggagacacagcctattcaaaacttccagccaccaccaaaaccatttaggcgttcacaatcgtccaattctagtgatagttcttatactatcgacggacctgaggcaaatcatgggcgtgggcgtgggcgtatagctaagcaccatgatggtgatgaatacaaccccaagagtgagaattctacagaaaacggtcgtttgggtgatgcccccaacagctttattagaaaaagagcgccaacccctccggccccatccagatctgagaagttacatgagggtactataacatccgaagttgatagttcaaaagatgctaataaatatgaaaagtcaatacctcctgtaacttcgtctattcaagcgcaacagtctacgaagaaggcgcctcctcctgttgtaaagccaaaacctagaaatttttctttaaaggccaatgaatatcccaaggaacttactagggaagcaactggacaagatgaagttttaaactccattaccaatgagttgtcgcatatcaaattaagaaaaacaaacgttaatttggaaaagttaggcggttcgaaaaaagtgaaggactctagccctgttccctcagatctagatgaaaaatatgtgtctgcatcggggtctattactccaccaaggcctccaccttctaggtctagtccaaagaaagtgccgcctgttgtcccaaaaaagaatgataacctgaagaaaaagccaccagtggtcccaaagaaaaagccattactaaaatcgctcgaaccaagacctattgaaatggagagggcctattcgggagatatttctgctgctgacgataacttaaatccttttgaaagatacaaacgaaatgttgttcctcaagaagatgacagactgcataaattaaaataa

SEQ ID NO: 614 - DNA, 2844 bp, Artificial Sequence
  Description of Artificial Sequence: Synthetic polynucleotide
atgggattttgggagaacaacaaagattccatcacttctgggttgaagagcgccggtaaatatggttaccaaggaacaaagtacgttgccaagacagggtataaggcaagtaagaagcactataacaacagcaaagcgcgtagggaaaggaagagtggtaagaaaaatagtagtgatgaggagtatgatagcgaagatgagatggagtacgaaagaaagccgaccgatataagaagtttaaaagacccaaagtcctttcctcccccacctttgaaacctggacaaaaaacttatacaggacaacagcaacagcaaatgccaaatggtcaggccagttatgcttttcagggtgcataccaaggccaacctggcgcaggaagtacggaacagtctcaatacgcacaaccacagtataatcagtatccacaacagcagttacaacaaggtgtaatgccacagcaacagcagttacaacaaggtgtagtgccacagcagccgcctatatatggagagcaagtaccaccgtatgggtctaattctaatgcaaccagctaccagtctttaccgcaacaaaatcaaccccaaaatgcaattccaagtcaggtatctttgaactctgcttctcagcaaagcacagggtttgtctctcaaaatttacaatatggtacccaaagtagtaatccggcaccatctccgtctttccagaacggtcttcagtgtcatcagcagccgcaatacgtatctcatggctctaccaatctcggacaatcccaatttccaagtggccaacagcagcagcccacgacacagtttggccagcaagttttaccatctcctgcacaaccacaacagcaacaacaagggcaaccattaccgcccccgcgcggtcaagtgatcttgccagcgcccggagagcctttatccaatggctttgggcaacagcaacagcaacagcaacagcaacagcagcctttgaaccaaaacaacgctttgttgccacaaatgaacgtggaaggagtttctgggatggctgcggttcagcctgtctatggccaagccatgagcagtactacaaacatgcaagattccaaccccagctatggagcttctcccatgcaaggtcagcctccagtcggtggacaaccgcctgtgcctgtaagaatgcagccacagccaccgcaaccaatgcaacagggaaacatctatccgattgagccttctcttgattctactggctctaccccacattttgaagttactccatttgacccagacgcacctgctccgaagcccaaaatcgatattcccactgtagacgttagtagccttccaccacctcccactcatagggatagaggagcagttgtacaccaggaacctgcgccaagtgggaaaatacagcctaacacaacctcttctgcggcttctttgccagcaaagcattccagaactactactgcagacaatgaaaggaactctggaaacaaagaaaacgatgaaagtacctccaagtcttccattttaggacattatgatgtagatgtcaacatcatgccacctccaaaacctttcagacatggacttgattctgtaccttctgagcacaccacgaagaacgcaccagaaagagcagtgccaattttacctcctagaaacaatgttgagcctcctcctcccccaagtagaggcaattttgagaggacagagtctgtgctttctacgaatgccgctaatgtacaggaggatcccatttctaattttttacctccaccgaagccatttagacatactgaaactaaacaaaatcagaatagtaaagcatctcctgtagaaatgaagggtgaagttttgccagggcacccctctgaggaagatagaaacgttgaaccatctttggtacctcaaagtaaaccgcaatctcaatctcaattcagaagagctcatatggagacacagcctattcaaaacttccagccaccaccaaaaccatttaggcgttctcaatcttccaattctagtgatagttcttatactatcgacggacctgaggcaaatcatgggcgtgggcgtgggcgtatagctaagcaccatgatggtgatgaatacaaccccaagagtgagaattctacagaaaacggtcgtttgggtgatgcccccaacagctttattagaaaaagagcgccaacccctccggccccatccagatctgagaagttacatgagggtactataacatccgaagttgatagttctaaagatgctaataaatatgaaaagagtatacctcctgtaacttcttctattcaagcgcaacagtctacgaagaaggcgcctcctcctgttgtaaagccaaaacctagaaatttttctttaaaggccaatgaatatcccaaggaacttactagggaagcaactggacaagatgaagttttaaactccattaccaatgagttgtctcatatcaaattaagaaaaacaaacgttaatttggaaaagttaggcggttccaaaaaagtgaaggactctagccctgttccctctgatttggatgaaaaatatgtgtctgcatctgggtctattactccaccaaggcctccaccttctaggtctagtccaaagaaagtgccgcctgttgtcccaaaaaagaatgataacttgaagaaaaagccaccagtggtcccaaagaaaaagccattattgaaatctctcgaaccaagacctattgaaatggagagggcctattctggagatatttctgctgctgacgataacttaaatccttttgaaagatacaaaagaaatgttgttcctcaagaagatgacagattacataaattaaaatga

SEQ ID NO: 615 - DNA, 444 bp, Saccharomyces cerevisiae
atgtcctccaatcttaccgaagaacaaattgctgaattcaaagaagcctttgccctctttgataaagataacaatggctctatctcatcaagtgaattggccactgtgatgaggtcattgggtctttcgcccagtgaagcagaagtaaatgatttgatgaacgaaatagatgttgatggtaaccatcaaatcgaatttagtgaatttttggctctgatgtctcgtcaactcaaatcaaatgactctgaacaagaactactagaagcttttaaagtattcgataagaacggtgatggtttaatctccgccgctgagttgaaacacgtgctaacatccattggtgaaaaattgactgatgccgaagtagatgatatgctaagagaggttagtgatggatcaggcgagatcaacattcaacaattcgctgctttgttatctaaatag

SEQ ID NO: 616 - DNA, 444 bp, Artificial Sequence
  Description of Artificial Sequence: Synthetic polynucleotide
atgtcctccaatcttaccgaagaacaaattgctgaattcaaagaagcctttgccctctttgataaagataacaatggctctatctcttccagtgaattggccactgtgatgaggtctttgggtctttctcccagtgaagcagaagtaaatgatttgatgaacgaaatagatgttgatggtaaccatcaaatcgaatttagtgaatttttggctttgatgtctcgtcaactcaaatctaatgactctgaacaagaattattggaagcttttaaagtattcgataagaacggtgatggtttaatctccgccgctgagttgaaacacgtgttaacatccattggtgaaaaattgactgatgccgaagtagatgatatgttgagagaggttagtgatggatctggcgagatcaacattcaacaattcgctgctttgttatctaaatga

SEQ ID NO: 617 - DNA, 1350 bp, Saccharomyces cerevisiae
atgtttttggaaattcctcggtggttacttgccttaataatattatacctttccataccgttagtggtttattatgttataccctacttgttttatggcaacaagtcgaccaaaaaaaggatcatcatatttgtgctgggtgatgtaggacactctccaaggatatgctatcacgctataagtttcagtaagttaggttggcaagtcgagctatgcggttatgtggaggacactctacccaaaattatttccagtgatccaaatatcaccgtccatcatatgtcaaacttgaaaagaaagggaggcggaacatcagttatatttatggtaaagaaggtgctttttcaagttttaagtattttcaaattactttgggaattgagaggaagcgattacatactagttcaaaatccaccgagcatacccattcttccgattgctgtgctatacaagttgaccggttgtaaactaattattgattggcacaatctagcatattcgatattgcaactaaaatttaaaggaaacttttaccatcctttagtgttgatatcttacatggtagagatgatattcagcaaatttgctgattataacttgactgttactgaagcaatgaggaaatatttaattcaaagctttcacttgaatccaaagagatgtgctgttctctacgaccgcccggcttcccaatttcaacctttggcaggtgacatttctcgtcaaaaagccctaactaccaaagcctttataaagaattatattcgcgatgattttgatacagaaaaaggcgataaaattattgtgacttcaacatcattcacccctgatgaagatattggtattttattaggtgccctaaagatttacgaaaactcttatgtcaaatttgattcaagtttgcctaagatcttgtgttttataacgggtaaaggaccactaaaggagaaatatatgaagcaagtagaagaatatgactggaagcgctgtcaaatcgaatttgtgtggttgtcagcagaggattacccaaagttattacaattatgcgattacggagtttccctgcatacttcaagttcagggttggacctgccaatgaaaattttagatatgtttggctcaggtcttcctgttattgcaatgaactatccagtgcttgacgaattagtacaacacaatgtaaatgggttaaaatttgttgatagaagggagcttcatgaatctctgatttttgctatgaaagatgctgatttataccaaaaattgaagaaaaatgtaacgcaggaagctgagaacagatggcaatcaaattgggaacgaacaatgagagatttgaagctaattcattga

SEQ ID NO: 618 - DNA, 1350 bp, Artificial Sequence
  Description of Artificial Sequence: Synthetic polynucleotide
atgtttttggaaattcctcgttggttacttgccttaataatattatacctttccataccgttagtggtttattatgttataccctacttgttttatggcaacaagtctaccaaaaaaaggatcatcatatttgtgttgggtgatgtaggacactctccaaggatatgctatcacgctataagtttcagtaagttaggttggcaagtcgagctctgcggttatgtggaggacactttacccaaaattatttccagtgatccaaatatcaccgtccatcatatgtccaacttgaaaagaaagggaggcggaacatctgttatatttatggtaaagaaggtgctttttcaagttttaagtattttcaaattactttgggaattgagaggaagcgattacatattagttcaaaatccaccgagcatacccattcttccgattgctgtgttatacaagttgaccggttgtaaattgattattgattggcacaatttggcatattctatattgcaattgaaatttaaaggaaacttttaccatcctttagtgttgatatcttacatggtagagatgatattcagcaaatttgctgattataacttgactgttactgaagcaatgaggaaatatttaattcaaagctttcacttgaatccaaagagatgtgctgttctctacgaccgcccggcttcccaatttcaacctttggcaggtgacatttctcgtcaaaaagccttaactaccaaagcctttataaagaattatattcgcgatgattttgatacagaaaaaggcgataaaattattgtgacttctacatctttcacccctgatgaagatattggtattttattaggtgccttgaagatttacgaaaactcttatgtcaaatttgattctagtttgcctaagatcttgtgttttataacgggtaaaggaccattgaaggagaaatatatgaagcaagtagaagaatatgactggaagcgctgtcaaatcgaatttgtgtggttgagtgcagaggattacccaaagttattacaattatgcgattacggagtttccttgcatacttctagttccgggttggacttaccaatgaaaattttagatatgtttggcagtggtcttcctgttattgcaatgaactatccagtgcttgacgaattagtacaacacaatgtaaatgggttaaaatttgttgatagaagggagcttcatgaatctttgatttttgctatgaaagatgctgatttataccaaaaattgaagaaaaatgtaacgcaggaagctgagaacagatggcaaagcaattgggaaagaacaatgagagatttgaagttgattcattga

SEQ ID NO: 619 - DNA, 696 bp, Saccharomyces cerevisiae
atgtttttgagaaacgtaagagttatttccctcaattcaaggagactatttagaactatgagcaccgtcaagggtaaaccagaagatgctaaaataattgaagcccgtcacgttaaagaaacatctgactgcaagtggatcggtttacaaaaaatcatctacaaagatcccaacgggaaggaaagggaatgggatagcgcagtccgcaccactagaagttccggtggtgtagacggcattggtatcttaaccattctaaaatacaaagatggaaaacctgatgaaattttgctacaaaagcagtttcgccctcccgttgagggcgtatgcattgagatgccagccggtttgatagatgcgggtgaagatattgacactgctgccttaagagaattaaaagaagagactggttacagtggtaaaataatttctaaaagcccaacagtttttaacgatcctggtttcacaaacaccaacctctgtctggttactgtcgaagttgatatgagtttacctgaaaaccaaaaaccagttactcaattggaagataatgaatttatcgaatgctttagcgttgagttgcacaagtttcctgatgaaatggttaagttggatcaacaaggctacaagttggatgcacgtgttcaaaacgtagctcaaggtatcctcatggccaagcaataccacatcaaatag

SEQ ID NO: 620 - DNA, 696 bp, Artificial Sequence
  Description of Artificial Sequence: Synthetic polynucleotide
atgtttttgagaaacgtaagagttatttccctcaattctaggagattatttagaactatgagcaccgtcaagggtaaaccagaagatgctaaaataattgaagcccgtcacgttaaagaaacatctgactgcaagtggatcggtttacaaaaaatcatctacaaagatcccaacgggaaggaaagggaatgggatagcgcagtccgcaccactagaagttccggtggtgtagacggcattggtatcttaaccattttgaaatacaaagatggaaaacctgatgaaattttgttgcaaaagcagtttcgccctcccgttgagggcgtatgcattgagatgccagccggtttgatagatgcgggtgaagatattgacactgctgccttaagagaattaaaagaagagactggttacagtggtaaaataatttctaaaagcccaacagtttttaacgatcctggtttcacaaacaccaacctctgtttggttactgtcgaagttgatatgagtttacctgaaaaccaaaaaccagttactcaattggaagataatgaatttatcgaatgctttagcgttgagttgcacaagtttcctgatgaaatggttaagttggatcaacaaggctacaagttggatgcacgtgttcaaaacgtagctcaaggtatcctcatggccaagcaataccacatcaaatga

SEQ ID NO: 621 - DNA, 291 bp, Saccharomyces cerevisiae
atgactatggatactgcgcaattaaagagtcaaatacaacaatatcttgtagaatcaggaaactatgaactaatttcaaacgaactaaaagccagactacttcaagaaggttgggtggataaagtcaaagatttgaccaaatcagagatgaacataaatgaatctacgaactttacccaaattttatccaccgtagaacccaaagcattagaaatggtatcggattcaacaagggaaaccgttttaaagcaaataagggaatttcttgaagagattgtagatacacaatga

SEQ ID NO: 622 - DNA, 291 bp, Artificial Sequence
  Description of Artificial Sequence: Synthetic polynucleotide
atgactatggatactgcgcaattaaagagtcaaatacaacaatatcttgtagaatctggaaactatgaattgatttccaacgaattgaaagccagattacttcaagaaggttgggtggataaagtcaaagatttgaccaaaagtgagatgaacataaatgaatctacgaactttacccaaattttatccaccgtagaacccaaagcattagaaatggtatctgattctacaagggaaaccgttttaaagcaaataagggaatttcttgaagagattgtagatacacaatga

SEQ ID NO: 623 - DNA, 2901 bp, Saccharomyces cerevisiae
atgaatccgggcggtgaacaaacaataatggaacaacccgctcaacagcaacaacaacagcaacaacaacagcagcaacagcaacagcaggcagcagttcctcagcagccactcgacccattaacacaatcaactgcggaaacttggctctccattgcttctttggcagaaacccttggtgatggcgacagggccgcaatggcatatgacgccactttacagttcaatccctcatctgcaaaggctttaacatctttggctcacttgtaccgttccagagacatgttccaaagagctgcagaattatatgaaagagcacttttggtaaatcccgaactatcagatgtgtgggctactttaggtcattgttatctgatgctggatgatctgcaaagagcttacaatgcctatcaacaggctctctaccacctcagtaatcccaacgtaccgaaattatggcatggaatcggcattctttatgacagatatggttcgctcgactatgccgaagaagcttttgccaaagttttggaattggaccctcattttgaaaaggcaaacgaaatttacttcagactaggtattatttataaacatcagggtaaatggtctcaagctttggaatgcttcagatacattctccctcaacctcctgctcccttgcaggagtgggacatatggtttcagttgggtagtgttttggagagtatgggagagtggcaaggtgcgaaggaagcctacgagcatgtcttggctcaaaatcaacatcatgccaaagtattacaacaattaggttgtctttacggtatgagtaacgtacaattttatgaccctcaaaaggcattggattatcttctaaagtcgttagaagcagatccctccgatgccactacatggtaccatctcggtagagtgcatatgattagaacagattatactgccgcatatgatgctttccaacaagctgttaatagagattcaagaaaccctatcttttggtgctcaatcggtgttttatattaccaaatttctcaatacagagacgccttagacgcgtacacaagagccataagattaaatccttatattagtgaagtttggtacgatctaggtactctttacgaaacttgtaacaaccaattatctgacgcccttgatgcgtataagcaagctgcaagactggacgtaaataatgttcacataagagaaagattagaagctttaacaaagcagttagaaaacccaggcaatataaacaaatcgaacggtgcgccaacgaatgcctctcctgccccacctcctgtgattttacaacctaccttacaacctaatgatcaaggaaatcctttgaacactagaatttcagcccaatctgccaatgctactgcttcaatggtacaacaacagcatcctgctcaacaaacgcctattaactcttctgcaacaatgtacagtaatggagcttcccctcaattacaagctcaagctcaagctcaagctcaagcacaagctcaagcacaagcacaagctcaagcacaagcacaagcacaagcgcaagcacaagcacaagcacaggcgcaagcacaggcacaagcacaagcacaagcacatgcacaagcgcaagcacaagcacaagcacaggcacaagcacaagcacaggcgcaggcacaacaacaacaacaacaacagcaacaacaacaacaacaacaacaacaacaacaacaacaacaacaacaacaacaacaacaacagcagcagcaattacagcccctaccaagacaacagctgcagcaaaagggagtttctgtgcaaatgttaaatcctcaacaagggcaaccatatatcacacagccaacagtcatacaagctcaccaactgcaaccattttctacacaagctatggaacatccgcaaagctctcaactgccacctcaacagcaacaactacaatctgttcaacatccacaacaacttcaaggccagcctcaagcccaagctccccaacctttaatccagcataacgtggaacagaacgttttacctcaaaagagatacatggaaggtgcaatccacactttagtagatgccgccgtatccagtagcacccacacagagaataacacaaagtctcctcgtcaaccaacccatgccattccaacgcaagctcccgcaacaggaataacgaacgctgaaccacaggtaaagaagcaaaagttgaactctccaaattcaaacatcaacaaattagtaaatactgctacttccattgaagaaaatgcaaaatctgaggtgagcaaccaatcgccagcagtagtggagtctaataccaataatacttcacaagaagaaaaacctgtaaaagcaaactcaataccttcagtaattggcgcacaggaacctccacaggaagctagtcctgctgaagaagctaccaaagcagcttctgtttctccttctacaaaaccgcttaatacggaaccagagtcatctagtgtccaaccaactgtatcatcagaaagttcaacaacaaaagcaaatgaccaaagcactgctgagaccatagaactttctactgctactgttcctgcagaagcaagccctgtagaagacgaagtaagacagcattctaaagaggaaaacggcacaactgaagcatctgcaccttctactgaagaggcggagccagcagcttccagagatgctgaaaaacaacaagatgaaaccgctgctacaacgataactgtaatcaaacctactttggaaacaatggaaacagtgaaagaggaggccaaaatgcgtgaggaagagcaaacatctcaagaaaaatccccacaggagaacacacttccaagagaaaatgtagtaaggcaagtggaagaagatgaaaactacgacgactaa

SEQ ID NO: 624 - DNA, 2901 bp, Artificial Sequence
  Description of Artificial Sequence: Synthetic polynucleotide
atgaatccgggcggtgaacaaacaataatggaacaacccgctcaacagcaacaacaacagcaacaacaacagcagcaacagcaacagcaggcagcagttcctcagcagccactcgacccattaacacaatctactgcggaaacttggctctccattgcttctttggcagaaacccttggtgatggcgacagggccgcaatggcatatgacgccactttacagttcaatccctcttctgcaaaggctttaacatctttggctcacttgtaccgttccagagacatgttccaaagagctgcagaattatatgaaagagcacttttggtaaatcccgaattaagtgatgtgtgggctactttaggtcattgttatttaatgcttgatgatttgcaaagagcttacaatgcctatcaacaggctctctaccacctcagtaatcccaacgtaccgaaattatggcatggaatcggcattctttatgacagatatggttctctcgactatgccgaagaagcttttgccaaagttttggaattggaccctcattttgaaaaggcaaacgaaatttacttcagattaggtattatttataaacatcagggtaaatggtctcaagctttggaatgcttcagatacattctccctcaacctcctgctcccttgcaggagtgggacatatggtttcagttgggtagtgttttggagagtatgggagagtggcaaggtgcgaaggaagcctacgagcatgtcttggctcaaaatcaacatcatgccaaagtattacaacaattaggttgtctttacggtatgagtaacgtacaattttatgaccctcaaaaggcattggattatcttttgaagtctttagaagcagatccctccgatgccactacatggtaccatctcggtagagtgcatatgattagaacagattatactgccgcatatgatgctttccaacaagctgttaatagagattccagaaaccctatcttttggtgctccatcggtgttttatattaccaaatttctcaatacagagacgccttagacgcgtacacaagagccataagattaaatccttatattagtgaagtttggtacgatttaggtactctttacgaaacttgtaacaaccaattatctgacgcccttgatgcgtataagcaagctgcaagattagacgtaaataatgttcacataagagaaagattagaagctttaacaaagcagttagaaaacccaggcaatataaacaaaagtaacggtgcgccaacgaatgcctctcctgccccacctcctgtgattttacaacctaccttacaacctaatgatcaaggaaatcctttgaacactagaatttctgcccaatctgccaatgctactgcttccatggtacaacaacagcatcctgctcaacaaacgcctattaactcttctgcaacaatgtacagtaatggagcttcccctcaattacaagctcaagctcaagctcaagctcaagcacaagctcaagcacaagcacaagctcaagcacaagcacaagcacaagcgcaagcacaagcacaagcacaggcgcaagcacaggcacaagcacaagcacaagcacatgcacaagcgcaagcacaagcacaagcacaggcacaagcacaagcacaggcgcaggcacaacaacaacaacaacaacagcaacaacaacaacaacaacaacaacaacaacaacaacaacaacaacaacaacaacaacaacagcagcagcaattacagcccttaccaagacaacagttacagcaaaagggagtttctgtgcaaatgttaaatcctcaacaagggcaaccatatatcacacagccaacagtcatacaagctcaccaattacaaccattttctacacaagctatggaacatccgcaaagctctcaattaccacctcaacagcaacaattacaatctgttcaacatccacaacaacttcaaggccagcctcaagcccaagctccccaacctttaatccagcataacgtggaacagaacgttttacctcaaaagagatacatggaaggtgcaatccacactttagtagatgccgccgtatccagtagcacccacacagagaataacacaaagtctcctcgtcaaccaacccatgccattccaacgcaagctcccgcaacaggaataacgaacgctgaaccacaggtaaagaagcaaaagttgaactctccaaatagcaacatcaacaaattagtaaatactgctacttccattgaagaaaatgcaaaatctgaggtgagcaaccaatctccagcagtagtggagtctaataccaataatacttctcaagaagaaaaacctgtaaaagcaaacagcataccttctgtaattggcgcacaggaacctccacaggaagctagtcctgctgaagaagctaccaaagcagcttctgtttctccttctacaaaaccgcttaatacggaaccagagtcttctagtgtccaaccaactgtatcttctgaaagttctacaacaaaagcaaatgaccaaagcactgctgagaccatagaactttctactgctactgttcctgcagaagcaagccctgtagaagacgaagtaagacagcattctaaagaggaaaacggcacaactgaagcatctgcaccttctactgaagaggcggagccagcagcttccagagatgctgaaaaacaacaagatgaaaccgctgctacaacgataactgtaatcaaacctactttggaaacaatggaaacagtgaaagaggaggccaaaatgcgtgaggaagagcaaacatctcaagaaaaatccccacaggagaacacacttccaagagaaaatgtagtaaggcaagtggaagaagatgaaaactacgacgactga

SEQ ID NO: 625 - DNA, 2373 bp, Saccharomyces cerevisiae
atgcaagaagggggctttatccgtagaaggcgtacgagaagtacgaaaaaaagtgttaattataatgaactaagcgatgacgatacagctgtgaaaaactcaaaaactctgcagctgaaagggaacagcgaaaacgtaaatgacagccaagatgaagaataccgtgatgatgctacgctcgtgaaatcacccgacgacgatgacaaagattttatcatagacctaacaggttcagataaagagcggaccgccaccgatgagaatactcatgcgatcaagaatgataatgacgagataatagaaatcaaggaggaacgtgatgtttcggatgacgacgaaccgttaacaaagaaaaggaagacaactgctaggaagaagaagaaaaaaacgagcaccaagaaaaagtcaccgaaggtaaccccatatgaaagaaacactttgcgattatatgagcatcatcctgaactaaggaatgttttcacggatttgaaaaatgcacctccctatgtcccccaaagatccaagcagccggatggtatgaccatcaaactgctacctttccagttagaaggtcttcattggctaatatctcaagaggagagcatttatgcgggcggtgttttggcagacgaaatgggtatgggtaagaccatccaaactattgccctattaatgaacgatttgactaagtctccgtctttagttgttgcccctaccgtggcgctgatgcagtggaaaaacgaaatagaacaacatacaaagggacaactgaaaatatacatttatcacggtgcttccagaaccacggatatcaaagatttgcaaggctacgatgttgtactaaccacttacgcagtgctggaatcggtattcagaaagcaaaactacgggtttagaaggaaaaatggacttttcaagcagccttccgtattgcataatattgacttttatagagttattctggatgaggcacacaatatcaaggatagacaaagcaatactgctagggctgtaaacaacttaaaaacgcaaaagcgatggtgcctgtcgggtactccgctgcaaaatagaattggtgagatgtattctttgatcagattcttaaatatcaatcctttcacaaagtacttttgtaccaagtgtgattgcgcttcgaaggactggaaatttacggatcgcatgcattgtgaccattgtagtcacgtcattatgcaacacacgaatttcttcaaccatttcatgttgaagaacattcagaaatttggtgtggaaggtcctggtttagagtcttttaataacattcagacattattgaaaaacatcatgctgcgaagaactaaagtggaaagagcggatgacttgggtctaccgcccagaattgttaccgtgaggagagacttcttcaatgaagaggaaaaagatctttacagaagtttatacacagattctaaaaggaagtataattcctttgttgaggagggtgttgttctaaacaattatgcaaacattttcaccctaatcacaagaatgaggcaactggcagatcatcctgatttagttttgaaaagattaaacaattttcctggcgatgatatcggcgtcgtgatctgccaattatgtaacgatgaagctgaggagcccattgaatctaaatgtcaccataagttctgtcgtttatgcatcaaagaatatgtggaatctttcatggaaaacaacaataaacttacttgtcctgtttgtcatatcgggctaagtatcgatttgtctcaacctgctttggaagtggaccttgattccttcaaaaagcaaagtattgttagccgtctaaacatgagtggcaagtggcaatcatcaacgaaaatcgaagcacttgtggaagaactatacaaactgagaagcaacaagagaacgattaaatccattgtgttttcccagtttaccagtatgctggatctggtagagtggagattgaaaagagctggatttcaaacagtgaagcttcagggtagtatgtcaccgacgcaaagagatgaaaccatcaagtatttcatgaacaacattcaatgcgaggttttcttggtcagtttaaaggcgggcggtgttgctttgaatctttgtgaagcttcgcaagtattcattttagacccatggtggaaccctagtgttgaatggcaaagtggtgatagagttcatagaattggtcagtatcgacctgtgaagatcacaaggttttgcattgaggatagtatagaagcaagaatcattgaattacaggaaaaaaaggcaaatatgattcatgctacaataaaccaagatgaagctgccattagcagactaacgccagctgatttacagttcttattcaataactaa

SEQ ID NO: 626 - DNA, 2373 bp, Artificial Sequence
  Description of Artificial Sequence: Synthetic polynucleotide
atgcaagaagggggctttatccgtagaaggcgtacgagaagtacgaaaaaaagtgttaattataatgaattgagcgatgacgatacagctgtgaaaaactccaaaactttacagttgaaagggaacagcgaaaacgtaaatgacagccaagatgaagaataccgtgatgatgctacgctcgtgaaaagtcccgacgacgatgacaaagattttatcatagacttgacaggttctgataaagagagaaccgccaccgatgagaatactcatgcgatcaagaatgataatgacgagataatagaaatcaaggaggaacgtgatgtttctgatgacgacgaaccgttaacaaagaaaaggaagacaactgctaggaagaagaagaaaaaaacgagcaccaagaaaaagagcccgaaggtaaccccatatgaaagaaacactttgagattatatgagcatcatcctgaattgaggaatgttttcacggatttgaaaaatgcacctccctatgtcccccaaagatccaagcagccggatggtatgaccatcaaattattgcctttccagttagaaggtcttcattggttgatatctcaagaggagagcatttatgcgggcggtgttttggcagacgaaatgggtatgggtaagaccatccaaactattgccttattaatgaacgatttgactaagtctccgtctttagttgttgcccctaccgtggcgttaatgcagtggaaaaacgaaatagaacaacatacaaagggacaattgaaaatatacatttatcacggtgcttccagaaccacggatatcaaagatttgcaaggctacgatgttgtattaaccacttacgcagtgttggaaagtgtattcagaaagcaaaactacgggtttagaaggaaaaatggacttttcaagcagccttccgtattgcataatattgacttttatagagttattttagatgaggcacacaatatcaaggatagacaaagcaatactgctagggctgtaaacaacttaaaaacgcaaaagagatggtgcctttctggtactccgttacaaaatagaattggtgagatgtattctttgatcagattcttaaatatcaatcctttcacaaagtacttttgtaccaagtgtgattgcgcttccaaggactggaaatttacggatcgcatgcattgtgaccattgtagtcacgtcattatgcaacacacgaatttcttcaaccatttcatgttgaagaacattcagaaatttggtgtggaaggtcctggtttagagtcttttaataacattcagacattattgaaaaacatcatgttaagaagaactaaagtggaaagagcggatgacttgggtttaccgcccagaattgttaccgtgaggagagacttcttcaatgaagaggaaaaagatctttacagaagtttatacacagattctaaaaggaagtataattcctttgttgaggagggtgttgttttgaacaattatgcaaacattttcaccttaatcacaagaatgaggcaattggcagatcatcctgatttagttttgaaaagattaaacaattttcctggcgatgatatcggcgtcgtgatctgccaattatgtaacgatgaagctgaggagcccattgaatctaaatgtcaccataagttctgtcgtttatgcatcaaagaatatgtggaatctttcatggaaaacaacaataaacttacttgtcctgtttgtcatatcgggttgagtatcgatttgtctcaacctgctttggaagtggaccttgattccttcaaaaagcaaagtattgttagccgtttgaacatgagtggcaagtggcaatcttctacgaaaatcgaagcacttgtggaagaattatacaaattgagaagcaacaagagaacgattaaatccattgtgttttcccagtttaccagtatgcttgatttagtagagtggagattgaaaagagctggatttcaaacagtgaagcttcagggtagtatgtctccgacgcaaagagatgaaaccatcaagtatttcatgaacaacattcaatgcgaggttttcttggtcagtttaaaggcgggcggtgttgctttgaatctttgtgaagcttctcaagtattcattttagacccatggtggaaccctagtgttgaatggcaaagtggtgatagagttcatagaattggtcagtataggcctgtgaagatcacaaggttttgcattgaggatagtatagaagcaagaatcattgaattacaggaaaaaaaggcaaatatgattcatgctacaataaaccaagatgaagctgccattagcagattgacgccagctgatttacagttcttattcaataactga

SEQ ID NO: 627 - DNA, 4179 bp, Saccharomyces cerevisiae
atgactaacgaaaaggtctggatagagaagttggataatccaactctttcagtgttaccacatgactttttacgcccacaacaagaaccttatacgaaacaagctacatattcgttacagctacctcagctcgatgtgcctcatgatagtttttctaacaaatacgctgtcgctttgagtgtatgggctgcattgatatatagagtaaccggtgacgatgatattgttctttatattgcgaataacaaaatcttaagattcaatattcaaccaacgtggtcatttaatgagctgtattctacaattaacaatgagttgaacaagctcaattctattgaggccaatttttcctttgacgagctagctgaaaaaattcaaagttgccaagatctggaaaggacccctcagttgttccgtttggcctttttggaaaaccaagatttcaaattagacgagttcaagcatcatttagtggactttgctttgaatttggataccagtaataatgcgcatgttttgaacttaatttataacagcttactgtattcgaatgaaagagtaaccattgttgcggaccaatttactcaatatttgactgctgcgctaagcgatccatccaattgcataactaaaatctctctgatcaccgcatcatccaaggatagtttacctgatccaactaagaacttgggctggtgcgatttcgtggggtgtattcacgacattttccaggacaatgctgaagccttcccagagagaacctgtgttgtggagactccaacactaaattccgacaagtcccgttctttcacttatcgcgacatcaaccgcacttctaacatagttgcccattatttgattaaaacaggtatcaaaagaggtgatgtagtgatgatctattcttctaggggtgtggatttgatggtatgtgtgatgggtgtcttgaaagccggcgcaaccttttcagttatcgaccctgcatatcccccagccagacaaaccatttacttaggtgttgctaaaccacgtgggttgattgttattagagctgctggacaattggatcaactagtagaagattacatcaatgatgaattggagattgtttcaagaatcaattccatcgctattcaagaaaatggtaccattgaaggtggcaaattggacaatggcgaggatgttttggctccatatgatcactacaaagacaccagaacaggtgttgtagttggaccagattccaacccaaccctatctttcacatctggttccgaaggtattcctaagggtgttcttggtagacatttttccttggcttattatttcaattggatgtccaaaaggttcaacttaacagaaaatgataaattcacaatgctgagcggtattgcacatgatccaattcaaagagatatgtttacaccattatttttaggtgcccaattgtatgtccctactcaagatgatattggtacaccgggccgtttagcggaatggatgagtaagtatggttgcacagttacccatttaacacctgccatgggtcaattacttactgcccaagctactacaccattccctaagttacatcatgcgttctttgtgggtgacattttaacaaaacgtgattgtctgaggttacaaaccttggcagaaaattgccgtattgttaatatgtacggtaccactgaaacacagcgtgcagtttcttatttcgaagttaaatcaaaaaatgacgatccaaactttttgaaaaaattgaaagatgtcatgcctgctggtaaaggtatgttgaacgttcagctactagttgttaacaggaacgatcgtactcaaatatgtggtattggcgaaataggtgagatttatgttcgtgcaggtggtttggccgaaggttatagaggattaccagaattgaataaagaaaaatttgtgaacaactggtttgttgaaaaagatcactggaattatttggataaggataatggtgaaccttggagacaattctggttaggtccaagagatagattgtacagaacgggtgatttaggtcgttatctaccaaacggtgactgtgaatgttgcggtagggctgatgatcaagttaaaattcgtgggttcagaatcgaattaggagaaatagatacgcacatttcccaacatccattggtaagagaaaacattactttagttcgcaaaaatgccgacaatgagccaacattgatcacatttatggtcccaagatttgacaagccagatgacttgtctaagttccaaagtgatgttccaaaggaggttgaaactgaccctatagttaagggcttaatcggttaccatcttttatccaaggacatcaggactttcttaaagaaaagattggctagctatgctatgccttccttgattgtggttatggataaactaccattgaatccaaatggtaaagttgataagcctaaacttcaattcccaactcccaagcaattaaatttggtagctgaaaatacagtttctgaaactgacgactctcagtttaccaatgttgagcgcgaggttagagacttatggttaagtatattacctaccaagccagcatctgtatcaccagatgattcgtttttcgatttaggtggtcattctatcttggctaccaaaatgatttttaccttaaagaaaaagctgcaagttgatttaccattgggcacaattttcaagtatccaacgataaaggcctttgccgcggaaattgacagaattaaatcatcgggtggatcatctcaaggtgaggtcgtcgaaaatgtcactgcaaattatgcggaagacgccaagaaattggttgagacgctaccaagttcgtacccctctcgagaatattttgttgaacctaatagtgccgaaggaaaaacaacaattaatgtgtttgttaccggtgtcacaggatttctgggctcctacatccttgcagatttgttaggacgttctccaaagaactacagtttcaaagtgtttgcccacgtcagggccaaggatgaagaagctgcatttgcaagattacaaaaggcaggtatcacctatggtacttggaacgaaaaatttgcctcaaatattaaagttgtattaggcgatttatctaaaagccaatttggtctttcagatgagaagtggatggatttggcaaacacagttgatataattatccataatggtgcgttagttcactgggtttatccatatgccaaattgagggatccaaatgttatttcaactatcaatgttatgagcttagccgccgtcggcaagccaaagttctttgactttgtttcctccacttctactcttgacactgaatactactttaatttgtcagataaacttgttagcgaagggaagccaggcattttagaatcagacgatttaatgaactctgcaagcgggctcactggtggatatggtcagtccaaatgggctgctgagtacatcattagacgtgcaggtgaaaggggcctacgtgggtgtattgtcagaccaggttacgtaacaggtgcctctgccaatggttcttcaaacacagatgatttcttattgagatttttgaaaggttcagtccaattaggtaagattccagatatcgaaaattccgtgaatatggttccagtagatcatgttgctcgtgttgttgttgctacgtctttgaatcctcccaaagaaaatgaattggccgttgctcaagtaacgggtcacccaagaatattattcaaagactacttgtatactttacacgattatggttacgatgtcgaaatcgaaagctattctaaatggaagaaatcattggaggcgtctgttattgacaggaatgaagaaaatgcgttgtatcctttgctacacatggtcttagacaacttacctgaaagtaccaaagctccggaactagacgataggaacgccgtggcatctttaaagaaagacaccgcatggacaggtgttgattggtctaatggaataggtgttactccagaagaggttggtatatatattgcatttttaaacaaggttggatttttacctccaccaactcataatgacaaacttccactgccaagtatagaactaactcaagcgcaaataagtctagttgcttcaggtgctggtgctcgtggaagctccgcagcagcttaa

SEQ ID NO: 628 - DNA, 4179 bp, Artificial Sequence
  Description of Artificial Sequence: Synthetic polynucleotide
atgactaacgaaaaggtctggatagagaagttggataatccaactctttctgtgttaccacatgactttttacgcccacaacaagaaccttatacgaaacaagctacatattctttacagttgcctcagctcgatgtgcctcatgatagtttttctaacaaatacgctgtcgctttgagtgtatgggctgcattgatatatagagtaaccggtgacgatgatattgttctttatattgcgaataacaaaatcttaagattcaatattcaaccaacgtggtcttttaatgagttgtattctacaattaacaatgagttgaacaagctcaattctattgaggccaatttttcctttgacgagttggctgaaaaaattcaaagttgccaagatttggaaaggacccctcagttgttccgtttggcctttttggaaaaccaagatttcaaattagacgagttcaagcatcatttagtggactttgctttgaatttggataccagtaataatgcgcatgttttgaacttaatttataacagcttattatattctaatgaaagagtaaccattgttgcggaccaatttactcaatatttgactgctgcgttgagcgatccatccaattgcataactaaaatctctttgatcaccgcatcttccaaggatagtttacctgatccaactaagaacttgggctggtgcgatttcgtggggtgtattcacgacattttccaggacaatgctgaagccttcccagagagaacctgtgttgtggagactccaacattaaattccgacaagtcccgttctttcacttatcgcgacatcaaccgcacttctaacatagttgcccattatttgattaaaacaggtatcaaaagaggtgatgtagtgatgatctattcttctaggggtgtggatttgatggtatgtgtgatgggtgtcttgaaagccggcgcaaccttttctgttatcgaccctgcatatcccccagccagacaaaccatttacttaggtgttgctaaaccacgtgggttgattgttattagagctgctggacaattggatcaattggtagaagattacatcaatgatgaattggagattgtttctagaatcaattccatcgctattcaagaaaatggtaccattgaaggtggcaaattggacaatggcgaggatgttttggctccatatgatcactacaaagacaccagaacaggtgttgtagttggaccagattccaacccaaccctttctttcacatctggttccgaaggtattcctaagggtgttcttggtagacatttttccttggcttattatttcaattggatgtccaaaaggttcaacttaacagaaaatgataaattcacaatgttaagcggtattgcacatgatccaattcaaagagatatgtttacaccattatttttaggtgcccaattgtatgtccctactcaagatgatattggtacaccgggccgtttagcggaatggatgagtaagtatggttgcacagttacccatttaacacctgccatgggtcaattacttactgcccaagctactacaccattccctaagttacatcatgcgttctttgtgggtgacattttaacaaaacgtgattgtttgaggttacaaaccttggcagaaaattgccgtattgttaatatgtacggtaccactgaaacacagcgtgcagtttcttatttcgaagttaaatctaaaaatgacgatccaaactttttgaaaaaattgaaagatgtcatgcctgctggtaaaggtatgttgaacgttcagttgttggttgttaacaggaacgatcgtactcaaatatgtggtattggcgaaataggtgagatttatgttcgtgcaggtggtttggccgaaggttatagaggattaccagaattgaataaagaaaaatttgtgaacaactggtttgttgaaaaagatcactggaattatttggataaggataatggtgaaccttggagacaattctggttaggtccaagagatagattgtacagaacgggtgatttaggtcgttatttaccaaacggtgactgtgaatgttgcggtagggctgatgatcaagttaaaattcgtgggttcagaatcgaattaggagaaatagatacgcacatttcccaacatccattggtaagagaaaacattactttagttcgcaaaaatgccgacaatgagccaacattgatcacatttatggtcccaagatttgacaagccagatgacttgtctaagttccaaagtgatgttccaaaggaggttgaaactgaccctatagttaagggcttaatcggttaccatcttttatccaaggacatcaggactttcttaaagaaaagattggctagctatgctatgccttccttgattgtggttatggataaattaccattgaatccaaatggtaaagttgataagcctaaacttcaattcccaactcccaagcaattaaatttggtagctgaaaatacagtttctgaaactgacgactctcagtttaccaatgttgagcgcgaggttagagacttatggttaagtatattacctaccaagccagcatctgtatctccagatgattcttttttcgatttaggtggtcattctatcttggctaccaaaatgatttttaccttaaagaaaaagttacaagttgatttaccattgggcacaattttcaagtatccaacgataaaggcctttgccgcggaaattgacagaattaaaagcagtggtggatcttctcaaggtgaggtcgtcgaaaatgtcactgcaaattatgcggaagacgccaagaaattggttgagacgttaccaagtagttacccctctagagaatattttgttgaacctaatagtgccgaaggaaaaacaacaattaatgtgtttgttaccggtgtcacaggatttttgggctcctacatccttgcagatttgttaggacgttctccaaagaactacagtttcaaagtgtttgcccacgtcagggccaaggatgaagaagctgcatttgcaagattacaaaaggcaggtatcacctatggtacttggaacgaaaaatttgcctctaatattaaagttgtattaggcgatttatctaaaagccaatttggtctttctgatgagaagtggatggatttggcaaacacagttgatataattatccataatggtgcgttagttcactgggtttatccatatgccaaattgagggatccaaatgttatttctactatcaatgttatgagcttagccgccgtcggcaagccaaagttctttgactttgtttcctccacttctactcttgacactgaatactactttaatttgagtgataaacttgttagcgaagggaagccaggcattttagaaagtgacgatttaatgaactctgcaagcgggctcactggtggatatggtcagtccaaatgggctgctgagtacatcattagacgtgcaggtgaaaggggcttgcgtgggtgtattgtcagaccaggttacgtaacaggtgcctctgccaatggttcttccaacacagatgatttcttattgagatttttgaaaggttctgtccaattaggtaagattccagatatcgaaaattccgtgaatatggttccagtagatcatgttgctcgtgttgttgttgctacgtctttgaatcctcccaaagaaaatgaattggccgttgctcaagtaacgggtcacccaagaatattattcaaagactacttgtatactttacacgattatggttacgatgtcgaaatcgaaagctattctaaatggaagaaatctttggaggcgtctgttattgacaggaatgaagaaaatgcgttgtatcctttgttgcacatggtcttagacaacttacctgaaagtaccaaagctccggaattagacgataggaacgccgtggcatctttaaagaaagacaccgcatggacaggtgttgattggtctaatggaataggtgttactccagaagaggttggtatatatattgcatttttaaacaaggttggatttttacctccaccaactcataatgacaaacttccattaccaagtatagaattgactcaagcgcaaataagtttggttgcttctggtgctggtgctcgtggaagctccgcagcagcttga

SEQ ID NO: 629 - DNA, 2046 bp, Saccharomyces cerevisiae
atggcacagttctccgacattgataaacttgcggtttccactttaagattactttccgttgaccaggtggaaagcgcacaatctggccacccaggtgcaccactaggattggcaccagttgcccatgtaattttcaagcaactgcgctgtaaccctaacaatgaacattggatcaatagagacaggtttgttctgtcgaacggtcactcatgcgctcttctgtactcaatgctccatctattaggatacgattactctatcgaggacttgagacaatttagacaagtaaactcaaggacaccgggtcatccagaattccactcagcgggagtggaaatcacttccggtccgctaggccagggtatctcaaatgctgttggtatggcaatagcgcaggccaactttgccgccacttataacgaggatggctttcccatttccgactcatatacgtttgctattgtaggggatggttgcttacaagagggtgtttcttcggagacctcttccttagcgggacatctgcaattgggtaacttgattacgttttatgacagtaatagcatttccattgacggtaaaacctcgtactcgttcgacgaagatgttttgaagcgatacgaggcatatggttgggaagtcatggaagtcgataaaggagacgacgatatggaatccatttctagcgctttggaaaaggcaaaactatcgaaggacaagccaaccataatcaaggtaactactacaattggatttgggtccctacaacagggtactgctggtgttcatgggtccgctttgaaggcagatgatgttaaacagttgaagaagaggtgggggtttgacccaaataaatcatttgtagtacctcaagaggtgtacgattattataagaagactgttgtggaacccggtcaaaaacttaatgaggaatgggataggatgtttgaagaatacaaaaccaaatttcccgagaagggtaaagaattgcaaagaagattgaatggtgagttaccggaaggttgggaaaagcatttaccgaagtttactccggacgacgatgctctggcaacaagaaagacatcccagcaggtgctgacgaacatggtccaagttttgcctgaattgatcggtggttctgccgatttgacaccttcgaatctgacaaggtgggaaggcgcggtagatttccaacctcccattacccaactaggtaactatgcaggaaggtacattagatacggtgtgagggaacacggaatgggtgccattatgaacggtatctctgcctttggtgcaaactacaagccttacggtggtacctttttgaacttcgtctcttatgctgcaggagccgttaggttagccgccttgtctggtaatccagtcatttgggttgcaacacatgactctatcgggcttggtgaggatggtccaacgcaccaacctattgaaactctggctcacttgagggctattccaaacatgcatgtatggagacctgctgatggtaacgaaacttctgctgcgtattattctgctatcaaatctggtcgaacaccatctgttgtggctttatcacgacagaatcttcctcaattggagcattcctcttttgaaaaagccttgaagggtggctatgtgatccatgacgtggagaatcctgatattatcctggtgtcaacaggatcagaagtctccatttctatagatgcagccaaaaaattgtacgatactaaaaaaatcaaagcaagagttgtttccctgccagacttttatacttttgacaggcaaagtgaagaatacagattctctgttctaccagacggtgttccgatcatgtcctttgaagtattggctacttcaagctggggtaagtatgctcatcaatcgttcggactcgacgaatttggtcgttcaggcaaggggcctgaaatttacaaattgttcgatttcacagcggacggtgttgcgtcaagggctgaaaagacaatcaattactacaaaggaaagcagttgctttctcctatgggaagagctttctaa

SEQ ID NO: 630 - DNA, 2046 bp, Artificial Sequence
  Description of Artificial Sequence: Synthetic polynucleotide
atggcacagttctccgacattgataaacttgcggtttccactttaagattactttccgttgaccaggtggaaagcgcacaatctggccacccaggtgcaccattaggattggcaccagttgcccatgtaattttcaagcaattgcgctgtaaccctaacaatgaacattggatcaatagagacaggtttgttttatctaacggtcactcttgcgctcttttatactccatgctccatcttttaggatacgattactctatcgaggacttgagacaatttagacaagtaaacagcaggacaccgggtcatccagaattccactctgcgggagtggaaatcacttccggtccgttgggccagggtatctctaatgctgttggtatggcaatagcgcaggccaactttgccgccacttataacgaggatggctttcccatttccgactcttatacgtttgctattgtaggggatggttgcttacaagagggtgtttcttctgagacctcttccttagcgggacatttacaattgggtaacttgattacgttttatgacagtaatagcatttccattgacggtaaaacctcttactctttcgacgaagatgttttgaagagatacgaggcatatggttgggaagtcatggaagtcgataaaggagacgacgatatggaatccatttctagcgctttggaaaaggcaaaattatccaaggacaagccaaccataatcaaggtaactactacaattggatttgggtccttacaacagggtactgctggtgttcatgggtccgctttgaaggcagatgatgttaaacagttgaagaagaggtgggggtttgacccaaataaaagttttgtagtacctcaagaggtgtacgattattataagaagactgttgtggaacccggtcaaaaacttaatgaggaatgggataggatgtttgaagaatacaaaaccaaatttcccgagaagggtaaagaattgcaaagaagattgaatggtgagttaccggaaggttgggaaaagcatttaccgaagtttactccggacgacgatgctttggcaacaagaaagacatcccagcaggtgttaacgaacatggtccaagttttgcctgaattgatcggtggttctgccgatttgacaccttccaatttgacaaggtgggaaggcgcggtagatttccaacctcccattacccaattgggtaactatgcaggaaggtacattagatacggtgtgagggaacacggaatgggtgccattatgaacggtatctctgcctttggtgcaaactacaagccttacggtggtacctttttgaacttcgtctcttatgctgcaggagccgttaggttagccgccttgtctggtaatccagtcatttgggttgcaacacatgactctatcgggcttggtgaggatggtccaacgcaccaacctattgaaactttggctcacttgagggctattccaaacatgcatgtatggagacctgctgatggtaacgaaacttctgctgcgtattattctgctatcaaatctggtagaacaccatctgttgtggctttaagtaggcagaatcttcctcaattggagcattcctcttttgaaaaagccttgaagggtggctatgtgatccatgacgtggagaatcctgatattatcttagtgtctacaggatctgaagtctccatttctatagatgcagccaaaaaattgtacgatactaaaaaaatcaaagcaagagttgtttccttgccagacttttatacttttgacaggcaaagtgaagaatacagattctctgttttgccagacggtgttccgatcatgtcctttgaagtattggctacttccagctggggtaagtatgctcatcaaagtttcggactcgacgaatttggtcgtagcggcaaggggcctgaaatttacaaattgttcgatttcacagcggacggtgttgcgtccagggctgaaaagacaatcaattactacaaaggaaagcagttgctttctcctatgggaagagctttctga

SEQ ID NO: 631 - DNA, 1377 bp, Saccharomyces cerevisiae
atgggtaaagagaagtctcacattaacgttgtcgttatcggtcatgtcgattctggtaagtctaccactaccggtcatttgatttacaagtgtggtggtattgacaagagaaccatcgaaaagttcgaaaaggaagccgctgaattaggtaagggttctttcaagtacgcttgggttttggacaagttaaaggctgaaagagaaagaggtatcactatcgatattgctttgtggaagttcgaaactccaaagtaccaagttaccgttattgatgctccaggtcacagagatttcatcaagaacatgattactggtacttctcaagctgactgtgctatcttgattattgctggtggtgtcggtgaattcgaagccggtatctctaaggatggtcaaaccagagaacacgctttgttggctttcaccttgggtgttagacaattgattgttgctgtcaacaagatggactccgtcaaatgggacgaatccagattccaagaaattgtcaaggaaacctccaactttatcaagaaggttggttacaacccaaagactgttccattcgtcccaatctctggttggaacggtgacaacatgattgaagctaccaccaacgctccatggtacaagggttgggaaaaggaaaccaaggccggtgtcgtcaagggtaagactttgttggaagccattgacgccattgaacaaccatctagaccaactgacaagccattgagattgccattgcaagatgtttacaagatcggtggtattggtactgtgccagtcggtagagttgaaaccggtgtcatcaagccaggtatggttgttactttcgccccagctggtgttaccactgaagtcaagtccgttgaaatgcatcacgaacaattggaacaaggtgttccaggtgacaacgttggtttcaacgtcaagaacgtttccgttaaggaaatcagaagaggtaacgtctgtggtgacgctaagaacgatccaccaaagggttgcgcttctttcaacgctaccgtcattgttttgaaccatccaggtcaaatctctgctggttactctccagttttggattgtcacactgctcacattgcttgtagattcgacgaattgttggaaaagaacgacagaagatctggtaagaagttggaagaccatccaaagttcttgaagtccggtgacgctgctttggtcaagttcgttccatctaagccaatgtgtgttgaagctttcagtgaatacccaccattaggtagattcgctgtcagagacatgagacaaactgtcgctgtcggtgttatcaagtctgttgacaagactgaaaaggccgctaaggttaccaaggctgctcaaaaggctgctaagaaataa

SEQ ID NO: 632 - DNA, 1377 bp, Artificial Sequence
  Description of Artificial Sequence: Synthetic polynucleotide
atgggtaaagagaagtctcacattaacgttgtcgttatcggtcatgtcgattctggtaagtctaccactaccggtcatttgatttacaagtgtggtggtattgacaagagaaccatcgaaaagttcgaaaaggaagccgctgaattaggtaagggttctttcaagtacgcttgggttttggacaagttaaaggctgaaagagaaagaggtatcactatcgatattgctttgtggaagttcgaaactccaaagtaccaagttaccgttattgatgctccaggtcacagagatttcatcaagaacatgattactggtacttctcaagctgactgtgctatcttgattattgctggtggtgtcggtgaattcgaagccggtatctctaaggatggtcaaaccagagaacacgctttgttggctttcaccttgggtgttagacaattgattgttgctgtcaacaagatggactccgtcaaatgggacgaatccagattccaagaaattgtcaaggaaacctccaactttatcaagaaggttggttacaacccaaagactgttccattcgtcccaatctctggttggaacggtgacaacatgattgaagctaccaccaacgctccatggtacaagggttgggaaaaggaaaccaaggccggtgtcgtcaagggtaagactttgttggaagccattgacgccattgaacaaccatctagaccaactgacaagccattgagattgccattgcaagatgtttacaagatcggtggtattggtactgtgccagtcggtagagttgaaaccggtgtcatcaagccaggtatggttgttactttcgccccagctggtgttaccactgaagtcaagtccgttgaaatgcatcacgaacaattggaacaaggtgttccaggtgacaacgttggtttcaacgtcaagaacgtttccgttaaggaaatcagaagaggtaacgtctgtggtgacgctaagaacgatccaccaaagggttgcgcttctttcaacgctaccgtcattgttttgaaccatccaggtcaaatctctgctggttactctccagttttggattgtcacactgctcacattgcttgtagattcgacgaattgttggaaaagaacgacagaagatctggtaagaagttggaagaccatccaaagttcttgaagtccggtgacgctgctttggtcaagttcgttccatctaagccaatgtgtgttgaagctttcagtgaatacccaccattaggtagattcgctgtcagagacatgagacaaactgtcgctgtcggtgttatcaagtctgttgacaagactgaaaaggccgctaaggttaccaaggctgctcaaaaggctgctaagaaatga

SEQ ID NO: 633 - DNA, 897 bp, Saccharomyces cerevisiae
atgtcagcactgtactttcaaaatttacccagtaggccagcaaataaagaaaattataccagattacttctgaaacacattaatcccaacaacaagtatgccattaatccgtcgctaccccttccccacaataaattacaaatatcatcacaaccgctgatgttactagatgatcaaatgggccttcttgaagtttctatttcaagatcatcaaagatgactaaccaagcatttttaacgtttgtcactcaagaagaagcagaccggtttctagaaaaatacacgacaacagcattaaaagttcaaggtcgtaaagtgagaatgggaaaggctcgaacaaattcgttattgggtctttcaatagaaatgcaaaaaaaaaaaggtaatgacgaaacgtacaaccttgatataaagaaggtgcttaaagcaaggaaacttaaacgcaagttacgtagtgatgatatatgcgccaaaaagttcaggcttaaaaggcaaataagacgcctgaagcataagctgagatcaagaaaggtagaggaggctgagattgataggattgtaaaagaatttgaaacccgtagattggaaaacatgaagtctcagcaagaaaatctaaaacaatcgcagaaacctcttaagcgggctaaagtgtccaatacaatggaaaatccaccgaacaaagtccttcttatacaaaatttgccaagcggcactaccgagcaattattgtcgcaaatacttggcaatgaggctttagttgaaatcagattagttagcgttcgtaacctagctttcgtggaatacgagaccgttgctgatgctacgaaaatcaagaatcagttaggctccacttacaagctacaaaacaatgacgttaccataggatttgctaagtag

SEQ ID NO: 634 - DNA, 897 bp, Artificial Sequence
  Description of Artificial Sequence: Synthetic polynucleotide
atgtctgcattgtactttcaaaatttacccagtaggccagcaaataaagaaaattataccagattacttttgaaacacattaatcccaacaacaagtatgccattaatccgtctttaccccttccccacaataaattacaaatatcttctcaaccgttaatgttattagatgatcaaatgggccttcttgaagtttctatttctagaagttccaagatgactaaccaagcatttttaacgtttgtcactcaagaagaagcagacagatttttggaaaaatacacgacaacagcattaaaagttcaaggtcgtaaagtgagaatgggaaaggctagaacaaattctttattgggtctttccatagaaatgcaaaaaaaaaaaggtaatgacgaaacgtacaaccttgatataaagaaggtgcttaaagcaaggaaacttaaacgcaagttacgtagtgatgatatatgcgccaaaaagttcaggcttaaaaggcaaataagacgcttgaagcataagttgagatctagaaaggtagaggaggctgagattgataggattgtaaaagaatttgaaacccgtagattggaaaacatgaagtctcagcaagaaaatttgaaacaatctcagaaacctcttaagagagctaaagtgtccaatacaatggaaaatccaccgaacaaagtccttcttatacaaaatttgccaagcggcactaccgagcaattattgtctcaaatacttggcaatgaggctttagttgaaatcagattagttagcgttcgtaacttggctttcgtggaatacgagaccgttgctgatgctacgaaaatcaagaatcagttaggctccacttacaagttacaaaacaatgacgttaccataggatttgctaagtga

SEQ ID NO: 635 - DNA, 489 bp, Saccharomyces cerevisiae
atgtcttcttcccaggtcgtcagggattctgccaaaaaattagttaatttactggaaaaatatccaaaggatcgtatacaccacttggtctcattcagggatgtacaaatagcaagatttagacgtgtagcgggtctgccaaatgtagatgacaaaggaaaatctataaaagagaaaaaaccctcattagatgaaataaaaagtataattaacagaacttccggtccattaggactgaataaggagatgttaaccaaaattcaaaataaaatggtagatgagaaattcacggaagaaagcatcaacgagcaaattcgtgccttgagcactataatgaataataaattcagaaactattacgatattggcgataagctctataaacctgcaggaaatccccaatattatcaacggttaataaatgccgttgacggtaagaaaaaggaaagcttatttactgcaatgagaactgtattatttggtaaataa

SEQ ID NO: 636 - DNA, 489 bp, Artificial Sequence
  Description of Artificial Sequence: Synthetic polynucleotide
atgtcttcttcccaggtcgtcagggattctgccaaaaaattagttaatttattggaaaaatatccaaaggatcgtatacaccacttggtctctttcagggatgtacaaatagcaagatttagacgtgtagcgggtttgccaaatgtagatgacaaaggaaaatctataaaagagaaaaaaccctctttagatgaaataaaaagtataattaacagaacttccggtccattaggattgaataaggagatgttaaccaaaattcaaaataaaatggtagatgagaaattcacggaagaaagcatcaacgagcaaattcgtgccttgagcactataatgaataataaattcagaaactattacgatattggcgataagctctataaacctgcaggaaatccccaatattatcaaagattaataaatgccgttgacggtaagaaaaaggaaagcttatttactgcaatgagaactgtattatttggtaaatga

SEQ ID NO: 637 - DNA, 2004 bp, Saccharomyces cerevisiae
atgagtgtagaagatatcaagaaggctagagccgctgttccatttaacagagaacagctagaaagtgttttgagaggaagatttttttatgccccagcttttgacttgtacggtggggtttctggtttatatgactatggtccaccaggttgtgcattccaaaacaacatcattgacgcctggagaaagcattttattttggaagaagatatgttggaagttgattgtactatgttaactccatatgaggttttgaagacctcaggtcatgttgacaaattttctgattggatgtgtagagatttgaagactggtgagattttcagagctgaccatttagtcgaagaagttttggaagctcgcttaaagggtgaccaagaagccagaggtttagtcgaggatgctaatgccgctgctaaggacgatgccgaaaagaagaagagaaagaaaaaagttaaacaaattaaagcagtcaaattggatgacgacgttgtcaaagaatatgaagaaattttggctaaaatagatggttattccggcccagaattaggtgaattgatggaaaaatacgatatcggtaacccagtcaccggagaaactttagaatctccaagggcttttaacctgatgtttgaaacggctattggcccatctggtcaattaaagggttacttgaggccagaaactgcccaaggtcaattcttgaattttaacaagttgttagaatttaacaacagtaagaccccttttgcctcagcctctatcggtaaatcatttagaaatgagatttccccaagggccggtttattaagagtccgtgaatttttgatggcagagattgaacatttcgttgacccattggacaaatctcatccaaaatttaatgaaatcaaagacatcaagctttcctttttgcctcgtgatgttcaagaagctggttctactgaaccaattgtcaagacagttggtgaagcagttgcttcaagaatggtcgataatgaaactttgggttactttattgccagaatttaccaatttttgatgaaaattggtgttgatgagtccaaattgagattccgtcaacatatggctaatgaaatggcacattatgctgctgactgttgggatggtgaattgaagacatcttacgggtggattgaatgtgtcggatgtgctgatagatctgcctatgatttgaccgttcattccaaaaagaccaaagaaaaattggttgttagacaaaaattagataatccaattgaagtcaccaagtgggaaattgatttgacgaaaaaattgttcggtccaaaattcagaaaagatgcaccaaaagttgaatctcatctattgaatatgtctcaagatgacttggcttccaaggctgagttattgaaggcaaatggcaagtttactataaaggttgatggtgttgatggcgaagtcgagttggacgataaattggttaaaatcgaacaaagaacaaaggttgaacacgttagagaatatgttcctagtgtcattgaaccatctttcggtattggccgtatcatctactccgtttttgagcactctttctggaacagaccagaagacaatgccagaagtgttctttccttcccacctttggttgctccaacaaaggttcttttagttcctttatctaaccacaaagatttagttcctgttactactgaagtcgccaaaatcttaagaaagtctcaaatcccatttaagattgatgattctggagtttccattggtaaaagatatgcccgtaatgacgaattaggtactccattcggtgtcaccattgactttgaatctgccaaagaccattctgtcactttgagagaaagagattccaccaagcaagttagaggttccgtcgaaaatgtcatcaaggctatccgcgatatcacttacaatggtgcttcttgggaagaaggtaccaaggatttgactccttttattgcccaagctgaagctgaagctgaaactgactaa

SEQ ID NO: 638 - DNA, 2004 bp, Artificial Sequence
  Description of Artificial Sequence: Synthetic polynucleotide
atgagtgtagaagatatcaagaaggctagagccgctgttccatttaacagagaacagttagaaagtgttttgagaggaagatttttttatgccccagcttttgacttgtacggtggggtttctggtttatatgactatggtccaccaggttgtgcattccaaaacaacatcattgacgcctggagaaagcattttattttggaagaagatatgttggaagttgattgtactatgttaactccatatgaggttttgaagacctctggtcatgttgacaaattttctgattggatgtgtagagatttgaagactggtgagattttcagagctgaccatttagtcgaagaagttttggaagctcgcttaaagggtgaccaagaagccagaggtttagtcgaggatgctaatgccgctgctaaggacgatgccgaaaagaagaagagaaagaaaaaagttaaacaaattaaagcagtcaaattggatgacgacgttgtcaaagaatatgaagaaattttggctaaaatagatggttattccggcccagaattaggtgaattgatggaaaaatacgatatcggtaacccagtcaccggagaaactttagaatctccaagggcttttaacttgatgtttgaaacggctattggcccatctggtcaattaaagggttacttgaggccagaaactgcccaaggtcaattcttgaattttaacaagttgttagaatttaacaacagtaagaccccttttgcctctgcctctatcggtaaaagttttagaaatgagatttccccaagggccggtttattaagagtccgtgaatttttgatggcagagattgaacatttcgttgacccattggacaaatctcatccaaaatttaatgaaatcaaagacatcaagctttcctttttgcctcgtgatgttcaagaagctggttctactgaaccaattgtcaagacagttggtgaagcagttgcttccagaatggtcgataatgaaactttgggttactttattgccagaatttaccaatttttgatgaaaattggtgttgatgagtccaaattgagattccgtcaacatatggctaatgaaatggcacattatgctgctgactgttgggatggtgaattgaagacatcttacgggtggattgaatgtgtcggatgtgctgatagatctgcctatgatttgaccgttcattccaaaaagaccaaagaaaaattggttgttagacaaaaattagataatccaattgaagtcaccaagtgggaaattgatttgacgaaaaaattgttcggtccaaaattcagaaaagatgcaccaaaagttgaatctcatcttttgaatatgtctcaagatgacttggcttccaaggctgagttattgaaggcaaatggcaagtttactataaaggttgatggtgttgatggcgaagtcgagttggacgataaattggttaaaatcgaacaaagaacaaaggttgaacacgttagagaatatgttcctagtgtcattgaaccatctttcggtattggccgtatcatctactccgtttttgagcactctttctggaacagaccagaagacaatgccagaagtgttctttccttcccacctttggttgctccaacaaaggttcttttagttcctttatctaaccacaaagatttagttcctgttactactgaagtcgccaaaatcttaagaaagtctcaaatcccatttaagattgatgattctggagtttccattggtaaaagatatgcccgtaatgacgaattaggtactccattcggtgtcaccattgactttgaatctgccaaagaccattctgtcactttgagagaaagagattccaccaagcaagttagaggttccgtcgaaaatgtcatcaaggctatccgcgatatcacttacaatggtgcttcttgggaagaaggtaccaaggatttgactccttttattgcccaagctgaagctgaagctgaaactgactga

SEQ ID NO: 639 - DNA, 534 bp, Saccharomyces cerevisiae
atgttgaagtctatatttgcgaagcgatttgcttccacagggtcatatcctggttctacaagaattactttgccaagaaggcctgcaaaaaaaattcaactggggaagtcacgaccggctatttatcaccaattcaatgtcaaaatggagttgagtgatggaagtgtagttatccggagatcccaatatccaaagggtgaaattagattaattcaagaccagagaaataatccgctgtggaatcctagcagggatgacctagtcgttgtggatgctaattctggtggtagcttggacagatttaacaagaggtatagctctttgttttctgtcgattcaacgaccccaaattcaagctctgaaacagttgaactatctgaagaaaataaaaagaaaacacagattaaaaaggaggagaaggaagacgtttctgaaaaagcgttcggtatggatgactatctatctctgttagacgatagtgaacaacagatcaaatcaggtaagttggccagtaagaagagagacaagaagtga

SEQ ID NO: 640 - DNA, 534 bp, Artificial Sequence
  Description of Artificial Sequence: Synthetic polynucleotide
atgttgaagtctatatttgcgaagagatttgcttccacagggtcttatcctggttctacaagaattactttgccaagaaggcctgcaaaaaaaattcaattagggaagtctcgtccggctatttatcaccaattcaatgtcaaaatggagttgagtgatggaagtgtagttatcagaagatcccaatatccaaagggtgaaattagattaattcaagaccagagaaataatccgttatggaatcctagcagggatgacttggtcgttgtggatgctaattctggtggtagcttggacagatttaacaagaggtatagctctttgttttctgtcgattctacgaccccaaatagtagctctgaaacagttgaattatctgaagaaaataaaaagaaaacacagattaaaaaggaggagaaggaagacgtttctgaaaaagcgttcggtatggatgactatttatctttattagacgatagtgaacaacagatcaaatctggtaagttggccagtaagaagagagacaagaagtga

SEQ ID NO: 641 - DNA, 1950 bp, Saccharomyces cerevisiae
atgccagtggaggagcctcttgctacactttcatcaattccagattctagcgcggaccaggccccaccgttaatagcagatgaatttacgttagacctgcccagaattccaagtttagaattgccacttaatgtctccacaaaacactctagtatacagaaggctataaaaatgtgtgggggcatcgaaaaagtgaaagaagcctttaaagaacatggacctatcgaatctcagcacggattacaactgtacttaaacgatgatactgatagcgacggatccaagagctattttaatgagcatcctgtaattggtaaaagagttcccttcagagatgagtcggtcatattaaaggttacaatgcctaagggaactttaagtaaaaataataatagcgtcaaagattctatcaaatccttaaaagattcgaataaattgagagtcactcctgtttccatagtagataacactataaaatttagagaaatgtcagattttcaaatcaaactggataatgtcccctctgcaagagagttcaaaagtagctttggctctctggaatggaataatttcaaaagttttgtcaattctgtaccagataatgactctcaacctcaggaaaacatcgggaatttgatcttagaccgtagcgttaaaattccgagtacagatttccaactgccgccacctcctaagttatcaatggttggtttccccctgctttataaatataaagctaatccatttgcgaaaaaaaaaaaaaacggtgtcacagaagtgaagggaacatatatcaaaaactatcagttgtttgttcatgatcttagtgataagacagttataccgtcccaagctcatgaacaagtcctgtacgattttgaggtcgcgaagaaaacaaaagtctatccaggcactaaaagtgactctaaattttatgaatcgctggaggaatgcttgaaaattttgagagagctcttcgctagacgtccaatttgggttaaaagacatcttgatgggattgtcccgaagaagatacaccatactatgaagatagcgctggcactcatatcttatcgtttcacaatggggccttggagaaatacatatatcaaatttggtatagaccccagaagttcagtggaatacgcccaatatcaaacagaatattttaagattgaaaggaaattactatcttctcccatagtgaaaaagaatgtaccaaagccaccacccctggtattcgaatcagacactccaggcggtattgacagcaggttcaaatttgatggaaaaagaataccgtggtacctgatgttgcagattgatttattaattggtgagccaaacattgcagaagtttttcacaacgtcgaatatttagataaggcgaatgaactaactggatggttcaaagaattagacttggtcaagataagaaggatagtaaaatacgaacttggttgcatggttcaaggaaattatgagtataataaatacaagttgaagtatttcaagacaatgttatttgttaaagaatccatggtacccgaaaacaagaactcagaagagggaatgggtgttaacaccaataaagatgctgatggggacataaatatggatgcaggtagtcaaatgtcctcaaatgccatagaggaggataagggtatcgctgctggtgatgattttgatgataatggcgccataactgaagagccagacgacgctgctttggaaaatgaagagatggacactgatcagaacttgaaggtgcctgcaagtatagacgatgacgtggatgacgttgatgcagatgaagaagaacaagaaagttttgatgttaaaacagcgagcttccaagatatcataaataaaatagctaaactagatcctaaaaccgcggaaacaatgaaaagcgagctcaagggatttgttgatgaagtcgatctgtaa

SEQ ID NO: 642 - DNA, 1950 bp, Artificial Sequence
  Description of Artificial Sequence: Synthetic polynucleotide
atgccagtggaggagcctcttgctacactttcttccattccagattctagcgcggaccaggccccaccgttaatagcagatgaatttacgttagacttgcccagaattccaagtttagaattgccacttaatgtctccacaaaacactctagtatacagaaggctataaaaatgtgtgggggcatcgaaaaagtgaaagaagcctttaaagaacatggacctatcgaatctcagcacggattacaattgtacttaaacgatgatactgatagcgacggatccaagagctattttaatgagcatcctgtaattggtaaaagagttcccttcagagatgagtctgtcatattaaaggttacaatgcctaagggaactttaagtaaaaataataatagcgtcaaagattctatcaaatccttaaaagattctaataaattgagagtcactcctgtttccatagtagataacactataaaatttagagaaatgagtgattttcaaatcaaattggataatgtcccctctgcaagagagttcaaaagtagctttggctctttggaatggaataatttcaaaagttttgtcaattctgtaccagataatgactctcaacctcaggaaaacatcgggaatttgatcttagaccgtagcgttaaaattccgagtacagatttccaattgccgccacctcctaagttatctatggttggtttccccttgctttataaatataaagctaatccatttgcgaaaaaaaaaaaaaacggtgtcacagaagtgaagggaacatatatcaaaaactatcagttgtttgttcatgatcttagtgataagacagttataccgtcccaagctcatgaacaagtcttgtacgattttgaggtcgcgaagaaaacaaaagtctatccaggcactaaaagtgactctaaattttatgaatctttggaggaatgcttgaaaattttgagagagctcttcgctagacgtccaatttgggttaaaagacatcttgatgggattgtcccgaagaagatacaccatactatgaagatagcgttggcactcatatcttatcgtttcacaatggggccttggagaaatacatatatcaaatttggtatagaccccagaagttctgtggaatacgcccaatatcaaacagaatattttaagattgaaaggaaattattatcttctcccatagtgaaaaagaatgtaccaaagccaccacccttagtattcgaaagtgacactccaggcggtattgacagcaggttcaaatttgatggaaaaagaataccgtggtacttgatgttgcagattgatttattaattggtgagccaaacattgcagaagtttttcacaacgtcgaatatttagataaggcgaatgaattgactggatggttcaaagaattagacttggtcaagataagaaggatagtaaaatacgaacttggttgcatggttcaaggaaattatgagtataataaatacaagttgaagtatttcaagacaatgttatttgttaaagaatccatggtacccgaaaacaagaactctgaagagggaatgggtgttaacaccaataaagatgctgatggggacataaatatggatgcaggtagtcaaatgtcctctaatgccatagaggaggataagggtatcgctgctggtgatgattttgatgataatggcgccataactgaagagccagacgacgctgctttggaaaatgaagagatggacactgatcagaacttgaaggtgcctgcaagtatagacgatgacgtggatgacgttgatgcagatgaagaagaacaagaaagttttgatgttaaaacagcgagcttccaagatatcataaataaaatagctaaattggatcctaaaaccgcggaaacaatgaaaagcgagctcaagggatttgttgatgaagtcgatttatga

SEQ ID NO: 643 - DNA, 1182 bp, Saccharomyces cerevisiae
atgggtcaattgctttcccatccgttgacggagaagaccatagaatataatgaatataaaaacaaccaggcgtcaactggtattgttccacgattttacaattgtgtggggtccatgcaaggctatcgtttgactcaggaagatgcacatctaattagaaatgaaaactctgttgtgtacgtacgatttttcaacccattcatagacaaatacgaaaccctgtcattgaacgtcttcgcagtattcgatggtcatggtggagatgattgttcgaaatttctaagcggcggccgccaccatcgcgatggtaacggcagtagcaacggtaatggtgaacccaacgctggcctgatcaaatggattgcgtatagtttcgaaaaccaccattacacatctacaactaataacgactcatcaaaatttaaaagatccttcaatacgttggaaggacttgtttctcaaatttttaaagacgctttcatattgcaagatgaagagttatatcgacattttgccaacagttcgtgtggatctacagcagtagtagcatgcatcataaacgaggaatcactgtatgtggctaactgtggtgattcgcgatgtattctttcctccaaatcgaatggcataaagacgatgtctttcgatcataagccacaacacataggagaattgatacgtataaacgataatggtggtactgtctctcttggaagagtgggtggagtactggctctcagtagggcatttagtgatttccaattcaagagaggtgtcacttatccacatagaaggacaaaactaacaaatattacccagaatttaacttatggaaccccaccacaagaagcacaagttaccgttgaaccagacgtattgatgcacaagattgactattctaaagatgagtttttagtactggcttgcgacggtatatgggatatttataacaacaaacagttaattcactttataaagtatcacctggtatcagggacgaagttggatacaataataacaaaattgttggaccacgggatagcgcaggcaaatagcaatactggtgtcggctttgacaatatgactgccatcattgtagtgctaaaccggaaaggcgaaacattgcaagactggtttaataaaatgaagacccgtttggaaagagaaaggggcctagtgtaa

SEQ ID NO: 644 - DNA, 1182 bp, Artificial Sequence
  Description of Artificial Sequence: Synthetic polynucleotide
atgggtcaattgctttcccatccgttgacggagaagaccatagaatataatgaatataaaaacaaccaggcgtctactggtattgttccaagattttacaattgtgtggggtccatgcaaggctatcgtttgactcaggaagatgcacatttgattagaaatgaaaactctgttgtgtacgtaagatttttcaacccattcatagacaaatacgaaaccttatctttgaacgtcttcgcagtattcgatggtcatggtggagatgattgttctaaatttttgagcggcggccgccaccatcgcgatggtaacggcagtagcaacggtaatggtgaacccaacgctggcttaatcaaatggattgcgtatagtttcgaaaaccaccattacacatctacaactaataacgactcttctaaatttaaaagatccttcaatacgttggaaggacttgtttctcaaatttttaaagacgctttcatattgcaagatgaagagttatatagacattttgccaacagtagttgtggatctacagcagtagtagcatgcatcataaacgaggaatctttgtatgtggctaactgtggtgattctcgttgtattctttcctccaaatctaatggcataaagacgatgtctttcgatcataagccacaacacataggagaattgatacgtataaacgataatggtggtactgtctctcttggaagagtgggtggagtattggctctcagtagggcatttagtgatttccaattcaagagaggtgtcacttatccacatagaaggacaaaattaacaaatattacccagaatttaacttatggaaccccaccacaagaagcacaagttaccgttgaaccagacgtattgatgcacaagattgactattctaaagatgagtttttagtattggcttgcgacggtatatgggatatttataacaacaaacagttaattcactttataaagtatcacttggtaagtgggacgaagttggatacaataataacaaaattgttggaccacgggatagcgcaggcaaatagcaatactggtgtcggctttgacaatatgactgccatcattgtagtgttgaacagaaaaggcgaaacattgcaagactggtttaataaaatgaagacccgtttggaaagagaaaggggcttggtgtga

SEQ ID NO: 645 - DNA, 1488 bp, Saccharomyces cerevisiae
atgactacggataacgctaaggcgcaactgacctcgtcttcagggggtaacattattgtggtgtccaacaggcttcccgtgacaatcactaaaaacagcagtacgggacagtacgagtacgcaatgtcgtccggagggctggtcacggcgttggaagggttgaagaagacgtacactttcaagtggttcggatggcctgggctagagattcctgacgatgagaaggatcaggtgaggaaggacttgctggaaaagtttaatgccgtacccatcttcctgagcgatgaaatcgcagacttacactacaacgggttcagtaattctattctatggccgttattccattaccatcctggtgagatcaatttcgacgagaatgcgtggttggcatacaacgaggcaaaccagacgttcaccaacgagattgctaagactatgaaccataacgatttaatctgggtgcatgattaccatttgatgttggttccggaaatgttgagagtcaagattcacgagaagcaactgcaaaacgttaaggtcgggtggttcctgcacacaccattcccttcgagtgaaatttacagaatcttacctgtcagacaagagattttgaagggtgttttgagttgtgatttagtcgggttccacacatacgattatgcaagacatttcttgtcttccgtgcaaagagtgcttaacgtgaacacattgcctaatggggtggaataccagggcagattcgttaacgtaggggccttccctatcggtatcgacgtggacaagttcaccgatgggttgaaaaaggaatccgtacaaaagagaatccaacaattgaaggaaactttcaagggctgcaagatcatagttggtgtcgacaggctggattacatcaaaggtgtgcctcagaagttgcacgccatggaagtgtttctgaacgagcatccagaatggaggggcaaggttgttctggtacaggttgcagtgccaagtcgtggagatgtggaagagtaccaatatttaagatctgtggtcaatgagttggtcggtagaatcaacggtcagttcggtactgtggaattcgtccccatccatttcatgcacaagtctataccatttgaagagctgatttcgttatatgctgtgagcgatgtttgtttggtctcgtccacccgtgatggtatgaacttggtttcctacgaatatattgcttgccaagaagaaaagaaaggttccttaatcctgagtgagttcacaggtgccgcacaatccttgaatggtgctattattgtaaatccttggaacaccgatgatctttctgatgccatcaacgaggccttgactttgcccgatgtaaagaaagaagttaactgggaaaaactttacaaatacatctctaaatacacttctgccttctggggtgaaaatttcgtccatgaattatacagtacatcatcaagctcaacaagctcctctgccaccaaaaactga

SEQ ID NO: 646 - DNA, 1488 bp, Artificial Sequence
  Description of Artificial Sequence: Synthetic polynucleotide
atgactacggataacgctaaggcgcaattgacctcttcttctgggggtaacattattgtggtgtccaacaggcttcccgtgacaatcactaaaaacagcagtacgggacagtacgagtacgcaatgtcttccggagggttagtcacggcgttggaagggttgaagaagacgtacactttcaagtggttcggatggcctgggttagagattcctgacgatgagaaggatcaggtgaggaaggacttgttggaaaagtttaatgccgtacccatcttcttgagcgatgaaatcgcagacttacactacaacgggttcagtaattctattttatggccgttattccattaccatcctggtgagatcaatttcgacgagaatgcgtggttggcatacaacgaggcaaaccagacgttcaccaacgagattgctaagactatgaaccataacgatttaatctgggtgcatgattaccatttgatgttggttccggaaatgttgagagtcaagattcacgagaagcaattacaaaacgttaaggtcgggtggttcttgcacacaccattcccttctagtgaaatttacagaatcttacctgtcagacaagagattttgaagggtgttttgagttgtgatttagtcgggttccacacatacgattatgcaagacatttcttgtcttccgtgcaaagagtgcttaacgtgaacacattgcctaatggggtggaataccagggcagattcgttaacgtaggggccttccctatcggtatcgacgtggacaagttcaccgatgggttgaaaaaggaatccgtacaaaagagaatccaacaattgaaggaaactttcaagggctgcaagatcatagttggtgtcgacaggttagattacatcaaaggtgtgcctcagaagttgcacgccatggaagtgtttttgaacgagcatccagaatggaggggcaaggttgttttggtacaggttgcagtgccaagtcgtggagatgtggaagagtaccaatatttaagatctgtggtcaatgagttggtcggtagaatcaacggtcagttcggtactgtggaattcgtccccatccatttcatgcacaagtctataccatttgaagagttgatttctttatatgctgtgagcgatgtttgtttggtctcttccacccgtgatggtatgaacttggtttcctacgaatatattgcttgccaagaagaaaagaaaggttccttaatcttaagtgagttcacaggtgccgcacaatccttgaatggtgctattattgtaaatccttggaacaccgatgatctttctgatgccatcaacgaggccttgactttgcccgatgtaaagaaagaagttaactgggaaaaactttacaaatacatctctaaatacacttctgccttctggggtgaaaatttcgtccatgaattatacagtacatcttctagctctacaagctcctctgccaccaaaaactga

SEQ ID NO: 647 - DNA, 207 bp, Saccharomyces cerevisiae
atggctatcacccctgacaaacagaagaaagaacaacagcatcaaccacagaacggaccgctcgactatgctcacatatgcaagtgtattgcaatgttctttgtcgttgcgggcgtggtgctgatgttcttcgagaccgggttggacccagaacaaaaagagcaaatcaagcgtctccaccagttggacggcattcctcacgcttga

SEQ ID NO: 648 - DNA, 207 bp, Artificial Sequence
  Description of Artificial Sequence: Synthetic polynucleotide
atggctatcacccctgacaaacagaagaaagaacaacagcatcaaccacagaacggaccgctcgactatgctcacatatgcaagtgtattgcaatgttctttgtcgttgcgggcgtggtgttgatgttcttcgagaccgggttggacccagaacaaaaagagcaaatcaagcgtctccaccagttggacggcattcctcacgcttga

SEQ ID NO: 649 - DNA, 1554 bp, Saccharomyces cerevisiae
atggttttgtctgataaggagttgtttgccataaataagaaagccgtcgaacaaggtttcaatgtgaagcctagattgaactataatacggtcagtggtgtgaacggtccattagtcattttggaaaaggtcaagttcccacgttacaacgaaattgttaatttgacattgccagatggaaccgtgagacaaggtcaagttttggaaattagaggagatagagccattgtgcaagtgtttgaaggtacatctggtattgatgtcaagaagactaccgtggaattcactggtgagagtttgagaattcctgtgtctgaagacatgttgggtagaatttttgacggttctggtagacccattgacaacggtcctaaagttttcgcagaggattacttggacattaacggttctcctatcaacccatatgctcgtatttatccagaagaaatgatttctactggtgtttctgctattgacacaatgaactccattgccagaggtcaaaagatcccaattttctccgcatcaggtttaccacacaacgaaattgcagcacaaatttgtagacaggctggtttggtgagacctaccaaggatgttcatgatggtcatgaagaaaatttctccatcgtttttgctgccatgggtgtcaacttggaaaccgctagatttttcaaacaggatttcgaagaaaatgggtctttggaaagaacttcattatttttgaacttggctaatgaccctaccattgaaagaattatcactccaagattggccttgaccaccgctgaataccttgcttaccaaacggaacgtcatgtgttgaccatcttgaccgatatgtcatcgtatgctgatgctcttagagaagtttccgctgctagagaagaagttccaggtagaagaggttatcctggttacatgtatacagatttgtccacaatttatgaaagagcaggtagagtagagggtcgtaacgggtccatcactcaaatacctatcttgacaatgcctaacgatgatattacgcatccaattccggatttgaccggttatattaccgagggtcaaatcttcgttgaccgtcaattacataacaagggtatctacccaccaatcaacgtcttgccttcgttgagtagattgatgaaatctgccatcggtgaaggtatgaccagaaaggaccacggtgacgtttctaaccaattgtatgccaagtacgccatcggtaaggacgctgctgctatgaaggccgttgtcggtgaagaggcgttatccatcgaagataagttatctttggaatttttggaaaaattcgaaaagacctttatcacacaaggcgcctacgaggacagaaccgttttcgaaagtttggaccaggcatggagtttgctaagaatctaccctaaggagatgttgaatagaatctccccaaagattcttgatgaattttacgatagagccagagacgatgccgacgaagatgaagaagatcccgacacaagaagctccggtaagaagaaggacgccagccaagaagaatctctaatctaa

SEQ ID NO: 650 - DNA, 1554 bp, Artificial Sequence
  Description of Artificial Sequence: Synthetic polynucleotide
atggttttgtctgataaggagttgtttgccataaataagaaagccgtcgaacaaggtttcaatgtgaagcctagattgaactataatacggtcagtggtgtgaacggtccattagtcattttggaaaaggtcaagttcccacgttacaacgaaattgttaatttgacattgccagatggaaccgtgagacaaggtcaagttttggaaattagaggagatagagccattgtgcaagtgtttgaaggtacatctggtattgatgtcaagaagactaccgtggaattcactggtgagagtttgagaattcctgtgtctgaagacatgttgggtagaatttttgacggttctggtagacccattgacaacggtcctaaagttttcgcagaggattacttggacattaacggttctcctatcaacccatatgctcgtatttatccagaagaaatgatttctactggtgtttctgctattgacacaatgaactccattgccagaggtcaaaagatcccaattttctccgcatctggtttaccacacaacgaaattgcagcacaaatttgtagacaggctggtttggtgagacctaccaaggatgttcatgatggtcatgaagaaaatttctccatcgtttttgctgccatgggtgtcaacttggaaaccgctagatttttcaaacaggatttcgaagaaaatgggtctttggaaagaacttctttatttttgaacttggctaatgaccctaccattgaaagaattatcactccaagattggccttgaccaccgctgaataccttgcttaccaaacggaacgtcatgtgttgaccatcttgaccgatatgtcttcttatgctgatgctcttagagaagtttccgctgctagagaagaagttccaggtagaagaggttatcctggttacatgtatacagatttgtccacaatttatgaaagagcaggtagagtagagggtcgtaacgggtccatcactcaaatacctatcttgacaatgcctaacgatgatattacgcatccaattccggatttgaccggttatattaccgagggtcaaatcttcgttgaccgtcaattacataacaagggtatctacccaccaatcaacgtcttgccttctttgagtagattgatgaaatctgccatcggtgaaggtatgaccagaaaggaccacggtgacgtttctaaccaattgtatgccaagtacgccatcggtaaggacgctgctgctatgaaggccgttgtcggtgaagaggcgttatccatcgaagataagttatctttggaatttttggaaaaattcgaaaagacctttatcacacaaggcgcctacgaggacagaaccgttttcgaaagtttggaccaggcatggagtttgttaagaatctaccctaaggagatgttgaatagaatctccccaaagattcttgatgaattttacgatagagccagagacgatgccgacgaagatgaagaagatcccgacacaagaagctccggtaagaagaaggacgccagccaagaagaatctttgatctga

SEQ ID NO: 651 - DNA, 1035 bp, Saccharomyces cerevisiae
atgcattgcccaatttgccaccatagagcgcatgtagtgtactgtgcacattgtatcaatacgagcccaagtctgctactgaagctaaaactagatttaattttattaaaggatgagaataaagaacttaacgggaaagtcgaacaaatattaaacgaggccatgaactatgaccagttagatatcaagaggatggagaaaaagaaagatcccctgatgaatagtctcatgaagttagatgttttacgaatgaaaaagaataataacctgattaggcacaggatagaacagctaaatgagcggatttatagtaaaaggaatcacatcagcgaattgaaagtagaaattgacaattataaatgttataaggtgggtactggtacggacaaattaagagagcaagtggaaattagtgatgcaaaaaataagctggcacaagtatcgaagatttgtgaatcggctagagattacaagctcaatctactaaataattggtttgtgatccagaagctgcaagataatttccaaatacctttcgctatagcttttcagccactaatatctttgaaaaacttccgtattttacctcttgctataacaaacgattccatcaacatcatgtggaagtatattagcttcttctcagacattcttatgattaaacttccctacacaaataaaatctgtgaacaacccatgtttgagttttccgatagcatacagacagtagtacaaaggttgatcaagcttatcataaatattttacagatatgtagacatttgaaactcgtaccttcaacacccatggatatcccatggctactggaccagtacgatgtggatgggctgttctataatatggtgaaacggaacaagatgaagtgtaggtccgtctcgctatattggacttttgggatgttgtactcgatggttttggataacatgaataatccacaaagaggacatcctgcaaggcggaccgcaccacctccaacagtcacaggacctcatgaccgatggtacgtggtaggctag

SEQ ID NO: 652 - DNA, 1035 bp, Artificial Sequence
  Description of Artificial Sequence: Synthetic polynucleotide
atgcattgcccaatttgccaccatagagcgcatgtagtgtactgtgcacattgtatcaatacgagcccaagtttattattgaagttgaaattggatttaattttattaaaggatgagaataaagaacttaacgggaaagtcgaacaaatattaaacgaggccatgaactatgaccagttagatatcaagaggatggagaaaaagaaagatcccttgatgaatagtctcatgaagttagatgttttaagaatgaaaaagaataataacttgattaggcacaggatagaacagttgaatgagagaatttatagtaaaaggaatcacatcagcgaattgaaagtagaaattgacaattataaatgttataaggtgggtactggtacggacaaattaagagagcaagtggaaattagtgatgcaaaaaataagttagcacaagtatccaagatttgtgaatctgctagagattacaagctcaatttattgaataattggtttgtgatccagaagttacaagataatttccaaatacctttcgctatagcttttcagccattgatatctttgaaaaacttccgtattttacctcttgctataacaaacgattccatcaacatcatgtggaagtatattagcttcttcagtgacattcttatgattaaacttccctacacaaataaaatctgtgaacaacccatgtttgagttttccgatagcatacagacagtagtacaaaggttgatcaagcttatcataaatattttacagatatgtagacatttgaaactcgtaccttctacacccatggatatcccatggttgttggaccagtacgatgtggatgggcttttctataatatggtgaaaagaaacaagatgaagtgtaggtccgtctctttgtattggacttttgggatgttgtactccatggttttggataacatgaataatccacaaagaggacatcctgcaaggcgtaccgcaccacctccaacagtcacaggacctcatgacagatggtacgtggtaggctga

SEQ ID NO: 653 - DNA, 987 bp, Saccharomyces cerevisiae
atgatagcaggtgcgactgctccgtcaagtcagcatgaaattttgatcgcatcgaatctcatcaagaagccatcaacgtctcaaaataaaacgccgacagctcaatccagttcaggtaacaatggagctgctgatggtgcaccgcagggttaccatcatcaccatcatcaccatcgtcatttatggtggcctcggacaacagaccatcaatattggtgtgtcttgaggaaaaaccaatttgcctattacaaaactcgggatgaaagagaggctataagtgtcataccgagatttgacatacttaattttaagataagcgagctcgatggtatattaactgtttatactccatccaaggatttaatattcaaatttccacgagggcaaaatgagaaggttggtatggaactgatgcataattggaaaattgcccttgaaaaattcctctctagtcctagtggcaacgaaagtgtcactacaggtagtgattatgatgaagaagaggatgatgatgatttaattgtagttgacgaaaaggcgggtccttctagcagcaagcattcttgcagtttgacgatggatgagcaactgtctcgtgaagataaagaattttataggatgttcgatccaagaaatgcagagcaccaggtttgttctgggattctttacacaaaagtgaaaaagaagaaactgttcaatagggctaaatggcaaaagttcaatgtggaattgactaatacttcgttcaatttatactctttcaagactgggaagttaaagaaaagcattaaattggataaaattatcgattgtattgaacttgataataattcgaagatgaaaaatgacgacactaattttgcgctaattacatttgatgaaaggttatcttttaaagccgctaacgatcaagatatggtggattggataataaatttcaagagtggaattttgataagaaaaaaattaaaggccgaaaatatataa

SEQ ID NO: 654 - DNA, 987 bp, Artificial Sequence
  Description of Artificial Sequence: Synthetic polynucleotide
atgatagcaggtgcgactgctccgtccagtcagcatgaaattttgatcgcatctaatctcatcaagaagccatctacgtctcaaaataaaacgccgacagctcaatccagttctggtaacaatggagctgctgatggtgcaccgcagggttaccatcatcaccatcatcaccatcgtcatttatggtggcctagaacaacagaccatcaatattggtgtgtcttgaggaaaaaccaatttgcctattacaaaactagagatgaaagagaggctataagtgtcataccgagatttgacatacttaattttaagataagcgagctcgatggtatattaactgtttatactccatccaaggatttaatattcaaatttccaagagggcaaaatgagaaggttggtatggaattgatgcataattggaaaattgcccttgaaaaattcctctctagtcctagtggcaacgaaagtgtcactacaggtagtgattatgatgaagaagaggatgatgatgatttaattgtagttgacgaaaaggcgggtccttctagcagcaagcattcttgcagtttgacgatggatgagcaattatctcgtgaagataaagaattttataggatgttcgatccaagaaatgcagagcaccaggtttgttctgggattctttacacaaaagtgaaaaagaagaaattattcaatagggctaaatggcaaaagttcaatgtggaattgactaatacttctttcaatttatactctttcaagactgggaagttaaagaaaagcattaaattggataaaattatcgattgtattgaacttgataataattctaagatgaaaaatgacgacactaattttgcgttaattacatttgatgaaaggttatcttttaaagccgctaacgatcaagatatggtggattggataataaatttcaagagtggaattttgataagaaaaaaattaaaggccgaaaatatatga

SEQ ID NO: 655 - DNA, 1278 bp, Saccharomyces cerevisiae
atgtcggaccaggataatacccagacttcttcaagcaagttggcacctcaccataatatttttatggcaaacttggaaagttcccccacaaaagatagaaatacctccagccaaaatgcctcatcttcgagagtcattgaatcactgcatgaccagattgatatgctgacaaaaacaaatctacaattgactacgcaatctcaaaatttattgagtaaattggaattagcacaatccaaagaatcaaaactactggaaaatttaaatctgctgaagaacgagaacgaaaatctcaactcgatatttgaaagaaagaacaagaagctaaaagagctagagaaagattatagcgaattgagtaaccgttacaatgaacaaaaggagaaaatggatcaattgagtaaattggcgaaaaattctagtgccattgaacaatcttgctctgaaaaattgcaaaatatggaagttaactataattcattattggagtcacaaaatctttacagagaccactattctgatgaaatttccaaattaaatgaaaaaatcggtttgttggagttagagttaagtaatcaaaatttaaattatggttcagatactagttcaaattcagatatagaattgaatttaaataaattcaatgactctgtgaaagatttgaaatctctggaaacagaaaaggattcaaaattaagcaagataatcactcactctttagatgagttaaatctacaaagctggctaaatctgtaccagacgaacgaaaatctgatatcaacttttgctgaaaagatggatttgaaagacgtcttgaaaagaaacgatgagaagattagtaataaaggcgcggtagtacaaaccttgaagaagaatgtacaaacccaggtggaaagcaacaacgctgacgctttgagtagcaataatgcacaggatatgcttcctattaagatggtcaaattaagaaagacgccgaacacaaacgattcatcctccaatggtaatagcagtaacaataaaagaagaagtttctatactgcgtcgcctttgctgtcatcgggttctattccaaaatctgcatccccggttttgcctggtgttaaaagaactgcctcagtaagaaaaccaagctcgagcagtagtaaaacaaatgtaacgcataataacgatccaagtacatctcccacaatctcagtgcctcccggtgttacaagaactgtttcctccactcataagaaaaagggaaatagtatggttgttcacggggcccaatcctag

SEQ ID NO: 656 - DNA, 1278 bp, Artificial Sequence
  Description of Artificial Sequence: Synthetic polynucleotide
atgtctgaccaggataatacccagacttcttctagcaagttggcacctcaccataatatttttatggcaaacttggaaagttcccccacaaaagatagaaatacctccagccaaaatgcctcttcttctagagtcattgaatctttgcatgaccagattgatatgttaacaaaaacaaatttacaattgactacgcaatctcaaaatttattgagtaaattggaattagcacaatccaaagaaagtaaattattggaaaatttaaatttattgaagaacgagaacgaaaatctcaacagcatatttgaaagaaagaacaagaagttgaaagagttagagaaagattatagcgaattgagtaaccgttacaatgaacaaaaggagaaaatggatcaattgagtaaattggcgaaaaattctagtgccattgaacaatcttgctctgaaaaattgcaaaatatggaagttaactataattctttattggagtctcaaaatctttacagagaccactattctgatgaaatttccaaattaaatgaaaaaatcggtttgttggagttagagttaagtaatcaaaatttaaattatggttctgatactagtagtaattctgatatagaattgaatttaaataaattcaatgactctgtgaaagatttgaaatctttggaaacagaaaaggattctaaattaagcaagataatcactcactctttagatgagttaaatttacaaagctggttaaatctttaccagacgaacgaaaatttgatatctacttttgctgaaaagatggatttgaaagacgtcttgaaaagaaacgatgagaagattagtaataaaggcgcggtagtacaaaccttgaagaagaatgtacaaacccaggtggaaagcaacaacgctgacgctttgagtagcaataatgcacaggatatgcttcctattaagatggtcaaattaagaaagacgccgaacacaaacgattcttcctccaatggtaatagcagtaacaataaaagaagaagtttctatactgcgtcccctttgttatcttctggttctattccaaaatctgcatccccggttttgcctggtgttaaaagaactgcctctgtaagaaaaccaagcagcagcagtagtaaaacaaatgtaacgcataataacgatccaagtacatctcccacaatcagtgtgcctcccggtgttacaagaactgtttcctccactcataagaaaaagggaaatagtatggttgttcacggggcccaatcctga

SEQ ID NO: 657 - DNA, 2115 bp, Saccharomyces cerevisiae
atgagactacactatattacggtttttgatccatcaagatctaccaacgaaaatgacactttcaagcagttgctgctgttccattattttggcactactgattcaataccctctttaaacgaaaaactgtccatcataggagtaatacagggcatttggtcacttacgagttcatgcgtaaacaaggacggcgaagatttagagaaaattattgagctgaacaatgatattattttttgtattaaggtggaatcaagatttttcatcagtctagcaatttcgaatatcagcgacgatcagagtgccatacctttacagtatctcagtgcttacttatggcttagttacaggttcttcaagctactcaatgggtcattcagcggatttaacaaggacttccgcaaactcacggatttgttgaacgaattcgttattccgttctggaatgatatttatttgaatctagaaactgtaacgaatagatcatttactgtaatgtggcctggtttttataaaagggcaaattttcaacattcctcttataatcctggagaaaaaaataatgtcgaagagtcatgggacgctataatcttgcagaatattcttttagataaaaagagttatctaggactaaaggacattttggtttaccacctaccaaagcgcaccaaagcggctaatagggagtctatgggaacaaaaacttatggactagtaaggaactttaccagtgacctgaacacattaccagatatctcaaattggctatatcatttgcactgcacctatggtgaaatatcaagtcatatattaacaggaaatgtccattttaaagaggagctacaagtagaagaagaacaagagcgaagtcgtgatacaaacggaagagacgaagaggaatcacaggagcaacagcgacgggagcaccaagagactacgcaaaacaatacaagcgaactctctctatcggaaagagtgatacacaacgtaacactccccatttcttttgcatacgacgctatacatgaagtgagtaccacgactggtgtttcgggtagcttatccatgataatggactatgtaccgaagccccattggccgttcatttcatcctctaacaaaagtgccgacaaaaataattactcaaatagcaatgataacgcaaattcgaatgccccactgatggcgcaatcagaggctgttggagggacgataggcaactcgagatttggtttcctaatttccccattgaattcagacctgttgccatcatcataccaagccctgaaactgaatttgaactttgaaaactccaaagacaaggaggatttttataattgcctattttggtactttgatgattttttaattgtaattgtctgtgatccggacttcaacaagatttgtgaaagagactatctaaaggacttgagcttccaattgtgtcagagtatggaatgcctaaacaatgagattttaaactctcaaaattgcgataacgtggaatcctttgcttatgtgatcagagataacgtcaccaaagaaatcgactcgtccgttccatttgggtctccaaaatttacttcggatgaaagcatttcaactttacaactagcaattaacggtatagatcagttcattaacgataattcaaattccctatcgcttgctaattggaatccaataactattatgggtggctcaaatgctatcagcaaaaaaaatactacagaaggatttggaaacggggtaaacgataagactcaaaaattcaaaagaaaatatctgaatttcttgaatttaatgagcgcagaaaagttatgggacttacaggttgacgtcttacagttcttgactagtttacagaactcaaagagagacccagattattttcaggaggagaggttattaaaattgaacaatggtgttttatgctatatcaaagaaaacaattcaaacttaattattattattaaaaactggtttcaaaataacggcacgtcaaaggctgcaaaacaaaggaaccgttttagttcagattcctctaagggaagttcattgtttcaaagtttaggtcgtgacgtgactgactggtgggaatccagggaaatttaa

SEQ ID NO: 658 - DNA, 2115 bp, Artificial Sequence
  Description of Artificial Sequence: Synthetic polynucleotide
atgagattgcactatattacggtttttgatccatctagatctaccaacgaaaatgacactttcaagcagttgttgttattccattattttggcactactgattctataccctctttaaacgaaaaactttccatcataggagtaatacagggcatttggagtcttacgagttcctgcgtaaacaaggacggcgaagatttagagaaaattattgagttgaacaatgatattattttttgtattaaggtggaatctagatttttcatcagtttagcaatttctaatatcagcgacgatcagagtgccatacctttacagtatctcagtgcttacttatggcttagttacaggttcttcaagttactcaatgggtctttcagcggatttaacaaggacttccgcaaactcacggatttgttgaacgaattcgttattccgttctggaatgatatttatttgaatttggaaactgtaacgaatagatcttttactgtaatgtggcctggtttttataaaagggcaaattttcaacattcctcttataatcctggagaaaaaaataatgtcgaagagagttgggacgctataatcttgcagaatattcttttagataaaaagagttatttgggattgaaggacattttggtttaccacttgccaaagcgcaccaaagcggctaatagggagtctatgggaacaaaaacttatggattagtaaggaactttaccagtgacttgaacacattaccagatatctctaattggttatatcatttgcactgcacctatggtgaaatatctagtcatatattaacaggaaatgtccattttaaagaggagttacaagtagaagaagaacaagagagaagtcgtgatacaaacggaagagacgaagaggaatctcaggagcaacagagaagagagcaccaagagactacgcaaaacaatacaagcgaactctctttatctgaaagagtgatacacaacgtaacactccccatttcttttgcatacgacgctatacatgaagtgagtaccacgactggtgtttctggtagcttatccatgataatggactatgtaccgaagccccattggccgttcatttcttcctctaacaaaagtgccgacaaaaataattactctaatagcaatgataacgcaaatagtaatgccccattaatggcgcaaagtgaggctgttggagggacgataggcaactctagatttggtttcttgatttccccattgaatagtgacttgttgccatcttcctaccaagccttgaaattgaatttgaactttgaaaactccaaagacaaggaggatttttataattgcttattttggtactttgatgattttttaattgtaattgtctgtgatccggacttcaacaagatttgtgaaagagactatttgaaggacttgagcttccaattgtgtcagagtatggaatgcttgaacaatgagattttaaactctcaaaattgcgataacgtggaatcctttgcttatgtgatcagagataacgtcaccaaagaaatcgactcttccgttccatttgggtctccaaaatttacttctgatgaaagcatttctactttacaattggcaattaacggtatagatcagttcattaacgataatagtaattccttatctcttgctaattggaatccaataactattatgggtggcagtaatgctatcagcaaaaaaaatactacagaaggatttggaaacggggtaaacgataagactcaaaaattcaaaagaaaatatttgaatttcttgaatttaatgagcgcagaaaagttatgggacttacaggttgacgtcttacagttcttgactagtttacagaactccaagagagacccagattattttcaggaggagaggttattaaaattgaacaatggtgttttatgctatatcaaagaaaacaatagcaacttaattattattattaaaaactggtttcaaaataacggcacgtccaaggctgcaaaacaaaggaaccgttttagttctgattcctctaagggaagttctttgtttcaaagtttaggtcgtgacgtgactgactggtgggaatccagggaaatttga

SEQ ID NO: 659 - DNA, 1791 bp, Saccharomyces cerevisiae
atgacaaaggaacgtatgaccatcgactacgaaaatgacggtgattttgagtacgataagaataaatacaagacaataaccactcgaataaagagtatcgaacctagtgagggatggttggaaccttctgggtcagtgggtcacataaacacgatacccgaagcgggcgatgttcacgtggatgaacatgaggatagagggtcttctattgatgatgactcaaggacttacctgctatatttcacagaaactcgacgtaaactagaaaacaggcacgtccagttgattgctatttccggtgtcattggtacggcgctattcgtggcgatcggaaaagctttataccgtggagggcccgcctctttattattggcatttgctctttggtgtgttccaatactttgcattactgtgtctacagcggaaatggtctgctttttccctgtaagttccccctttttgagattagcaacgaagtgcgttgacgattcattggctgtcatggctagctggaatttctggtttcttgaatgcgtacagatccctttcgagattgtttctgttaatacaattatacattattggagagatgattattcagctggtattccgctcgccgttcaagtagttttgtatctgcttatttccatttgtgcagtcaaatattacggtgaaatggaattttggttggcttctttcaaaattatccttgcactcggcctatttacattcacgttcattaccatgttgggtggaaatcctgaacatgatcgttacgggtttcgtaattatggtgaaagtccattcaagaaatactttcccgatggcaatgatgtggggaagtcttcgggctacttccaggggtttctcgcttgcttgattcaggcatcgtttaccatagctggtggcgagtatatttctatgttagcgggagaggtcaaacgaccaagaaaagtattacccaaggcgtttaagcaggtgtttgtgagattaacatttttgtttttagggagttgtctgtgtgttgggattgtttgttcgccaaatgatcctgacttgacagcagcaattaatgaagcaaggcctggcgccgggtcttcaccttatgtcattgcaatgaataatctgaaaattagaatattacctgacattgttaatatagctttgattacagccgccttttctgctggtaacgcttacacttattgctcatccagaacattttatggtatggcattagatggctacgcgccaaaaatcttcactagatgcaataggcatggtgtgcccatttactctgtggccatatctttggtatgggctttagtgagccttttgcaactgaattctaatagtgcggtcgtattgaattggttaattaacttgattactgcctctcaattgattaattttgtcgtcctttgtatcgtctatttatttttcagaagggcttaccacgtccaacaagattcgttacccaagttgccattccgttcgtggggtcaaccatacactgctattatcggccttgtttcatgttccgcaatgattttaatacagggctacaccgttttctttcccaaattatggaacacacaagattttttgttttcgtatttaatggtgtttatcaacatcggtatatatgtgggctacaaatttatttggaaacgtggtaaagatcacttcaaaaacccacatgaaattgacttttctaaagagctaacagaaattgaaaaccatgagattgaaagctccttcgaaaaatttcaatattatagcaaagcataa

SEQ ID NO: 660 - DNA, 1791 bp, Artificial Sequence
  Description of Artificial Sequence: Synthetic polynucleotide
atgacaaaggaacgtatgaccatcgactacgaaaatgacggtgattttgagtacgataagaataaatacaagacaataaccactagaataaagagtatcgaacctagtgagggatggttggaaccttctgggtctgtgggtcacataaacacgatacccgaagcgggcgatgttcacgtggatgaacatgaggatagagggtcttctattgatgatgacagcaggacttacttgttatatttcacagaaactagacgtaaattagaaaacaggcacgtccagttgattgctatttccggtgtcattggtacggcgttattcgtggcgatcggaaaagctttataccgtggagggcccgcctctttattattggcatttgctctttggtgtgttccaatactttgcattactgtgtctacagcggaaatggtctgctttttccctgtaagttccccctttttgagattagcaacgaagtgcgttgacgattctttggctgtcatggctagctggaatttctggtttcttgaatgcgtacagatccctttcgagattgtttctgttaatacaattatacattattggagagatgattattctgctggtattccgctcgccgttcaagtagttttgtatttacttatttccatttgtgcagtcaaatattacggtgaaatggaattttggttggcttctttcaaaattatccttgcactcggcttatttacattcacgttcattaccatgttgggtggaaatcctgaacatgatcgttacgggtttcgtaattatggtgaaagtccattcaagaaatactttcccgatggcaatgatgtggggaagtcttctggctacttccaggggtttctcgcttgcttgattcaggcaagttttaccatagctggtggcgagtatatttctatgttagcgggagaggtcaaaaggccaagaaaagtattacccaaggcgtttaagcaggtgtttgtgagattaacatttttgtttttagggagttgtttatgtgttgggattgtttgttctccaaatgatcctgacttgacagcagcaattaatgaagcaaggcctggcgccgggtcttctccttatgtcattgcaatgaataatttgaaaattagaatattacctgacattgttaatatagctttgattacagccgccttttctgctggtaacgcttacacttattgctcttccagaacattttatggtatggcattagatggctacgcgccaaaaatcttcactagatgcaataggcatggtgtgcccatttactctgtggccatatctttggtatgggctttagtgagccttttgcaattgaattctaatagtgcggtcgtattgaattggttaattaacttgattactgcctctcaattgattaattttgtcgtcctttgtatcgtctatttatttttcagaagggcttaccacgtccaacaagattctttacccaagttgccattccgttcttggggtcaaccatacactgctattatcggccttgtttcttgttccgcaatgattttaatacagggctacaccgttttctttcccaaattatggaacacacaagattttttgttttcttatttaatggtgtttatcaacatcggtatatatgtgggctacaaatttatttggaaacgtggtaaagatcacttcaaaaacccacatgaaattgacttttctaaagagttgacagaaattgaaaaccatgagattgaaagctccttcgaaaaatttcaatattatagcaaagcatga

SEQ ID NO: 661 - DNA, 2484 bp, Saccharomyces cerevisiae
atgcatagcaacgtatttgttggtgtcaaaccaggctttaatcataaacagcacagcaaaaagtcacgtttcctagaaaatgtctctagtcattcaccagaactgcctagtaactatgattacgttttgcttcctataacaacgccaagatataaggaaatagttgggcaagttttcaaagatttccaaagacaatccatacagaactggaaaccgcttcaaattcctgaaccgcagttgcaggatatctgtatacccccgttcaacgtcaagaagctagacaatgacgatacgccgtcttacatagggctgttatcctcttggctggagctggagagtcgcgatccaaatgtaagagatcttggcttaaaggtccttctaaacgaatgtaagtacgcgaggtttgttggaatcaataagctaatattggcgcctccacgggacctgtccaacctgcaattgtatggacagatgatttacaggctcctgcaaaatcgcatcgtctttgctgcgcctgcgttaaccatatccatttctctgccactttacgaagacagcgatccattggccacttgggaactgtggaataccgtgcggaaacaatgcgaatatcatccctctttgactatctctttggctttgccaagaaccaggactccttcgtatgtgctgaatagatggttagccgaacccgtctcgtgtcttttggtatcttcatccatctttgccagtaatcagtacgattatcccgttttacacaagtttaaccagaatttgattttaaagttccaaaaggttaatggagattcacaaattttgggtaatgaattatgcgtgatattgcatgggatggagaaatatgccaataatgttaagggcggagaatctgcctatttggaatatataaactacttattgaaaaagggcgacaaagtattaaattccaatagtaatcaccaatttttgctccaagaggactctcggataatgccgcctctgaaacctcattcagataatttattaaattccacatatttgacttttgaaaaagatttggtgaagtacgatctttacgaatctgccatattagaggcgcttcaagatcttgctcctcgagcgagtgccaagagaccgttggtgatcctagtagccggtgcgggaagaggacctttagtggatcgaacttttaagataatatcaatgttgtttatggatagtaaggtttctataattgccattgaaaaaaatccacaggcatatctgtacttgcaaaaaagaaatttcgactgttgggataatagagtgaaattaatcaaggaggatatgaccaaatggcaaatcaacgagccgtcggaaaagcgtattcagatagatctgtgcataagtgaactgctgggttcgttcggttgcaatgaattatcaccagaatgtctctggtctattgaaaaatatcattcccacaatgacacaattttcataccgaggtcatactcttcatacatagcacccatttcgtcaccattattctaccaaaaactctcacaaacaaatcgctctttggaggcgccctggatagtccatagagtgccatactgtatattatcctcaagggtaaatgaagtgtggcggttcgagcatcccatggcccaaaaagatactgtccaagacgaagatgattttacagttgaattttctcaaagttcattaaatgagttcaagataaagcaccgcggcgaaatccatggctttatcggattcttctcggcaaacttatataacaatatattcttgtcaactttgcccaatgacagcacagtccgtttaaaatttagcgaagaaacgttgatgaataccagacgagaagaaaatctaatcaagaaatgtgaccatacaccaaatatgacctcgtggtctccaattatctttcctttgaagcaaccaatatcctttatagatgactccgaactttctgtgctgatgtctcggatacactccgatacagaacaaaaagtttggtatgaatggtctttggagagtttcatataccttatgttgtcaaattacacttcggcggtaactgctgcaagcatgactattccgaggtctatagttacagatgacactaaaactttagcccataatcgacattattcagcgactaccaatcaaaagctagataatcaaattgatcttgaccaagacattgaaaacgaagaagaacagggattcctatccaatctagaaactggttggcaaagcgtacaagatattcacggactcagcgaaaccgccaaaccggaccatttagattctatcaataagcctatgtttgatctcaaatctactaaagcgcttgaaccctctaacgaattgccaaggcacgaagacctcgaggaagatgttccagaagttcatgtcagagtcaagactagtgtttccacgctacataatgtctgtggcagagccttttccctgcctctgtga

SEQ ID NO: 662 - DNA, 2484 bp, Artificial Sequence
  Description of Artificial Sequence: Synthetic polynucleotide
atgcatagcaacgtatttgttggtgtcaaaccaggctttaatcataaacagcacagcaaaaagtctcgtttcttggaaaatgtctctagtcattctccagaattacctagtaactatgattacgttttgcttcctataacaacgccaagatataaggaaatagttgggcaagttttcaaagatttccaaagacaatccatacagaactggaaaccgcttcaaattcctgaaccgcagttgcaggatatctgtatacccccgttcaacgtcaagaagttggacaatgacgatacgccgtcttacatagggttattatcctcttggttggagttagagagtcgcgatccaaatgtaagagatcttggcttaaaggtccttttgaacgaatgtaagtacgcgaggtttgttggaatcaataagttaatattggcgcctccaagagacttatccaacttacaattgtatggacagatgatttacaggctcttacaaaatcgcatcgtctttgctgcgcctgcgttaaccatatccatttctttaccactttacgaagacagcgatccattggccacttgggaattatggaataccgtgagaaaacaatgcgaatatcatccctctttgactatctctttggctttgccaagaaccaggactccttcttatgtgttgaatagatggttagccgaacccgtctcctgtcttttggtatcttcttccatctttgccagtaatcagtacgattatcccgttttacacaagtttaaccagaatttgattttaaagttccaaaaggttaatggagattctcaaattttgggtaatgaattatgcgtgatattgcatgggatggagaaatatgccaataatgttaagggcggagaatctgcctatttggaatatataaactacttattgaaaaagggcgacaaagtattaaattccaatagtaatcaccaatttttgctccaagaggactctagaataatgccgcctttgaaacctcattctgataatttattaaattccacatatttgacttttgaaaaagatttggtgaagtacgatctttacgaatctgccatattagaggcgcttcaagatcttgctcctcgtgcgagtgccaagagaccgttggtgatccttgtagccggtgcgggaagaggacctttagtggatagaacttttaagataatatccatgttgtttatggatagtaaggtttctataattgccattgaaaaaaatccacaggcatatttgtacttgcaaaaaagaaatttcgactgttgggataatagagtgaaattaatcaaggaggatatgaccaaatggcaaatcaacgagccgagtgaaaagcgtattcagatagatttatgcataagtgaattattgggttctttcggttgcaatgaattatctccagaatgtctctggtctattgaaaaatatcattcccacaatgacacaattttcataccgaggtcttactcttcctacatagcacccatttcttctccattattctaccaaaaactctctcaaacaaatcgctctttggaggcgccctggatagtccatagagtgccatactgtatattatccagcagggtaaatgaagtgtggagattcgagcatcccatggcccaaaaagatactgtccaagacgaagatgattttacagttgaattttctcaaagttctttaaatgagttcaagataaagcaccgcggcgaaatccatggctttatcggattcttcagtgcaaacttatataacaatatattcttgtctactttgcccaatgacagcacagtccgtttaaaatttagcgaagaaacgttgatgaataccagaagagaagaaaatttgatcaagaaatgtgaccatacaccaaatatgaccagttggtctccaattatctttcctttgaagcaaccaatatcctttatagatgactccgaactttctgtgttgatgtctagaatacactccgatacagaacaaaaagtttggtatgaatggtctttggagagtttcatataccttatgttgagcaattacactagtgcggtaactgctgcaagcatgactattccgaggtctatagttacagatgacactaaaactttagcccataatagacattattctgcgactaccaatcaaaagttggataatcaaattgatcttgaccaagacattgaaaacgaagaagaacagggattcttatccaatttggaaactggttggcaaagcgtacaagatattcacggactcagcgaaaccgccaaaccggaccatttagattctatcaataagcctatgtttgatctcaaatctactaaagcgcttgaaccctctaacgaattgccaaggcacgaagacctcgaggaagatgttccagaagttcatgtcagagtcaagactagtgtttccacgttgcataatgtctgtggcagagccttttccttacctttgtga

SEQ ID NO: 663 - DNA, 453 bp, Saccharomyces cerevisiae
atgtaccatcactatcacgccttccaaggcagaaagcttactgaccaagaaagagcacgcgtgttggagtttcaagattccattcactattctccgcggtactcagacgataactatgagtacaggcatgtgatgttacctaaggccatgctaaaagttatcccatctgattacttcaattcggaagtggggaccctgcgtatattaacagaagacgaatggagaggcctcggcatcacacagtctttggggtgggaacattatgaatgccatgcgccagaaccacacattttgctattcaaaaggccgctgaactacgaggccgagctgagggcagcgaccgctgctgctcaacagcaacagcaacagcagcaacagcagcaacaacaacaacagcaacatcaaacacaatcgatttcgaacgatatgcaagttccaccccaaatctcctag

SEQ ID NO: 664 - DNA, 453 bp, Artificial Sequence
  Description of Artificial Sequence: Synthetic polynucleotide
atgtaccatcactatcacgccttccaaggcagaaagcttactgaccaagaaagagcacgcgtgttggagtttcaagattccattcactattctccgcgctacagtgacgataactatgagtacaggcatgtgatgttacctaaggccatgttgaaagttatcccatctgattacttcaattctgaagtggggaccttacgtatattaacagaagacgaatggagaggcctcggcatcacacagtctttggggtgggaacattatgaatgccatgcgccagaaccacacattttgttattcaaaaggccgttgaactacgaggccgagttgagggcagcgaccgctgctgctcaacagcaacagcaacagcagcaacagcagcaacaacaacaacagcaacatcaaacacaatctatttccaacgatatgcaagttccaccccaaatctcctga

SEQ ID NO: 665 - DNA, 7107 bp, Saccharomyces cerevisiae
atggaatcacacgtcaaatatcttgacgaattgatattggcaataaaagacctgaactcgggggtggattcaaaggtgcagattaaaaaagtgcccacggatccatcttcttctcaggagtacgccaagagtttaaagatcctgaacaccctcataagaaacctaaaagatcaaagaaggaacaatatcatgaaaaatgatactatattttcgaaaacagtttccgcccttgccttattgttggagtacaaccccttcttgcttgttatgaaggattccaacgggaactttgagatacaaaggctgatagatgatttcctcaacatatccgttctgaactatgataattaccacagaatatggtttatgaggcgaaaattaggcagctggtgcaaagcatgtgtcgaattttacggaaaacctgctaagtttcagcttactgcacattttgagaacaccatgaatctttacgaacaggccttgactgaagtcttgttgggcaagactgagcttctcaaattttatgacaccttgaagggtctatacattcttttatactggttcacttcggagtatagtacttttgggaactctatagcattcttagattcttctttggggttcacgaaatttgactttaacttccaacgattaatcaggattgttctttacgtctttgattcctgcgaactagcagcactagaatatgccgaaatccaactcaaatatatttctctagttgtggactatgtttgcaatagaacaatttccacagccctggatgccccagcgttagtttgttgtgaacaattaaagtttgtattgactactatgcatcattttttggataacaagtatgggctcttggataatgaccccactatggccaaaggaattcttcgactatattctctttgcatttctaacgatttctcaaaatgctttgtagaccacttcccaattgaccagtgggcagatttttcacaaagtgaacattttccgttcacgcagttgactaataaagctctctcgattgtatattttgatttgaaaagaaggtccctacctgttgaagctttaaagtacgataataagttcaacatctgggtataccaatcggagccggactcgagcttgaaaaatgtcacttctccctttgatgatcgatataagcagctggaaaagctaaggttgctagtactaaagaagtttaacaagacagaaagaggaactttgctcaaataccgcgtgaaccagctaagtcctggattttttcaaagagctggaaacgatttcaagctaattttaaatgaagcatctgtatccattcaaacttgtttcaagacaaacaatataacaaggctaacatcatggactgtaattctcggacgtctagcctgtctagaatcagagaagttttccggcactctgccaaattccacaaaggatatggataattggtatgtttgtcatttatgcgatattgagaaaactggcaaccctttcgtgcgaataaatccaaatagaccagaggctgcgggtaaatcagaaatcttcaggatacttcattcaaactttctatctcacccaaatatagatgaatttagcgaatctttgttaagtggcatcttattttctctacataggatattttcacactttcaacctccaaaacttacagatggaaacggtcaaatcaataagagctttaaactggtacaaaagtgctttatgaattctaacagatacctacgtttattaagtactagaattatacctttattcaatatatcagactctcataattccgaagatgaacacactgccacgctgataaagtttctacaatctcaaaaattgccagtggtgaaagaaaatttagtcattgcttggacacaattaacattgacgacttctaatgatgtatttgatacactacttttgaaactgattgatattttcaattctgatgattatagtttacgaataatgatgactttgcaaattaaaaatatggccaaaattttaaagaaaacaccatatcaattactatcgcctattttacctgtattactaagacagttgggaaaaaacctcgtggaaagaaaagttggctttcaaaatttaatagaattattgggatattcttcaaaaacaattctcgatattttccagagatatatcatcccttatgcaattattcaatataagagcgatgtgctaagtgaaattgctaagattatgtgtgatggcgatacaagtttaattaaccaaatgaaggttaatttactgaaaaaaaacagtaggcaaatatttgccgtagctttggtaaaacacggattattttctttggatatcttggaaaccctttttttaaatagggctccaacttttgacaaaggatatataactgcataccttcccgattataaaactttagctgaaataacgaagctctacaaaaacagcgttactaaagatgcaagtgacagcgagaatgctaatatgattttatgctctttgcgatttttaatcaccaattttgaaaaagacaaaaggcatggttcgaagtacaaaaatatcaataactggacggatgatcaggaacaagcgttccaaaagaaactacaggataatatcttaggtattttccaagttttttcgagtgacatacatgatgttgaaggccgcaccacttactacgaaaagttaagggttatcaatggcatttcttttcttatcatatatgcccccaaaaaatcaataatttccgcattagcccagattagtatttgtttgcaaacaggacttgggcttaaggaagttcgatacgaggcctttagatgttggcatctgttagttcgccatctaaatgatgaagaactctctactgttatagatagcttaattgcattcatacttcaaaagtggtctgagttcaacggaaaacttcgaaatatagtgtacagtatactggataccttaatcaaagagaaatcggacctgattttgaaattaaaaccttacactactttggctttagtaggcaagcctgaattaggtattttagctcgtgatggccaatttgcaagaatggtgaataaaataagaagtaccacggaccttatacccatatttgctaataacttgaaaagtagtaacaagtatgtcataaaccaaaatttagacgatatagaggtatatcttcggagaaagcagacagaaagatcgattgattttacaccaaagaaggttgggcaaacttctgatataacattagttttgggtgctttattagacacttctcataagtttagaaatttagacaaggacctatgcgagaagtgcgccaaatgtatcagtatgattggtgttttagacgttacaaagcatgagtttaaaagaacaacatattcagaaaacgaagtttatgatttgaatgatagtgttcaaactattaagttcttgatatgggtcataaatgatatcctcgttcctgcgttttggcaaagtgagaatcccagcaagcaattgtttgttgcccttgtcatacaggaatcattaaaatattgcgggctaagttcagagtcatgggatatgaaccataaagaattatatccaaatgaagccaaactatgggaaaagtttaactctgtctccaagacaaccatctatccgcttttatcttccttgtatcttgcgcaatcatggaaagaatatgtcccgctaaaatatccttctaataacttcaaggaaggatacaaaatttgggtgaaaaggtttacattggatttattgaaaacaggtacaacagaaaatcatccattacacgtgttttcctctttgattagggaagatgatggctcactatcaaattttttgctaccttatatttctctggacattattatcaaggcagaaaaaggaactccatacgctgatattttaaacgggattattattgaatttgacagcattttcacgtgcaatctggaaggaatgaataacttgcaagtggattcgttaagaatgtgctatgaatccatcttcagagttttcgaatattgcaaaaaatgggcaactgagtttaaacaaaattacagtaaactacacggcacttttatcattaaagatacgaaaacaactaacatgcttttgagaatagatgagtttttgcgaacaaccccttcagatttgctagctcaacgctccttagagacggattcttttgaaaggtctgctctataccttgaacagtgctatcgacagaatcctcacgataagaaccaaaatggacaactactgaaaaatttacaaatcacatacgaagaaataggagacattgactcactcgatggtgtactgagaacctttgctacaggaaacttggtttctaaaattgaagaattgcaatattctgaaaactggaaactcgcacaagactgctttaatgtcctcggcaaattttcagatgaccccaaaactacaaccaggatgctaaagtctatgtatgaccaccaattgtattctcaaataatatcgaactcttcgttccattcttcagacggaaaaatttctttgtctccagatgtgaaggaatggtacagcataggtcttgaagctgcaaatctagaaggcaatgttcaaactttgaaaaattgggtagaacaaatagagagtttaagaaatattgacgatagagaagtacttttgcagtacaatattgcgaaagctttaattgccatctcaaacgaggatccattaaggactcaaaaatacatccacaattcctttaggcttatcggaacaaattttataacgtcatctaaagagacgacgctgctaaagaaacagaatttattgatgaaattacacagtttatatgacctcagttttttatcttctgcgaaagataagtttgaatacaaaagtaacactaccatactcgattatcgaatggaacgtattggggctgacttcgtgccaaatcattacatattgtcaatgagaaagtcatttgaccaattgaaaatgaatgaacaagcagacgctgacttaggaaaaacattcttcactttagcccaattggcgagaaacaacgctaggctagatatagcctccgaatcattaatgcattgtttggaaaggcggttgcctcaggcagagttggagtttgctgaaatactatggaagcaaggtgagaatgatagagccttaaagatagtgcaagaaatacatgaaaagtatcaagaaaattcctcggttaatgctcgcgatcgtgccgccgtgctattaaagtttactgaatggttagacctttcgaacaattcagcgtccgaacaaattattaaacaatatcaggatatttttcagattgattctaaatgggataaaccatattactctattggcttatactatagtagactacttgagcgcaaaaaagcagagggttatattactaatggtcgttttgagtacagggcaatatcttactttttattggcatttgaaaagaacactgctaaagtaagagaaaatttgcccaaagttatcacgttttggctagatattgcggccgcatcaatttctgaagctcctggaaacagaaaggaaatgctgagtaaggctacggaagatatatgtagtcatgttgaagaagcgctgcagcattgtcccacttatatttggtactttgttttgactcagttgttatctaggttattacattctcatcaatcatcggcccagataataatgcacatactgctaagtttggctgttgaatacccctctcatattttatggtatatcacagcccttgtaaattccaattcttcaaaaagagttcttcgtggtaagcatattttagaaaagtatagacaacattcgcaaaatcctcatgatctagtttctagtgcattggatttaacgaaagcattaactcgtgtctgtttgcaagatgtcaaaagcattacaagtagatcaggcaaatctttagaaaaagacttcaaatttgacatgaacgtggccccatctgcaatggttgttccagtaagaaaaaatttagacatcatttcaccactagagtctaactcaatgaggggctatcaaccatttaggccggttgtttctataattagattcggatcatcttataaagtgttttcttcattaaagaagccaaaacaattgaacataataggttcagatggcaacatttatgggatcatgtgtaagaaggaagatgtccgacaagataaccaatatatgcagttcgccacaacaatggattttcttctgagtaaggacatagcttcaagaaaaagaagcctgggcataaatatttactccgtactatctcttcgagaagactgtgggatattggaaatggtaccgaatgttgtaactttaagatctattctttctacaaagtacgaaagtctgaaaattaagtatagcctgaaaagtctacatgataggtggcagcacaccgcagtagatggaaaactcgagttttacatggaacaggtagataaatttcctccaatcttgtaccaatggtttttagaaaactttcctgatccaatcaattggttcaacgccaggaatacgtatgccagatcttacgccgtcatggcaatggttggccatatattaggtctaggtgataggcactgtgaaaacatattactagatatacagacgggtaaagttcttcatgtagacttcgactgtttatttgagaaaggcaaaaggttacctgtcccagaaattgttcccttcagactaacaccaaatttattggatgcgttgggcataattgggacagaaggaacatttaagaagtctagtgaagtcacgttggctttaatgagaaaaaatgaagtagcgttgatgaatgtgatcgaaacaattatgtacgatagaaacatggaccactcaattcaaaaagcgctaaaggtcttaagaaacaaaatccgcggtatagatccgcaggatggcctggtattgagtgttgctggccaaacagaaacattgatccaagaagcaacatcagaagacaatctaagcaagatgtatattggttggcttccattttggtaa

SEQ ID NO: 666 - DNA, 7107 bp, Artificial Sequence
  Description of Artificial Sequence: Synthetic polynucleotide
atggaatctcacgtcaaatatcttgacgaattgatattggcaataaaagacttgaactctggggtggattctaaggtgcagattaaaaaagtgcccacggatccatcttcttctcaggagtacgccaagagtttaaagatcttgaacaccctcataagaaacttgaaagatcaaagaaggaacaatatcatgaaaaatgatactatattttccaaaacagtttccgcccttgccttattgttggagtacaaccccttcttgcttgttatgaaggattccaacgggaactttgagatacaaaggttgatagatgatttcctcaacatatccgttttgaactatgataattaccacagaatatggtttatgaggagaaaattaggcagctggtgcaaagcatgtgtcgaattttacggaaaacctgctaagtttcagcttactgcacattttgagaacaccatgaatctttacgaacaggccttgactgaagtcttgttgggcaagactgagcttctcaaattttatgacaccttgaagggtttatacattcttttatactggttcacttccgagtatagtacttttgggaactctatagcattcttagattcttctttggggttcacgaaatttgactttaacttccaaagattaatcaggattgttctttacgtctttgattcctgcgaattggcagcattggaatatgccgaaatccaactcaaatatatttctttggttgtggactatgtttgcaatagaacaatttccacagccttggatgccccagcgttagtttgttgtgaacaattaaagtttgtattgactactatgcatcattttttggataacaagtatgggctcttggataatgaccccactatggccaaaggaattcttcgtttatattctctttgcatttctaacgatttctccaaatgctttgtagaccacttcccaattgaccagtgggcagatttttctcaaagtgaacattttccgttcacgcagttgactaataaagctctctccattgtatattttgatttgaaaagaaggtccttacctgttgaagctttaaagtacgataataagttcaacatctgggtataccaaagtgagccggactccagcttgaaaaatgtcacttctccctttgatgatagatataagcagttagaaaagttaaggttgttagtattgaagaagtttaacaagacagaaagaggaactttgctcaaataccgcgtgaaccagttgagtcctggattttttcaaagagctggaaacgatttcaagttgattttaaatgaagcatctgtatccattcaaacttgtttcaagacaaacaatataacaaggttgacatcttggactgtaattctcggacgtttggcctgtttagaaagtgagaagttttccggcactttaccaaattccacaaaggatatggataattggtatgtttgtcatttatgcgatattgagaaaactggcaaccctttcgtgagaataaatccaaatagaccagaggctgcgggtaaaagtgaaatcttcaggatacttcattccaactttttatctcacccaaatatagatgaatttagcgaatctttgttaagtggcatcttattttctttgcataggatattttctcactttcaacctccaaaacttacagatggaaacggtcaaatcaataagagctttaaattagtacaaaagtgctttatgaattctaacagatacttgcgtttattaagtactagaattatacctttattcaatatatctgactctcataattccgaagatgaacacactgccacgttgataaagtttttgcaatctcaaaaattgccagtggtgaaagaaaatttagtcattgcttggacacaattaacattgacgacttctaatgatgtatttgatacattgcttttgaaattgattgatattttcaattctgatgattatagtttaagaataatgatgactttgcaaattaaaaatatggccaaaattttaaagaaaacaccatatcaattattatctcctattttacctgtattattaagacagttgggaaaaaacctcgtggaaagaaaagttggctttcaaaatttaatagaattattgggatattcttctaaaacaattctcgatattttccagagatatatcatcccttatgcaattattcaatataagagcgatgtgttgagtgaaattgctaagattatgtgtgatggcgatacaagtttaattaaccaaatgaaggttaatttattgaaaaaaaacagtaggcaaatatttgccgtagctttggtaaaacacggattattttctttggatatcttggaaaccctttttttaaatagggctccaacttttgacaaaggatatataactgcataccttcccgattataaaactttagctgaaataacgaagctctacaaaaacagcgttactaaagatgcaagtgacagcgagaatgctaatatgattttatgctctttgagatttttaatcaccaattttgaaaaagacaaaaggcatggttccaagtacaaaaatatcaataactggacggatgatcaggaacaagcgttccaaaagaaattacaggataatatcttaggtattttccaagttttttctagtgacatacatgatgttgaaggccgcaccacttactacgaaaagttaagggttatcaatggcatttcttttcttatcatatatgcccccaaaaaatctataatttccgcattagcccagattagtatttgtttgcaaacaggacttgggcttaaggaagttagatacgaggcctttagatgttggcatcttttagttcgccatttgaatgatgaagaactctctactgttatagatagcttaattgcattcatacttcaaaagtggtctgagttcaacggaaaacttagaaatatagtgtacagtatattggataccttaatcaaagagaaaagtgacttgattttgaaattaaaaccttacactactttggctttagtaggcaagcctgaattaggtattttagctcgtgatggccaatttgcaagaatggtgaataaaataagaagtaccacggaccttatacccatatttgctaataacttgaaaagtagtaacaagtatgtcataaaccaaaatttagacgatatagaggtatatcttagaagaaagcagacagaaagatctattgattttacaccaaagaaggttgggcaaacttctgatataacattagttttgggtgctttattagacacttctcataagtttagaaatttagacaaggacctttgcgagaagtgcgccaaatgtatcagtatgattggtgttttagacgttacaaagcatgagtttaaaagaacaacatattctgaaaacgaagtttatgatttgaatgatagtgttcaaactattaagttcttgatatgggtcataaatgatatcctcgttcctgcgttttggcaaagtgagaatcccagcaagcaattgtttgttgcccttgtcatacaggaatctttaaaatattgcgggttgagtagtgagagttgggatatgaaccataaagaattatatccaaatgaagccaaattatgggaaaagtttaactctgtctccaagacaaccatctatccgcttttatcttccttgtatcttgcgcaaagttggaaagaatatgtcccgttaaaatatccttctaataacttcaaggaaggatacaaaatttgggtgaaaaggtttacattggatttattgaaaacaggtacaacagaaaatcatccattacacgtgttttcctctttgattagggaagatgatggctccttatccaattttttgttaccttatatttctttggacattattatcaaggcagaaaaaggaactccatacgctgatattttaaacgggattattattgaatttgacagcattttcacgtgcaatttggaaggaatgaataacttgcaagtggattctttaagaatgtgctatgaatccatcttcagagttttcgaatattgcaaaaaatgggcaactgagtttaaacaaaattacagtaaattacacggcacttttatcattaaagatacgaaaacaactaacatgcttttgagaatagatgagtttttgagaacaaccccttctgatttgttggctcaacgctccttagagacggattcttttgaaaggtctgctttgtaccttgaacagtgctataggcagaatcctcacgataagaaccaaaatggacaattattgaaaaatttacaaatcacatacgaagaaataggagacattgactctctcgatggtgtattaagaacctttgctacaggaaacttggtttctaaaattgaagaattgcaatattctgaaaactggaaactcgcacaagactgctttaatgtcctcggcaaattttctgatgaccccaaaactacaaccaggatgttgaagtctatgtatgaccaccaattgtattctcaaataataagcaactcttctttccattcttctgacggaaaaatttctttgtctccagatgtgaaggaatggtacagcataggtcttgaagctgcaaatttggaaggcaatgttcaaactttgaaaaattgggtagaacaaatagagagtttaagaaatattgacgatagagaagtacttttgcagtacaatattgcgaaagctttaattgccatctccaacgaggatccattaaggactcaaaaatacatccacaattcctttaggcttatcggaacaaattttataacgtcttctaaagagacgacgttattgaagaaacagaatttattgatgaaattacacagtttatatgacctcagttttttatcttctgcgaaagataagtttgaatacaaaagtaacactaccatactcgattatagaatggaacgtattggggctgacttcgtgccaaatcattacatattgtccatgagaaagagctttgaccaattgaaaatgaatgaacaagcagacgctgacttaggaaaaacattcttcactttagcccaattggcgagaaacaacgctaggttagatatagcctccgaatctttaatgcattgtttggaaaggagattgcctcaggcagagttggagtttgctgaaatattatggaagcaaggtgagaatgatagagccttaaagatagtgcaagaaatacatgaaaagtatcaagaaaattcctctgttaatgctcgcgatcgtgccgccgtgttattaaagtttactgaatggttagacctttccaacaattctgcgtccgaacaaattattaaacaatatcaggatatttttcagattgattctaaatgggataaaccatattactctattggcttatactatagtagattacttgagcgcaaaaaagcagagggttatattactaatggtcgttttgagtacagggcaatatcttactttttattggcatttgaaaagaacactgctaaagtaagagaaaatttgcccaaagttatcacgttttggcttgatattgcggccgcatctatttctgaagctcctggaaacagaaaggaaatgttaagtaaggctacggaagatatatgtagtcatgttgaagaagcgttgcagcattgtcccacttatatttggtactttgttttgactcagttgttatctaggttattacattctcatcaatcttctgcccagataataatgcacatattattaagtttggctgttgaatacccctctcatattttatggtatatcacagcccttgtaaattccaattcttctaaaagagttcttcgtggtaagcatattttagaaaagtatagacaacattctcaaaatcctcatgatttggtttctagtgcattggatttaacgaaagcattaactcgtgtctgtttgcaagatgtcaaaagcattacaagtagaagcggcaaatctttagaaaaagacttcaaatttgacatgaacgtggccccatctgcaatggttgttccagtaagaaaaaatttagacatcatttctccattggagtctaactccatgaggggctatcaaccatttaggccggttgtttctataattagattcggatcttcttataaagtgttttcttctttaaagaagccaaaacaattgaacataataggttctgatggcaacatttatgggatcatgtgtaagaaggaagatgtcagacaagataaccaatatatgcagttcgccacaacaatggattttcttttaagtaaggacatagcttccagaaaaagaagcttgggcataaatatttactccgtattatctcttagagaagactgtgggatattggaaatggtaccgaatgttgtaactttaagatctattctttctacaaagtacgaaagtttgaaaattaagtatagcttgaaaagtttgcatgataggtggcagcacaccgcagtagatggaaaactcgagttttacatggaacaggtagataaatttcctccaatcttgtaccaatggtttttagaaaactttcctgatccaatcaattggttcaacgccaggaatacgtatgccagatcttacgccgtcatggcaatggttggccatatattaggtttaggtgataggcactgtgaaaacatattattagatatacagacgggtaaagttcttcatgtagacttcgactgtttatttgagaaaggcaaaaggttacctgtcccagaaattgttcccttcagattgacaccaaatttattggatgcgttgggcataattgggacagaaggaacatttaagaagtctagtgaagtcacgttggctttaatgagaaaaaatgaagtagcgttgatgaatgtgatcgaaacaattatgtacgatagaaacatggaccactctattcaaaaagcgttaaaggtcttaagaaacaaaatccgcggtatagatccgcaggatggcttagtattgagtgttgctggccaaacagaaacattgatccaagaagcaacaagtgaagacaatttgagcaagatgtatattggttggcttccattttggtga

SEQ ID NO: 667 - DNA, 540 bp, Saccharomyces cerevisiae
atggtggttttagacaagaagttattggaaagattgacttctcgtaaggttcccttagaagagctcgaagatatggaaaaacgatgctttttgtctacttttacatatcaagatgcctttgatttggggacttacataagaaatgcagttaaagaaaatttccccgaaaaaccagttgcaattgatatctccttaccaaatgggcattgcttgtttcgcacagtgacctacggtggcagtgcattggacaatgatttttggatccagagaaagaagaagacagcgcttcgatttggtcattcaagtttctatatgggctgcaagaaaggtgacaaaacaccggaggaaaagttttttgtggactcaaaagaatacgctttccatggaggtgctgtcctaatacaatcggagagaagtgactacccctatgcctgcttaactataagtggattgaagcaggaagaagaccatttaatggcagtcagctctttaattgcatttgctaatgaaagtctagaagaagatttgaatttggattga

SEQ ID NO: 668 - DNA, 540 bp, Artificial Sequence
  Description of Artificial Sequence: Synthetic polynucleotide
atggtggttttagacaagaagttattggaaagattgacttctcgtaaggttcccttagaagagctcgaagatatggaaaaaagatgctttttgtctacttttacatatcaagatgcctttgatttggggacttacataagaaatgcagttaaagaaaatttccccgaaaaaccagttgcaattgatatctccttaccaaatgggcattgcttgtttcgcacagtgacctacggtggcagtgcattggacaatgatttttggatccagagaaagaagaagacagcgcttagatttggtcattctagtttctatatgggctgcaagaaaggtgacaaaacaccggaggaaaagttttttgtggactctaaagaatacgctttccatggaggtgctgtcttgatacaaagtgagagaagtgactacccctatgcctgcttaactataagtggattgaagcaggaagaagaccatttaatggcagtcagctctttaattgcatttgctaatgaaagtttagaagaagatttgaatttggattga

SEQ ID NO: 669 - DNA, 1575 bp, Saccharomyces cerevisiae
atggagaaagatcaaatccagcctagggtgttggagtcagtagacacaaactcattatccttgctttcgtccaataccagctcaaatatgaatagcaacaccaacaataaactcagtataattgccagtgatatttctacaggatccgtactttccaggcccttgactcctccagtcgtccaggatatagagaataactccatgttacaatggcaatttgaaaagaaggaatttatcttcgatagtaacagcactccttcgaagcaggcaaaaccattgcagagaaattctccataccaaggcaatagtcaaagtgaaaatcagaaccaacagttattgaatgtaagaaagcgtcgctcacaattgataggtgccaagcctaaaattccatccaaattgtaccaatctgtttccaaattagatctaattgatgacaagagctttacgtctttgccaattgcgcctccatgcaatatcgaaactaatgaagatgacagtggaaacaacgaatacaacaacaataaaaaacggcccaggttgaatcctgtaaatgaactgcgagtgcataacaacaaacgtaataggtacgtcagttatgggccgagtttagatacaaaaaactacgagctaacagaaaatacttctcaggatataccaccgctagtcctggttgaagactacataccgtatacccaaagtaaatcaacaaaaaaaatggtatctatttcagatttgaaatcaaaactaagtaaaagaagagataatcatatcccgctgagagtaaaaaattcatattctgaaattaataaggaaaccaatagaaatagctttgaaccgaattcactaacactgataccccatatattaaggaatactgaagaaaatagggacgaaagtaacaaccccttagattttatcaaagaggaaattgaaataagtgatatttccataccaaattccattgaaaatatggtggttaacttggttaatattccatcttccaataaaagttacgatgatctttatctatcggaattaaatgttcattcccaactgaggaaatgtgtcatctgcgaaaaggccctatatgaaattagctcgagacttttaaattcaggatactataaagaaattgtatgtgagcaatgcacagttagatatgaagaagccgctaaaatctttgagaactgcgagttcgaatcatctatggatgaatcaaatctaagcagcggtacttttagtgatctagagaattcagcagaaccgtttcatttatcgacagatgttccaaaaaaaataaataggcacatagaagataacaagatcgaccttaaaaaggaaatatcaaaaaaaaaggacagcttctctaaggaactaatagaacgattgcagttgcaattgctagaaaatgataagtcaatcaaacatcattttaataaagatgcaatgggctctaaatcaatgaattggtttttggaagcaagaagaaaattgaagtggaagtggagaataaatggtttacttccgcatttcttacgcaatcaaaatagtgatcgtttaaattttcaaccttga

SEQ ID NO: 670 - DNA, 1575 bp, Artificial Sequence
  Description of Artificial Sequence: Synthetic polynucleotide
atggagaaagatcaaatccagcctagggtgttggagagtgtagacacaaactctttatccttgctttcctccaataccagcagtaatatgaatagcaacaccaacaataaactcagtataattgccagtgatatttctacaggatccgtactttccaggcccttgactcctccagtcgtccaggatatagagaataactccatgttacaatggcaatttgaaaagaaggaatttatcttcgatagtaacagcactccttctaagcaggcaaaaccattgcagagaaattctccataccaaggcaatagtcaaagtgaaaatcagaaccaacagttattgaatgtaagaaagcgtcgctctcaattgataggtgccaagcctaaaattccatccaaattgtaccaatctgtttccaaattagatttgattgatgacaagagctttacgtctttgccaattgcgcctccatgcaatatcgaaactaatgaagatgacagtggaaacaacgaatacaacaacaataaaaaaaggcccaggttgaatcctgtaaatgaattaagagtgcataacaacaaacgtaataggtacgtcagttatgggccgagtttagatacaaaaaactacgagttgacagaaaatacttctcaggatataccaccgttagtcttggttgaagactacataccgtatacccaaagtaaatctacaaaaaaaatggtatctatttctgatttgaaatctaaattaagtaaaagaagagataatcatatcccgttaagagtaaaaaattcttattctgaaattaataaggaaaccaatagaaatagctttgaaccgaattctttaacattaataccccatatattaaggaatactgaagaaaatagggacgaaagtaacaaccccttagattttatcaaagaggaaattgaaataagtgatatttccataccaaattccattgaaaatatggtggttaacttggttaatattccatcttccaataaaagttacgatgatctttatttatctgaattaaatgttcattcccaattaaggaaatgtgtcatctgcgaaaaggccttatatgaaattagcagcagacttttaaattctggatactataaagaaattgtatgtgagcaatgcacagttagatatgaagaagccgctaaaatctttgagaactgcgagttcgaaagctctatggatgaaagtaatttgagcagcggtacttttagtgatttagagaattctgcagaaccgtttcatttatctacagatgttccaaaaaaaataaataggcacatagaagataacaagatcgaccttaaaaaggaaatatccaaaaaaaaggacagcttctctaaggaattgatagaaagattgcagttgcaattgttggaaaatgataagtctatcaaacatcattttaataaagatgcaatgggctctaaatctatgaattggtttttggaagcaagaagaaaattgaagtggaagtggagaataaatggtttacttccgcatttcttacgcaatcaaaatagtgatcgtttaaattttcaaccttga

SEQ ID NO: 671 - DNA, 1527 bp, Saccharomyces cerevisiae
atgaagtatctaaacttagttttcgtgcttcagcttcttattagcatcaaatacgcctcattcggccgagccttttctctttttgaagatgataccacctttgccaatttggataaacagctaaagcttccacagaatacacagcaaacccttaaattggaccgtttgaatcacgatgatccgctgtttacaacttttatttcttctgtggacacagattacagtttgagacttagaacagtagatccttctaaactaggaattgacaccgtaaaacaatggtcgggttacatggactataaggattccaaacactttttttactggttttttgaaagtaggaacgatcctgctaacgacccaattattctttggttaaatggtggacctggttgttcctcgtttactgggttgctatttgaactaggcccctcatcaattggcgccgatatgaaaccaatccacaatccctattcttggaataataacgcttcaatgatcttcttagaacagccactcggagtcggcttttcctatggtgatgaaaaagtctcctctacaaaattagcaggcaaagatgcgtacattttcctggaattgttttttgaagcttttcctcatttacgctccaacgatttccacattgcaggcgaatcctatgcaggacattatatccctcaaattgcacatgagatcgttgtcaagaaccctgaaagaacgttcaatttaacttcagttatgattggtaatggtatcacagaccctttgattcaagcagattattatgaaccaatggcatgcgggaaagggggctatcaccctgttctctcatcagaagaatgtgagaaaatgagtaaagctgcaggtcgttgtcgtaggttgaacaagttatgttatgcttctaaatcaagtttaccatgcatagtcgccactgcttactgtgactctgcacttttggaaccgtacattaacacaggactcaacgtctatgacattagagggccctgtgaagataatagtactgatggtatgtgttatacaggtctccgctatgtcgaccagtatatgaattttcctgaagttcaagaaacgctagggtccgacgtgcataattattctggctgtgataatgacgtgttcaccggatttttgtttacgggcgatggaagtaaaccatttcaacaatatattgctgaattattaaatcacaacattccggtattaatatatgcgggtgataaggattatatttgtaattggctgggaaaccatgcttggtccaatgagttggaatggatcaataaacgtaggtatcagagaaggatgttaagaccatgggtcagtaaagaaacaggtgaagagttgggacaagtcaagaactatggccctttcacctttttgagaatatacgatgccggtcatatggtgccctatgatcaaccggaggcaagtttggaaatggtcaacagttggatttccggtaatcgtgctttttcggatctttccaccttggaaaatgctagttag

SEQ ID NO: 672 - DNA, 1527 bp, Artificial Sequence
  Description of Artificial Sequence: Synthetic polynucleotide
atgaagtatttgaacttagttttcgtgcttcagcttcttattagcatcaaatacgcctctttcggcagagccttttctctttttgaagatgataccacctttgccaatttggataaacagttgaagcttccacagaatacacagcaaacccttaaattggaccgtttgaatcacgatgatccgttgtttacaacttttatttcttctgtggacacagattacagtttgagacttagaacagtagatccttctaaattaggaattgacaccgtaaaacaatggtctggttacatggactataaggattccaaacactttttttactggttttttgaaagtaggaacgatcctgctaacgacccaattattctttggttaaatggtggacctggttgttcctcttttactgggttgttatttgaattaggcccctcttccattggcgccgatatgaaaccaatccacaatccctattcttggaataataacgcttccatgatcttcttagaacagccactcggagtcggcttttcctatggtgatgaaaaagtctcctctacaaaattagcaggcaaagatgcgtacattttcttggaattgttttttgaagcttttcctcatttacgctccaacgatttccacattgcaggcgaatcctatgcaggacattatatccctcaaattgcacatgagatcgttgtcaagaaccctgaaagaacgttcaatttaacttctgttatgattggtaatggtatcacagaccctttgattcaagcagattattatgaaccaatggcatgcgggaaagggggctatcaccctgttctctcttctgaagaatgtgagaaaatgagtaaagctgcaggtcgttgtcgtaggttgaacaagttatgttatgcttctaaatctagtttaccatgcatagtcgccactgcttactgtgactctgcacttttggaaccgtacattaacacaggactcaacgtctatgacattagagggccctgtgaagataatagtactgatggtatgtgttatacaggtctccgctatgtcgaccagtatatgaattttcctgaagttcaagaaacgttggggtccgacgtgcataattattctggctgtgataatgacgtgttcaccggatttttgtttacgggcgatggaagtaaaccatttcaacaatatattgctgaattattaaatcacaacattccggtattaatatatgcgggtgataaggattatatttgtaattggttaggaaaccatgcttggtccaatgagttggaatggatcaataaacgtaggtatcagagaaggatgttaagaccatgggtcagtaaagaaacaggtgaagagttgggacaagtcaagaactatggccctttcacctttttgagaatatacgatgccggtcatatggtgccctatgatcaaccggaggcaagtttggaaatggtcaacagttggatttccggtaatcgtgctttttctgatctttccaccttggaaaatgctagttga

SEQ ID NO: 673 - DNA, 9279 bp, Saccharomyces cerevisiae
atgaatcaaagcgatccgcaagacaaaaaaaatttcccaatggaatactctttgaccaagcatcttttttttgataggcttctacttgttcttcccatagaatctaatttgaaaacatatgctgatgtggaggcagattcagttttcaattcgtgtcggtccatcattttgaatatagccatcactaaggacttgaacccgattatcgaaaacacattaggtttaattgacttgattgtgcaagatgaagaaattacgtctgacaatattacagatgatattgcccattctatattggttcttttgagattactgagtgatgtttttgagtattactgggatcaaaacaatgacttcaagaaaattagaaacgataattacaaaccgggattttcaagtcacaggccaaacttccatacatctaggccaaagcacacgagaatcaatccagctttggcgacgatgttactatgtaaaatttctaagctgaagttcaatacaagaactttaaaggttttacagaacatgtctcaccatctttctggcagcgctactatctcaaaatcgagtattttacccgattcacaggaatttttacaaaagagaaactatccagcatataccgagaaaatagatttaacaatagattatatccagagattcatatctgcttccaatcatgttgaattcacaaagtgtgtcaaaacaaaagttgttgcacctttattgatatcacacacctcaaccgaattgggcgtagtaaaccacttggatttatttggttgtgagtatttgactgataagaatctgctagcatatctggacatactacaacacctgtcaagttacatgaagaggaccatttttcattcgcttttgttatattatgcttccaaagcttttttattttggataatggcaaggccaaaagaatacgtcaaaatttataacaatctaatatcatcagattataatagtccgtcttcttcatctgataatggtggttcgaataattctgataaaacgtctatatcccaactagtctcactgttattcgatgacgtttattccacttttagtgtatcatcattattaacaaatgtcaataatgaccaccactaccatcttcatcattcatcttcttcatcaaagacgaccaacactaatagtccaaactctatatcaaaaacgtcgataaagcagtcgagtgtgaatgcttctggcaatgtttctccgtctcagttttctactgggaatgatgcatcgcctacttcccctatggcatcattgagttcacccttaaacacgaacatcctagggtatccgttatctccaatcacttcaacactaggacaggcgaatacttccacatcgactacggctgcaactaccaaaacagatgcagatacgccctctactatgaatactaacaacaataataacaataacaacagcgctaatcttaataatattccacaacgcatattttccttagatgacatttcatcctttaactcgagtagaaaatcactcaatctagatgatagtaactccttgtttctttgggatacttctcagcattctaatgcatcgatgacaaatacaaatatgcatgcaggagttaataattctcagtctcagaacgatcagtcttctttaaactatatggaaaatattatggagctgtattccaactataccggatcagaactatcctcccatactgccatattaaggtttttggtggttctgaccttattagacagtgaagtatatgatgagatgaactcaaattcgtatagaaaaatttcggaaccgataatgaatattaatccgaaggactctaatacttcaagttggggctcagcatccaaaaacccaagtatcaggcacctcacccatggcttaaaaaaacttactttacagcaaggcaggaaacgtaacgttaaatttttgacatatttgattagaaatttgaatgggggacagttcgtttcagatgtttccttgattgactctatcaggtccattctattcttaatgacaatgacgtcttctatatcccaaatcgattcaaatattgcttctgttattttttcgaagagattctacaacttgttgggtcaaaatttagaggtcggcaccaattggaattctgccactgcaaatacttttatttctcattgtgttgaaaggaatccccttacacataggcgtttacaattagagttttttgcaagcggtttacagctggattctgatttatttttaagacatttacaactggaaaaagaactcaatcacatagaccttcccaaaatatcgttatacactgaaggatttagggtattttttcacctagtaagcaccaaaaaacttcatgaggatattgcagaaaaaacctcctctgtgttaaagagacttttctgcataattgctgatattttgttgaaagcaacgccttattttgacgataatgtaaccaagattattgcttctatattggatgggcatattttagatcaatttgacgctgcgcgaacactttctaatgatgatcatgtcagttttgatgctgccacaagcgtttacactgagccaaccgaaattattcataactcatcggatgcctcgttagtctcttcactttcccaatcacccttatcaattaactcaggaagcaatatcaccaatacgcgcacctgggatattcaatcaatcttaccaaccttatcgaacagatcaagtgcttctgatttgagcttgtctaacattttgactaatccgttggaggcacaacaaaataataatgcaaacttgttagcccatagattatctggggttcctactactaagagatacgcttcaccgaacgactctgaaagatcacgacaaagtccatattcttctccgccgcaattgcaacaaagtgacttgccttctccgctctcagtcctctcgtcaagtgcaggattttcttctaatcattcgattacggcaaccccaactattttgaaaaacatcaaatctccaaaaccaaacaaaacaaaaaaaattgctgatgataaacaattgaaacagccttcttattcaagagtaatactgagtgacaatgatgaagcaagaaagattatgatgaacattttcagcattttcaaaagaatgaccaactggtttatacgcccagatgctaatacagaattcccgaagacttttacggatattataaaaccactttttgtctctatattggattctaatcaaagactacaagttacagcgcgggcttttattgaaatcccattaagttatatagctacttttgaagacattgataatgatcttgacccaagagtactgaatgaccattatttgttatgtacatatgccgttactttgtttgcttcatcattgtttgatttgaagttagaaaatgcgaagagagagatgctactagacattattgttaaatttcaacgagtccgttcttatttatcaaatttagcagaaaaacacaacctagtccaggcaataattacgacggagaggttgacgctgccattattagttggtgctgtaggaagtggaattttcatttcattatactgcagtcgtggaaatacgccacgcttaataaaaatttcatgttgtgaatttctacgatccttgagattttatcaaaaatacgtaggcgctttggatcaatattccatttacaatattgatttcatagatgctatggcccaggacaatttcactgcctcaggatcagtggctttgcaacggcgtctaagaaataatattttaacttatatcaaaggatccgactcaatccttttggattcaatggacgtgatttacaagaagtggttttacttcagctgttcgaaatcagttacgcaagaggaactagtagattttagaagcttggcaggcattctagcttctatgtcaggtattctgtctgatatgcaagagttggaaaaaagcaagagcgctccagataatgaaggagacagcttatcatttgagtcacgaaatcccgcttatgaggtgcacaaaagtcttaaactcgagttaacgaaaaaaatgaatttctttatttcaaaacaatgtcaatggttgaataatccaaatctattaacaagagaaaattcgagagatatattaagtattgagttgcatcctctatcttttaacttattgtttaacaacctaggactgaaaatagatgaactgatgtcaattgatctttcaaagtcacatgaggattcatcgtttgttttactagagcagataataattataataagaactatactaaagagggatgatgatgaaaagataatgctactcttttcgacggacttgcttgatgcggtcgataagttgatcgaaatagtggagaaaatttccatcaagtcctccaaatattataagggaattatccaaatgtcgaaaatgtttagagcatttgagcactctgaaaagaacctgggcatttcaaatcatttccatttaaagaataaatggttgaagttagttattggttggttcaaactatctattaataaggattatgattttgaaaacctgtcaagaccattaagggaaatggatttgcagaaaagggacgaagattttttgtatatcgacacttctattgaatctgcaaaagcattggcttacctaacacataatgttcctttagaaataccgccttcaagctcaaaagaagattggaacagatcttctacagtatcatttggcaatcactttactattttgttaaaaggtctggagaaaagcgcggacctgaatcagtttccagtttcattaaggcataagatcagtatacttaatgaaaatgtaataatagcgctaacgaacttatctaatgccaatgtcaacgtttctttaaaattcactttaccaatgggttattctccaaataaagatatcagaatcgcctttttaagagttttcatcgacatagtaaccaactatccagttaaccctgagaaacatgaaatggataaaatgctagctatagacgacttcctgaaatatataatcaagaacccaatattagcatttttcggaagtttagcgtgttctcctgctgatgttgatttatatgctggtggattcttaaacgcctttgacactagaaatgcgtctcatatccttgttactgagctccttaaacaagaaatcaaacgggccgcaagatcagacgatattctcagaagaaatagttgtgcaacaagggctttgtcactttacactagatctagaggtaacaaatatttgataaaaactttgagacccgttttgcaagggatagtggataacaaggagtcttttgaaattgataagatgaaaccaggatccgaaaactccgaaaagatgttagacttatttgagaagtacatgacaagattaattgacgcaattacaagttctattgatgatttcccaatagaattagttgatatctgtaaaacaatttacaatgctgctagtgtaaattttccagaatacgcatatattgccgttgggtcattcgttttcttgaggtttatcgggcctgctttagttagtcctgattcggaaaatatcattattgttacgcacgcccatgacagaaagccctttattacactagctaaagttattcaaagtttagctaatggcagggaaaatatattcaagaaagatatcttagtttcaaaagaagagtttttgaaaacctgtagtgataaaatattcaattttttgtctgaattgtgcaagataccgactaacaatttcaccgtcaatgtaagagaagatccgacaccaataagctttgactactcatttttgcataaattcttttacctcaatgagtttaccataagaaaagaaattattaatgaatccaaattaccaggggagttcagctttttgaaaaatactgttatgctcaacgacaaaattcttggtgtattgggacaacctagcatggaaataaaaaatgaaattcctccttttgtagtcgagaatcgggaaaaatatccttcattgtatgaattcatgagtcgctatgccttcaaaaaagtggacatgaaagaagaagaagaggataatgcgccatttgtacatgaagcaatgacattggatggcatacaaatcattgtcgtaacttttaccaattgcgagtacaataattttgtaatggactcactggtctataaagttctgcagatatatgcaagaatgtggtgctctaaacattatgtagttatcgattgtaccaccttttatgggggtaaggctaatttccaaaaattgactactctatttttcagtttgataccagagcaagcatcaagtaattgtatgggatgttattacttcaacgtcaacaaatcatttatggaccaatgggcctcatcatatactgtagaaaatccgtacttggtcactacaattccccgttgtttcatcaacagcaatactgaccaaagtttgataaagtccttaggattgagtggtaggagtttggaagttttgaaagatgtaagagttactttgcatgatattaccctttatgacaaggaaaaaaagaagttttgtcccgtgtccttgaagataggaaacaaatacttccaagttttacatgagattccgcagttgtacaaggttaccgtatcaaacaggacattcagcatcaaattcaacaatgtttacaagatatcaaatttaatttcagtcgatgtctctaacaccacaggcgtttcctcggaatttacgttaagtcttgataatgaagaaaagttggtattttgcagtccgaagtacctagaaattgtgaaaatgttttattatgcccagttaaagatggaagaagactttggtacggatttttcgaacgatatttcattttcaacatcctcttcagcagttaatgcttcttactgcaatgttaaagaagttggtgaaattatatcacatttgtcattggtgatccttgtaggtttattcaatgaggatgatctcgtcaaaaacatatcatacaaccttctcgtggcaacgcaagaagcatttaatttagattttgggacaaggcttcacaaatccccagagacatatgtacccgatgataccaccacgttcttggccctaattttcaaggctttttcagaatcttcaacggaactaactccatatatatggaaatatatgctggatggccttgaaaacgacgtgattcctcaagaacatattcctacggttgtctgttcattgtcatactgggtaccaaacttatatgaacatgtatatttggcaaatgacgaagagggaccagaggcgatttcacgtataatctatagcttaatcaggttgacggtcaaagagccaaatttcacgacagcttaccttcaacagatttggtttttactggcattggatggtcgtctcacgaacgtgatagttgaagaaatagtaagtcatgcgctggatagagattcagaaaacagagactggatgaaagctgtgtcaatactaaccagttttccaacgacagagattgcttgtcaggtaatagagaagctaataaatatgatcaaatcttttctaccttctctagcagttgaggcttccgcacacagttggtctgagcttactattttatcaaaaattagtgtgtcaattttctttgaatcacccttactttcccagatgtatttaccggagattcttttcgctgtgtctctgttaattgatgtcggtccttcggaaataagagtctcattgtacgagttgttgatgaatgtttgtcattctttaaccaacaatgagtccttacctgaaaggaataggaaaaatttggatatcgtctgtgcaacattcgcacgtcaaaagttgaactttatctccggttttagccaagaaaaaggtagagttttaccaaattttgccgcttcctccttctccagtaaattcggaacattagatctcttcactaaaaacattatgctattgatggaatatggttctatttcagagggtgcacaatgggaggcaaaatataagaaatatttgatggatgcgatttttggccatcggtcgttcttctctgcgagagctatgatgattctaggtataatgagtaagtcgcacacgtcccttttcctttgtaaagaacttttagttgaaaccatgaaggtcttcgcagagccagttgtggatgatgaacaaatgttcatcattatagctcatgtctttacttacagcaaaattgtcgaagggttagatccttcttcagaattaatgaaagagctattttggcttgctacaatatgtgttgaatcccctcatcctttactctttgaaggtggtctcctgttcatggtaaattgtttgaagcgactgtacacggtccatcttcaacttggattcgatggcaaatcgctagccaaaaaattaatggaatctagaaattttgctgctacgcttttggctaagttagagtcatacaatggatgcatatggaacgaagataattttcctcatattattttaggtttcattgcaaacggtttatccattcctgtcgtaaaaggagccgcattagattgtctacaggcccttttcaagaatacatattacgaaagaaagtccaacccaaaatcctccgattatctttgttaccttttcttactccatttggtcttaagtcctgaacaactttctaccttgttacttgaagtcggcttcgaagatgaactggtacctttaaataatacactaaaagtgccacttactttgatcaactggctaagttcagactcagataaatctaatatagtcttataccaaggagcacttttgtttagctgtgttatgtcagacgaaccatgtaaattccgttttgctctattgatgaggtatttgctcaaagtcaaccctatttgtgtattcaggttctatacgctgactagaaaggaattcaggaggttatcaaccctagaacaatcatctgaagcggttgctgtctcttttgaattgattgggatgcttgttacacacagtgagtttaattacctagaggaatttaatgatgaaatggtcgaacttttaaaaaagagaggcttgtcagttgtgaagcctctggatatttttgatcaggaacatatagaaaagttaaaaggagagggtgaacatcaagtggcaatttatgagagaaaaagattagcaacaatgatactggcaagaatgtcgtgctcctaa

SEQ ID NO: 674 - DNA, 9279 bp, Artificial Sequence
  Description of Artificial Sequence: Synthetic polynucleotide
atgaatcaaagcgatccgcaagacaaaaaaaatttcccaatggaatactctttgaccaagcatcttttttttgataggcttttacttgttcttcccatagaatctaatttgaaaacatatgctgatgtggaggcagattctgttttcaattcttgtagatccatcattttgaatatagccatcactaaggacttgaacccgattatcgaaaacacattaggtttaattgacttgattgtgcaagatgaagaaattacgtctgacaatattacagatgatattgcccattctatattggttcttttgagattattaagtgatgtttttgagtattactgggatcaaaacaatgacttcaagaaaattagaaacgataattacaaaccgggattttctagtcacaggccaaacttccatacatctaggccaaagcacacgagaatcaatccagctttggcgacgatgttattatgtaaaatttctaagttgaagttcaatacaagaactttaaaggttttacagaacatgtctcaccatctttctggcagcgctactatctccaaatctagtattttacccgattctcaggaatttttacaaaagagaaactatccagcatataccgagaaaatagatttaacaatagattatatccagagattcatatctgcttccaatcatgttgaattcacaaagtgtgtcaaaacaaaagttgttgcacctttattgatatctcacacctccaccgaattgggcgtagtaaaccacttggatttatttggttgtgagtatttgactgataagaatttattggcatatttggacatattgcaacacttatccagttacatgaagaggaccatttttcattctcttttgttatattatgcttccaaagcttttttattttggataatggcaaggccaaaagaatacgtcaaaatttataacaatttgatatcttctgattataatagtccgtcttcttcttctgataatggtggtagtaataattctgataaaacgtctatatcccaattggtctctttattattcgatgacgtttattccacttttagtgtatcttctttattaacaaatgtcaataatgaccaccactaccatcttcatcattcttcttcttcttccaagacgaccaacactaatagtccaaactctatatccaaaacgtctataaagcagagcagtgtgaatgcttctggcaatgtttctccgtctcagttttctactgggaatgatgcatctcctacttcccctatggcaagtttgagttctcccttaaacacgaacatcttggggtatccgttatctccaatcacttctacattaggacaggcgaatacttccacatctactacggctgcaactaccaaaacagatgcagatacgccctctactatgaatactaacaacaataataacaataacaacagcgctaatcttaataatattccacaacgcatattttccttagatgacatttcttcctttaacagtagtagaaaatctctcaatttggatgatagtaactccttgtttctttgggatacttctcagcattctaatgcatctatgacaaatacaaatatgcatgcaggagttaataattctcagtctcagaacgatcagtcttctttaaactatatggaaaatattatggagttgtattccaactataccggatctgaattatcctcccatactgccatattaaggtttttggtggttttaaccttattagacagtgaagtatatgatgagatgaacagtaattcttatagaaaaatttctgaaccgataatgaatattaatccgaaggactctaatacttctagttggggcagtgcatccaaaaacccaagtatcaggcacctcacccatggcttaaaaaaacttactttacagcaaggcaggaaacgtaacgttaaatttttgacatatttgattagaaatttgaatgggggacagttcgtttctgatgtttccttgattgactctatcaggtccattcttttcttaatgacaatgacgtcttctatatcccaaatcgattctaatattgcttctgttattttttccaagagattctacaacttgttgggtcaaaatttagaggtcggcaccaattggaattctgccactgcaaatacttttatttctcattgtgttgaaaggaatccccttacacataggcgtttacaattagagttttttgcaagcggtttacagttagattctgatttatttttaagacatttacaattggaaaaagaactcaatcacatagaccttcccaaaatatctttatacactgaaggatttagggtattttttcacttggtaagcaccaaaaaacttcatgaggatattgcagaaaaaacctcctctgtgttaaagagacttttctgcataattgctgatattttgttgaaagcaacgccttattttgacgataatgtaaccaagattattgcttctatattggatgggcatattttagatcaatttgacgctgcgagaacactttctaatgatgatcatgtcagttttgatgctgccacaagcgtttacactgagccaaccgaaattattcataactcttctgatgcctctttagtctcttctctttcccaatctcccttatccattaactctggaagcaatatcaccaatacgcgcacctgggatattcaatccatcttaccaaccttatctaacagaagtagtgcttctgatttgagcttgtctaacattttgactaatccgttggaggcacaacaaaataataatgcaaacttgttagcccatagattatctggggttcctactactaagagatacgcttctccgaacgactctgaaagatctagacaaagtccatattcttctccgccgcaattgcaacaaagtgacttgccttctccgctctctgtcctctcttccagtgcaggattttcttctaatcattctattacggcaaccccaactattttgaaaaacatcaaatctccaaaaccaaacaaaacaaaaaaaattgctgatgataaacaattgaaacagccttcttattctagagtaatattgagtgacaatgatgaagcaagaaagattatgatgaacattttcagcattttcaaaagaatgaccaactggtttatacgcccagatgctaatacagaattcccgaagacttttacggatattataaaaccactttttgtctctatattggattctaatcaaagattacaagttacagcgagagcttttattgaaatcccattaagttatatagctacttttgaagacattgataatgatcttgacccaagagtattgaatgaccattatttgttatgtacatatgccgttactttgtttgcttcttctttgtttgatttgaagttagaaaatgcgaagagagagatgttattagacattattgttaaatttcaaagagtccgttcttatttatccaatttagcagaaaaacacaacttggtccaggcaataattacgacggagaggttgacgttaccattattagttggtgctgtaggaagtggaattttcatttctttatactgcagtcgtggaaatacgccacgcttaataaaaattagttgttgtgaatttttaagatccttgagattttatcaaaaatacgtaggcgctttggatcaatattccatttacaatattgatttcatagatgctatggcccaggacaatttcactgccagtggatctgtggctttgcaacgtcgtttaagaaataatattttaacttatatcaaaggatccgactctatccttttggattctatggacgtgatttacaagaagtggttttacttcagctgttctaaatctgttacgcaagaggaattggtagattttagaagcttggcaggcattttggcttctatgagtggtattttatctgatatgcaagagttggaaaaaagcaagagcgctccagataatgaaggagacagcttatcttttgagtctagaaatcccgcttatgaggtgcacaaaagtcttaaactcgagttaacgaaaaaaatgaatttctttatttccaaacaatgtcaatggttgaataatccaaatttattaacaagagaaaattctagagatatattaagtattgagttgcatcctttatcttttaacttattgtttaacaacttgggattgaaaatagatgaattgatgtctattgatctttccaagagtcatgaggattcttcttttgttttattggagcagataataattataataagaactatattgaagagggatgatgatgaaaagataatgttgctcttttctacggacttgcttgatgcggtcgataagttgatcgaaatagtggagaaaatttccatcaagtcctccaaatattataagggaattatccaaatgtccaaaatgtttagagcatttgagcactctgaaaagaacttgggcatttctaatcatttccatttaaagaataaatggttgaagttagttattggttggttcaaattatctattaataaggattatgattttgaaaacttatctagaccattaagggaaatggatttgcagaaaagggacgaagattttttgtatatcgacacttctattgaatctgcaaaagcattggcttacttgacacataatgttcctttagaaataccgccttccagcagtaaagaagattggaacagatcttctacagtatcctttggcaatcactttactattttgttaaaaggtttagagaaaagcgcggacttgaatcagtttccagtttctttaaggcataagatcagtatacttaatgaaaatgtaataatagcgttgacgaacttatctaatgccaatgtcaacgtttctttaaaattcactttaccaatgggttattctccaaataaagatatcagaatcgcctttttaagagttttcatcgacatagtaaccaactatccagttaaccctgagaaacatgaaatggataaaatgttggctatagacgacttcttgaaatatataatcaagaacccaatattagcatttttcggaagtttagcgtgttctcctgctgatgttgatttatatgctggtggattcttaaacgcctttgacactagaaatgcgtctcatatccttgttactgagctccttaaacaagaaatcaaaagagccgcaagaagtgacgatattctcagaagaaatagttgtgcaacaagggctttgtctctttacactagatctagaggtaacaaatatttgataaaaactttgagacccgttttgcaagggatagtggataacaaggagtcttttgaaattgataagatgaaaccaggatccgaaaactccgaaaagatgttagacttatttgagaagtacatgacaagattaattgacgcaattacaagttctattgatgatttcccaatagaattagttgatatctgtaaaacaatttacaatgctgctagtgtaaattttccagaatacgcatatattgccgttgggtctttcgttttcttgaggtttatcgggcctgctttagttagtcctgattctgaaaatatcattattgttacgcacgcccatgacagaaagccctttattacattggctaaagttattcaaagtttagctaatggcagggaaaatatattcaagaaagatatcttagtttccaaagaagagtttttgaaaacctgtagtgataaaatattcaattttttgtctgaattgtgcaagataccgactaacaatttcaccgtcaatgtaagagaagatccgacaccaataagctttgactactcttttttgcataaattcttttacctcaatgagtttaccataagaaaagaaattattaatgaatccaaattaccaggggagttcagctttttgaaaaatactgttatgctcaacgacaaaattcttggtgtattgggacaacctagcatggaaataaaaaatgaaattcctccttttgtagtcgagaatagagaaaaatatccttctttgtatgaattcatgagtcgctatgccttcaaaaaagtggacatgaaagaagaagaagaggataatgcgccatttgtacatgaagcaatgacattggatggcatacaaatcattgtcgtaacttttaccaattgcgagtacaataattttgtaatggactctttggtctataaagttttacagatatatgcaagaatgtggtgctctaaacattatgtagttatcgattgtaccaccttttatgggggtaaggctaatttccaaaaattgactactttatttttcagtttgataccagagcaagcaagtagtaattgtatgggatgttattacttcaacgtcaacaaaagttttatggaccaatgggcctcttcttatactgtagaaaatccgtacttggtcactacaattccccgttgtttcatcaacagcaatactgaccaaagtttgataaagtccttaggattgagtggtaggagtttggaagttttgaaagatgtaagagttactttgcatgatattaccctttatgacaaggaaaaaaagaagttttgtcccgtgtccttgaagataggaaacaaatacttccaagttttacatgagattccgcagttgtacaaggttaccgtatccaacaggacattcagcatcaaattcaacaatgtttacaagatatccaatttaatttctgtcgatgtctctaacaccacaggcgtttccagtgaatttacgttaagtcttgataatgaagaaaagttggtattttgcagtccgaagtacttggaaattgtgaaaatgttttattatgcccagttaaagatggaagaagactttggtacggatttttccaacgatatttccttttctacatcctcttctgcagttaatgcttcttactgcaatgttaaagaagttggtgaaattatatctcatttgtctttggtgatccttgtaggtttattcaatgaggatgatctcgtcaaaaacatatcttacaaccttctcgtggcaacgcaagaagcatttaatttagattttgggacaaggcttcacaaatccccagagacatatgtacccgatgataccaccacgttcttggccttaattttcaaggctttttctgaatcttctacggaattgactccatatatatggaaatatatgcttgatggccttgaaaacgacgtgattcctcaagaacatattcctacggttgtctgttctttgagttactgggtaccaaacttatatgaacatgtatatttggcaaatgacgaagagggaccagaggcgatttctcgtataatctatagcttaatcaggttgacggtcaaagagccaaatttcacgacagcttaccttcaacagatttggtttttattggcattggatggtcgtctcacgaacgtgatagttgaagaaatagtaagtcatgcgttggatagagattctgaaaacagagactggatgaaagctgtgtctatattgaccagttttccaacgacagagattgcttgtcaggtaatagagaagttaataaatatgatcaaatcttttttaccttctttggcagttgaggcttccgcacacagttggtctgagcttactattttatccaaaattagtgtgtccattttctttgaaagtcccttactttcccagatgtatttaccggagattcttttcgctgtgtctttattaattgatgtcggtccttctgaaataagagtctctttgtacgagttgttgatgaatgtttgtcattctttaaccaacaatgagtccttacctgaaaggaataggaaaaatttggatatcgtctgtgcaacattcgcacgtcaaaagttgaactttatctccggttttagccaagaaaaaggtagagttttaccaaattttgccgcttcctccttctccagtaaattcggaacattagatctcttcactaaaaacattatgcttttgatggaatatggttctatttctgagggtgcacaatgggaggcaaaatataagaaatatttgatggatgcgatttttggccataggtctttcttctctgcgagagctatgatgattttgggtataatgagtaagtctcacacgtcccttttcctttgtaaagaacttttagttgaaaccatgaaggtcttcgcagagccagttgtggatgatgaacaaatgttcatcattatagctcatgtctttacttacagcaaaattgtcgaagggttagatccttcttctgaattaatgaaagagttattttggcttgctacaatatgtgttgaatcccctcatcctttactctttgaaggtggtctcttgttcatggtaaattgtttgaagagattatacacggtccatcttcaacttggattcgatggcaaatctttggccaaaaaattaatggaatctagaaattttgctgctacgcttttggctaagttagagagttacaatggatgcatatggaacgaagataattttcctcatattattttaggtttcattgcaaacggtttatccattcctgtcgtaaaaggagccgcattagattgtttacaggcccttttcaagaatacatattacgaaagaaagtccaacccaaaatcctccgattatctttgttaccttttcttactccatttggtcttaagtcctgaacaactttctaccttgttacttgaagtcggcttcgaagatgaattggtacctttaaataatacattaaaagtgccacttactttgatcaactggttgagtagtgacagtgataaatctaatatagtcttataccaaggagcacttttgtttagctgtgttatgtctgacgaaccatgtaaattccgttttgctttattgatgaggtatttgctcaaagtcaaccctatttgtgtattcaggttctatacgttgactagaaaggaattcaggaggttatctaccttagaacaatcttctgaagcggttgctgtctcttttgaattgattgggatgcttgttacacacagtgagtttaattacttggaggaatttaatgatgaaatggtcgaacttttaaaaaagagaggcttgagtgttgtgaagcctttggatatttttgatcaggaacatatagaaaagttaaaaggagagggtgaacatcaagtggcaatttatgagagaaaaagattagcaacaatgatattggcaagaatgagttgctcctga

SEQ ID NO: 675 - DNA, 1014 bp, Saccharomyces cerevisiae
atgcattcaagaaagtcgaagagtattacgggcaagaggaagcaagtaggaagtaacgtgacgagagtaatcaagccacagaagacaagaaggataataagaagattccaccatttaattaataagcgtcaatcgatatgcaagtttttatgccttaaggaaaacctagatgattccaacgaggagaagaatgacaaaattatcaggttaagtattaaaggtaatgtaagactgggcaagtactatgaagacggcaaatcgcagtccttcaatgatgctatggaatcacaactactgaggctgcactcattaattaaaaatgaatccaaatcaaaggatacttctgacttggctgtgatgtacacattacttggttacataatgaatcagattaataaattgggaggactagaaacttaccaaattgccagtcaaaacgggcaattgaaggaacgaggaggagacacgtccaagttgctcgagaaatggatcaggtcctcatttgaaaattgtcctggagcagtggcattagaaattggttcattgagctccggaaatcgcatatcccgttgtgcactttttagaaatgtggttcgtatagatttagaggaacatgaaggcgttattaagcaggattttatggaaagaccgctaccgagaaatgaaaacgacaaattcgacctgatatcatgctctctagtgctaaattttgtcaaaaatcacagggatcgcggtgcaatgtgccatcgcatggtcaaatttctcaagccgcaaggctacatctttattgttctgccacaagcctgtgtgacgcactcaagatactgcgacaaaacactgttacaaaacctcctcggctctatcgggctcataatgcttaatagccatcaaagtaataagttgtactattgtttgtatcaattgcaggtagttccaccgcagccgagtagcttttccaaaagaatcaaggttaacgacggccctgggttgaacaattttggtattaccctctaa

SEQ ID NO: 676 - DNA, 1014 bp, Artificial Sequence
  Description of Artificial Sequence: Synthetic polynucleotide
atgcattccagaaagtccaagagtattacgggcaagaggaagcaagtaggaagtaacgtgacgagagtaatcaagccacagaagacaagaaggataataagaagattccaccatttaattaataagcgtcaaagtatatgcaagtttttatgccttaaggaaaaccttgatgattccaacgaggagaagaatgacaaaattatcaggttaagtattaaaggtaatgtaagattgggcaagtactatgaagacggcaaatctcagtccttcaatgatgctatggaatctcaattattgaggttacactctttaattaaaaatgaatccaaatccaaggatacttctgacttggctgtgatgtacacattacttggttacataatgaatcagattaataaattgggaggattagaaacttaccaaattgccagtcaaaacgggcaattgaaggaaagaggaggagacacgtccaagttgctcgagaaatggatcaggtcctcttttgaaaattgtcctggagcagtggcattagaaattggttctttgagctccggaaatcgcatatcccgttgtgcactttttagaaatgtggttcgtatagatttagaggaacatgaaggcgttattaagcaggattttatggaaagaccgttaccgagaaatgaaaacgacaaattcgacttgatatcttgctctttggtgttgaattttgtcaaaaatcacagggatcgcggtgcaatgtgccatcgcatggtcaaatttctcaagccgcaaggctacatctttattgttttgccacaagcctgtgtgacgcactccagatactgcgacaaaacattattacaaaacctcctcggctctatcgggctcataatgcttaatagccatcaaagtaataagttgtactattgtttgtatcaattgcaggtagttccaccgcagccgagtagcttttccaaaagaatcaaggttaacgacggccctgggttgaacaattttggtattaccctctga

SEQ ID NO: 677 - DNA, 2322 bp, Saccharomyces cerevisiae
atgggtaagaaaagggctcctcaaaaaggaaaaacggtcacaaagccacaggagataattgtagatgaatccaaattgaactggaaaccagtagatattccggacactttagatgactttggtggattttatggcttggaagaaattgacggagtggacgttaaagtcgtggatggtaaagtaactttcgtcaccaaaaaagattcaaaagtgttaaaagatagcaataaggaaaaagtcggagatgatcaggaatctgtggaaaatgaatcagggtcagattcggagtccgagctccttgaattcaagaacttggacgatattaaagaaggagagttgagtgcagcatcttattcatcatccgacgaggatgagcaaggtaatattgagagttcaaagttaaccgatcccagtgaggatgtggatgaggatgtggatgaggatgttttgaaagaaaacgtctttaacaaagacattaatatcgatgatatttctcctgtaaatttacctgaatggacgaatcttgcacctctctcaatgactattttgcagagcttgcagaatttaaattttctcagacctacagaaattcaaaaaaagtctattccagttattatgcaaggcgtagacgtcatggggaaagcctctacaggttcaggtaaaactttagcctatggtattccaattgtagagaaactgatcagtaacttctctcagaaaaacaagaaaccaatatcgttaatctttactcctacaagagaactggcgcatcaagtcacagaccacttaaaaaagatctgtgagcctgttctagcgaaatctcagtactcgatattatctttgacaggtggactctctatccaaaaacaacaacgtctattaaagtacgataatagtggccaaattgtcatcgcaacaccaggtagatttttggaactgttggaaaaagacaacactttaatcaaaagattctcgaaagtaaatacgctaatccttgatgaggctgataggctgttacaagacggtcatttcgacgagttcgaaaaaatcattaaacatttattagtagaaagaaggaaaaacagagaaaactccgagggcagtagcaaaatttggcaaactttgatcttttctgcaacattctccatcgacttgtttgataagctatcttcttcccgtcaagttaaggatagaaggtttaaaaacaacgaagatgagctaaatgccgtaatacaacacttaatgagcaaaattcacttcaactcaaagccggttataatagatacaaatcctgagtcaaaagtgagctctcaaatcaaagaatccttaattgaatgtcctccattagaacgtgacctatactgctattactttttaaccatgttcccaggtacaactttgatcttttgtaatgccattgactccgtgaagaaattgaccgtatacttaaataacctaggcatcccagcttttcaaattcattcttccatgacacaaaagaaccgtttgaaaagcttagaaaggttcaagcaacaaagcgctaaacagaaaacaataaatcattcgaatccggattccgttcaactctcaacagtattgattgcaagtgatgttgctgctagaggtttagatattccgggtgttcaacacgttattcattaccacttaccaagatctactgatatttatattcatagatcaggcagaactgcaagagcaggttctgaaggtgtctctgccatgatatgctcacctcaagaatctatgggcccattaagaaagttaagaaaaactctcgctacaaaaaatagtgtttcgacggatttgaactctagatcaactaacagaaaacccatcaagtggcaaaacactgtgcctttgttaccaattgaaaccgatatactttcacaactcagagaaagaagtagattagcaggcgaactggctgatcatgaaattgcttctaattccctaagaaaagatgacaattggttaaaaaaggctgctgatgaattaggtattgacgttgattccgacgaagacgatatatcaaagagtaattcggacactttcttactaaaaaataaaaataaaaaaatgcagaagactataaataaggacaaggtaaaagccatgagagctacgttgaacgaattgttatcagtgcctatacgtaaagatagaagacagaaatatttgacaggtgggctagtgaatttagctgataacttggtcaaaaaaagaggtcataattctatcattggtcatgaaaagacaaacgccttagaaactttgaagaaaaagaaaaagagaaataattaa

SEQ ID NO: 678 - DNA, 2322 bp, Artificial Sequence
  Description of Artificial Sequence: Synthetic polynucleotide
atgggtaagaaaagggctcctcaaaaaggaaaaacggtcacaaagccacaggagataattgtagatgaatccaaattgaactggaaaccagtagatattccggacactttagatgactttggtggattttatggcttggaagaaattgacggagtggacgttaaagtcgtggatggtaaagtaactttcgtcaccaaaaaagattctaaagtgttaaaagatagcaataaggaaaaagtcggagatgatcaggaatctgtggaaaatgaatctgggtctgattctgagtccgagctccttgaattcaagaacttggacgatattaaagaaggagagttgagtgcagcatcttattcttcttccgacgaggatgagcaaggtaatattgagagttccaagttaaccgatcccagtgaggatgtggatgaggatgtggatgaggatgttttgaaagaaaacgtctttaacaaagacattaatatcgatgatatttctcctgtaaatttacctgaatggacgaatcttgcacctctctctatgactattttgcagagcttgcagaatttaaattttctcagacctacagaaattcaaaaaaagtctattccagttattatgcaaggcgtagacgtcatggggaaagcctctacaggttctggtaaaactttagcctatggtattccaattgtagagaaattaatcagtaacttctctcagaaaaacaagaaaccaatatctttaatctttactcctacaagagaattggcgcatcaagtcacagaccacttaaaaaagatctgtgagcctgttttggcgaaatctcagtactctatattatctttgacaggtggactctctatccaaaaacaacaacgtttattaaagtacgataatagtggccaaattgtcatcgcaacaccaggtagatttttggaattattggaaaaagacaacactttaatcaaaagattctccaaagtaaatacgttgatccttgatgaggctgataggttattacaagacggtcatttcgacgagttcgaaaaaatcattaaacatttattagtagaaagaaggaaaaacagagaaaactccgagggcagtagcaaaatttggcaaactttgatcttttctgcaacattctccatcgacttgtttgataagttatcttcttcccgtcaagttaaggatagaaggtttaaaaacaacgaagatgagttgaatgccgtaatacaacacttaatgagcaaaattcacttcaactccaagccggttataatagatacaaatcctgagagtaaagtgagctctcaaatcaaagaatccttaattgaatgtcctccattagaacgtgacttgtactgctattactttttaaccatgttcccaggtacaactttgatcttttgtaatgccattgactccgtgaagaaattgaccgtatacttaaataacttgggcatcccagcttttcaaattcattcttccatgacacaaaagaaccgtttgaaaagcttagaaaggttcaagcaacaaagcgctaaacagaaaacaataaatcattctaatccggattccgttcaactctccacagtattgattgcaagtgatgttgctgctagaggtttagatattccgggtgttcaacacgttattcattaccacttaccaagatctactgatatttatattcatagaagcggcagaactgcaagagcaggttctgaaggtgtctctgccatgatatgctctcctcaagaatctatgggcccattaagaaagttaagaaaaactctcgctacaaaaaatagtgtttccacggatttgaactctagatctactaacagaaaacccatcaagtggcaaaacactgtgcctttgttaccaattgaaaccgatatactttctcaactcagagaaagaagtagattagcaggcgaattggctgatcatgaaattgcttctaattccttgagaaaagatgacaattggttaaaaaaggctgctgatgaattaggtattgacgttgattccgacgaagacgatatatccaagagtaatagtgacactttcttattgaaaaataaaaataaaaaaatgcagaagactataaataaggacaaggtaaaagccatgagagctacgttgaacgaattgttatctgtgcctatacgtaaagatagaagacagaaatatttgacaggtgggttagtgaatttagctgataacttggtcaaaaaaagaggtcataattctatcattggtcatgaaaagacaaacgccttagaaactttgaagaaaaagaaaaagagaaataattga

SEQ ID NO: 679 - DNA, 1314 bp, Saccharomyces cerevisiae
atggataacgaggttgaaaaaaatattgagatctggaaggtcaagaagttggtccaatctttagaaaaagctagaggtaatggtacttctatgatttccttagttattcctcctaagggtcaaattccactgtaccaaaaaatgttaacagatgaatatggtactgcctcgaatattaaatctagggttaatcgtctttccgttttatctgctatcacttccacccaacaaaagttgaagctatataatactttgcccaagaacggtttagttttatattgtggtgatatcatcactgaagatggtaaagaaaaaaaggtcacttttgacatcgaaccttacaaacctatcaacacatccttatatttgtgtgataacaaatttcatacagaagttctttcggaattgcttcaagctgacgacaagttcggttttatagtcatggacggtcaaggtactttgtttggttctgtgtccggtaatacgagaactgttttacataaatttactgtcgatctgccaaaaaagcatggtagaggtggtcaatctgcgcttcgttttgctcgtttaagagaagaaaaaagacataattatgtgagaaaggtcgccgaagttgctgttcaaaattttattactaatgacaaagtcaatgttaagggtttaattttagctggttctgctgactttaagaccgatttggctaaatctgaattattcgatccaagactagcatgtaaggttatttccatcgtggatgtttcttatggtggtgaaaacggtttcaaccaggctatcgaactttctgccgaagcgttggccaatgtcaagtatgttcaagaaaagaaattattggaggcatattttgacgaaatttcccaggacactggtaaattctgttatggtatagatgatactttaaaggcattggatttaggtgcagtcgaaaaattaattgttttcgaaaatttggaaactatcagatatacatttaaagatgccgaggataatgaggttataaaattcgctgaaccagaagccaaggacaagtcgtttgctattgacaaagctaccggccaagaaatggacgttgtctccgaagaacctttaattgaatggctagcagctaactacaaaaacttcggtgctaccttggaattcatcacagacaaatcttcagaaggtgcccaatttgtcacaggttttggtggtattggtgccatgctgcgttacaaagttaattttgaacaactagttgatgaatctgaggatgaatattatgacgaagatgaaggatccgactatgatttcatttaa

SEQ ID NO: 680 - DNA, 1314 bp, Artificial Sequence
  Description of Artificial Sequence: Synthetic polynucleotide
atggataacgaggttgaaaaaaatattgagatctggaaggtcaagaagttggtccaatctttagaaaaagctagaggtaatggtacttctatgatttccttagttattcctcctaagggtcaaattccattgtaccaaaaaatgttaacagatgaatatggtactgcctctaatattaaatctagggttaatcgtctttccgttttatctgctatcacttccacccaacaaaagttgaagctttataatactttgcccaagaacggtttagttttatattgtggtgatatcatcactgaagatggtaaagaaaaaaaggtcacttttgacatcgaaccttacaaacctatcaacacatccttatatttgtgtgataacaaatttcatacagaagttctttctgaattgcttcaagctgacgacaagttcggttttatagtcatggacggtcaaggtactttgtttggttctgtgtccggtaatacgagaactgttttacataaatttactgtcgatttaccaaaaaagcatggtagaggtggtcaatctgcgcttcgttttgctcgtttaagagaagaaaaaagacataattatgtgagaaaggtcgccgaagttgctgttcaaaattttattactaatgacaaagtcaatgttaagggtttaattttagctggttctgctgactttaagaccgatttggctaaatctgaattattcgatccaagattagcatgtaaggttatttccatcgtggatgtttcttatggtggtgaaaacggtttcaaccaggctatcgaactttctgccgaagcgttggccaatgtcaagtatgttcaagaaaagaaattattggaggcatattttgacgaaatttcccaggacactggtaaattctgttatggtatagatgatactttaaaggcattggatttaggtgcagtcgaaaaattaattgttttcgaaaatttggaaactatcagatatacatttaaagatgccgaggataatgaggttataaaattcgctgaaccagaagccaaggacaagagctttgctattgacaaagctaccggccaagaaatggacgttgtctccgaagaacctttaattgaatggttggcagctaactacaaaaacttcggtgctaccttggaattcatcacagacaaatcttctgaaggtgcccaatttgtcacaggttttggtggtattggtgccatgcttcgttacaaagttaattttgaacaattggttgatgaatctgaggatgaatattatgacgaagatgaaggatccgactatgatttcatttga

SEQ ID NO: 681 - DNA, 315 bp, Saccharomyces cerevisiae
atgctttttgactcatccttccgcgaaaggagaactttttacaatgccgccggctctgttagcgtacccttctacaagcagatagcagaacaaacacatgatatattcaaaaggtgcaatgtcagagaacatatattgcgcccctgtcctgtagacatcagtcatttttcgcgggacttgaatggcgcaccattatcctatacagaaaacattaaatttactgcaaaattttgggcaaacgcttggatagactatgaatccgtcatgaagacactacttgtaaaattatatatatccttttttttcatgtgctag

SEQ ID NO: 682 - DNA, 315 bp, Artificial Sequence
  Description of Artificial Sequence: Synthetic polynucleotide
atgctttttgactcttccttccgcgaaaggagaactttttacaatgccgccggctctgttagcgtacccttctacaagcagatagcagaacaaacacatgatatattcaaaaggtgcaatgtcagagaacatatattgcgcccctgtcctgtagacatcagtcatttttctagagacttgaatggcgcaccattatcctatacagaaaacattaaatttactgcaaaattttgggcaaacgcttggatagactatgaatccgtcatgaagacattgcttgtaaaattatatatatccttttttttcatgtgctga

SEQ ID NO: 683 - DNA, 1056 bp, Saccharomyces cerevisiae
atgccttcgcaagtcattcctgaaaaacaaaaggctattgtcttttatgagacagatggaaaattggaatataaagacgtcacagttccggaacctaagcctaacgaaattttagtccacgttaaatattctggtgtttgtcatagtgacttgcacgcgtggcacggtgattggccatttcaattgaaatttccattaatcggtggtcacgaaggtgctggtgttgttgttaagttgggatctaacgttaagggctggaaagtcggtgattttgcaggtataaaatggttgaatgggacttgcatgtcctgtgaatattgtgaagtaggtaatgaatctcaatgtccttatttggatggtactggcttcacacatgatggtacttttcaagaatacgcaactgccgatgccgttcaagctgcccatattccaccaaacgtcaatcttgctgaagttgccccaatcttgtgtgcaggtatcactgtttataaggcgttgaaaagagccaatgtgataccaggccaatgggtcactatatccggtgcatgcggtggcttgggttctctggcaatccaatacgcccttgctatgggttacagggtcattggtatcgatggtggtaatgccaagcgaaagttatttgaacaattaggcggagaaatattcatcgatttcacggaagaaaaagacattgttggtgctataataaaggccactaatggcggttctcatggagttattaatgtgtctgtttctgaagcagctatcgaggcttctacgaggtattgtaggcccaatggtactgtcgtcctggttggtatgccagctcatgcttactgcaattccgatgttttcaatcaagttgtaaaatcaatctccatcgttggatcttgtgttggaaatagagctgatacaagggaggctttagatttcttcgccagaggtttgatcaaatctccgatccacttagctggcctatcggatgttcctgaaatttttgcaaagatggagaagggtgaaattgttggtagatatgttgttgagacttctaaatga

SEQ ID NO: 684 - DNA, 1056 bp, Artificial Sequence
  Description of Artificial Sequence: Synthetic polynucleotide
atgccttctcaagtcattcctgaaaaacaaaaggctattgtcttttatgagacagatggaaaattggaatataaagacgtcacagttccggaacctaagcctaacgaaattttagtccacgttaaatattctggtgtttgtcatagtgacttgcacgcgtggcacggtgattggccatttcaattgaaatttccattaatcggtggtcacgaaggtgctggtgttgttgttaagttgggatctaacgttaagggctggaaagtcggtgattttgcaggtataaaatggttgaatgggacttgcatgtcctgtgaatattgtgaagtaggtaatgaatctcaatgtccttatttggatggtactggcttcacacatgatggtacttttcaagaatacgcaactgccgatgccgttcaagctgcccatattccaccaaacgtcaatcttgctgaagttgccccaatcttgtgtgcaggtatcactgtttataaggcgttgaaaagagccaatgtgataccaggccaatgggtcactatatccggtgcatgcggtggcttgggttctttggcaatccaatacgcccttgctatgggttacagggtcattggtatcgatggtggtaatgccaagagaaagttatttgaacaattaggcggagaaatattcatcgatttcacggaagaaaaagacattgttggtgctataataaaggccactaatggcggttctcatggagttattaatgtgtctgtttctgaagcagctatcgaggcttctacgaggtattgtaggcccaatggtactgtcgtcttggttggtatgccagctcatgcttactgcaattccgatgttttcaatcaagttgtaaaatctatctccatcgttggatcttgtgttggaaatagagctgatacaagggaggctttagatttcttcgccagaggtttgatcaaatctccgatccacttagctggcctttctgatgttcctgaaatttttgcaaagatggagaagggtgaaattgttggtagatatgttgttgagacttctaaatga

SEQ ID NO: 685 - DNA, 837 bp, Saccharomyces cerevisiae
atgttttcaaggctttctttgtttcgaagggcagctctggctcctgcccctatgagaatgtcttttaggactatttatcaaaaaaccgaggatgaattgcccagaaggatcgtcccaaagctagccacattttattcggcgaatcctaaccatgaagatcgtattaatcgactcgaaagacttctaaggaaatacataaaactgccatctcagaacaacaatgaagcacaacaaacaaaagctccttggatttctttcgatgagtacgctttaatcggcggtggtacgaaattaaagcctacgcaatatactcagctactgtatatgttgaataaacttcacaacattgatcctcaacttactaatgatgaaatcacatccgaactatcccaatattataaaaaaagttcaatgctttccaataatatcaaaatcaaaactttagatgagtttggaagaagtatagccgttggaaaaaggaaaagttccactgcgaaagtattcgttgttagaggtacaggtgagatattagttaatggtcgacaattgaatgattacttccttaagatgaaagacagagaatcaatcatgtatccacttcaagtgatcgaatcagttggaaagtacaatatttttgcgacaacgtctggaggcggacctacgggtcaggctgaatcaatcatgcacgccattgcgaaagctttggttgtgttcaatccattattaaaatccagactacataaagctggcgtcttaacaagagattacaggcacgtcgaaagaaagaagccaggaaaaaagaaggcaagaaagatgccaacatgggtcaagagatag

SEQ ID NO: 686 - DNA, 837 bp, Artificial Sequence
  Description of Artificial Sequence: Synthetic polynucleotide
atgtttagcaggctttctttgtttagaagggcagctttggctcctgcccctatgagaatgtcttttaggactatttatcaaaaaaccgaggatgaattgcccagaaggatcgtcccaaagttggccacattttattctgcgaatcctaaccatgaagatcgtattaatagactcgaaagacttttgaggaaatacataaaattaccatctcagaacaacaatgaagcacaacaaacaaaagctccttggatttctttcgatgagtacgctttaatcggcggtggtacgaaattaaagcctacgcaatatactcagttattatatatgttgaataaacttcacaacattgatcctcaacttactaatgatgaaatcacatccgaattatcccaatattataaaaaaagttctatgctttccaataatatcaaaatcaaaactttagatgagtttggaagaagtatagccgttggaaaaaggaaaagttccactgcgaaagtattcgttgttagaggtacaggtgagatattagttaatggtagacaattgaatgattacttccttaagatgaaagacagagaaagtatcatgtatccacttcaagtgatcgaatctgttggaaagtacaatatttttgcgacaacgtctggaggcggacctacgggtcaggctgaaagtatcatgcacgccattgcgaaagctttggttgtgttcaatccattattaaaatccagattacataaagctggcgtcttaacaagagattacaggcacgtcgaaagaaagaagccaggaaaaaagaaggcaagaaagatgccaacatgggtcaagagatga

SEQ ID NO: 687 - DNA, 891 bp, Saccharomyces cerevisiae
atgaagctgatcccaattattttgaatgctaagaatctcagtgggatggctggatccatatcaatatgctgttggattgttgtgtttgtaccacagatttatgaaaacttccgaagacagtctgcggagggattatcactgcttttcattgtgttgtggctattaggtgatatatttaacgtcatgggagctatgatgcaaaatttactcccaaccatgataattttagctgcttactatacattggcagatttaattttgttaatacagtgcatgtggtatgacaaggagaagaagagcattttacaagaagtcaagaaaaatgttgatcctgtgcatttgcctccagcaaaccccataaatgagactgtcttacaagacgtttttaatgaatatgagccacttttgccaaggatagaagaagaagatagccaatcgtatagctcgcttgagcttggcagaacaatagtcgtaaaggaaagagagaattttttcaatgacttcttaattgtttcaggtgtacttattgccggaattttgtcatggtatatatcttactgttccggcctagataacggtattcctaaaaaaaaacctgcgttcgaacagattaatttacctgcacaaattttagggtatttaagtgcgatactgtacttgggctctaggatccctcagattgttcttaacttcaaaagaaaatcatgcgaaggagtctcattcctattctttttatttgcatgcttagggaacacttctttcataatctcagtgctctcagcatcttggcttatcggtagcgctggtacgctgttgatggacttcacagtttttattcaatttttcctttacgccaaacctaaatacgagaaaatactaatagataattaa

SEQ ID NO: 688 - DNA, 891 bp, Artificial Sequence
  Description of Artificial Sequence: Synthetic polynucleotide
atgaagttaatcccaattattttgaatgctaagaatctcagtgggatggctggatccatatccatatgctgttggattgttgtgtttgtaccacagatttatgaaaacttcagaagacagtctgcggagggattatctttacttttcattgtgttgtggttgttaggtgatatatttaacgtcatgggagctatgatgcaaaatttactcccaaccatgataattttagctgcttactatacattggcagatttaattttgttaatacagtgcatgtggtatgacaaggagaagaagagcattttacaagaagtcaagaaaaatgttgatcctgtgcatttgcctccagcaaaccccataaatgagactgtcttacaagacgtttttaatgaatatgagccacttttgccaaggatagaagaagaagatagccaaagttatagctctcttgagcttggcagaacaatagtcgtaaaggaaagagagaattttttcaatgacttcttaattgtttctggtgtacttattgccggaattttgtcctggtatatatcttactgttccggcttggataacggtattcctaaaaaaaaacctgcgttcgaacagattaatttacctgcacaaattttagggtatttaagtgcgatattatacttgggctctaggatccctcagattgttcttaacttcaaaagaaaaagttgcgaaggagtctctttccttttctttttatttgcatgcttagggaacacttctttcataatcagtgtgctctctgcatcttggcttatcggtagcgctggtacgttattgatggacttcacagtttttattcaatttttcctttacgccaaacctaaatacgagaaaatattaatagataattga

SEQ ID NO: 689 - DNA, 1830 bp, Saccharomyces cerevisiae
atgtccagcttagccgatacagtagagggtagcgaggccaaacgcggcagattttccaacaatgcattaacctccgatactggtattttacagaaaaatagtacattaagaaactggtttttaaaaccgacagcagacctaaaaaatagttgcgaagatagagttgaagatgacgtcaatgatgtctacttaaatgacaaaaactcacaaaaatctgttgaagaaagaaaactaggaagaaaagttagatcttttttcaaacaaacaaactcaaataaggacgagtctgtgttggaagatgaagatgatgcgttagtttggaagaaaactagcaataagtgtgcaaaaaaggaaaattcccatgacatccaaaaaggaagtttcacaaaaaaaatcagaaacagtattttcaagagtgcaaatgacgtgaaagaattcaggaatgaaaataacttactattgcccgttgaactttcttctgatgatgagaatgagtctcatttcactgatgctaactcacatgttatgcaatcaaaaagtcccgagaaaataccttccaaggatcaatgcttgactaaaggcgctaagaataaaggtctgaaaaaggaatatgaaaaaagttttgaagagtatagcgacgacagtgacgatgaattttctcctgctactccaccggagaatgttcttgaaggtccttacaaatttgtgtttcagacaccaaacacatttacatctcagcctaatataacagtagaaaatgattttcacaaaggtgggagacatgtgattgactatctgaacaaaaaattggctactatgaacattgatattgatttgacttcaggggggaaacaaaacgtatcttgggaggaagagctcgaccaattgagcgaccacgttatagaaagtattactaaccacatttcaaagggtagaatgcacgcacaagagaagcaagatgagttggaaaagttaaaattggagaatttgaacttgtcaacattaaagcaagaaaatctccaacataagcaggaaattaactcattgaaagacaaccttgaatccattagtaaaaaaaacaatgatcttatattggaaatgaacaaattgaaaaaaaaaagtacgaataataaaacaaatgagtacatatctacggatgaaaacgaaaatgaggagattaccaaatccaatatgggtcctggcattttagaactgaacgtcaacgaaacttcaaaaaaattacagcaatccacattcaaaccctcgaaatatcttccaagagaaacgagaaacaatgaaaatagattaaaacacttggaaaagagaatatttggcttagaaaaatctcttgaaaaaaaaaaaaaacaggtaagggctgacagcgttagattagacttgaatagatatactatcgaccagtttttgacattactgaaaagcctcagcgaggttttgcaattccacaatgtttatggcaatgatttgaaggaaaacgacgataatattataaagattgaaacctgctgtagtgcgctaaacatgaaaaattgtttcgaagactcctcatttcgtttacaagaaaacagcttcaagaggcaattgggccctctgttcgcaaacatcaacttctccttaatcgaccaactgacaatgaacttcaggttctacgagagatctgccaatttccagaaggaaacaataggtgggttaagaatgatgctacaagataaggataactatatcaaaacactgatgcaacatttgaagaaaaaagagagtacaaagttgataaaagacagcaagaatggcgcctccaccttaacatcttaa

SEQ ID NO: 690 - DNA, 1830 bp, Artificial Sequence
  Description of Artificial Sequence: Synthetic polynucleotide
atgtccagcttagccgatacagtagagggtagcgaggccaaacgcggcagattttccaacaatgcattaacctccgatactggtattttacagaaaaatagtacattaagaaactggtttttaaaaccgacagcagacttgaaaaatagttgcgaagatagagttgaagatgacgtcaatgatgtctacttaaatgacaaaaactctcaaaaatctgttgaagaaagaaaattaggaagaaaagttagatcttttttcaaacaaacaaacagtaataaggacgagtctgtgttggaagatgaagatgatgcgttagtttggaagaaaactagcaataagtgtgcaaaaaaggaaaattcccatgacatccaaaaaggaagtttcacaaaaaaaatcagaaacagtattttcaagagtgcaaatgacgtgaaagaattcaggaatgaaaataacttattattgcccgttgaactttcttctgatgatgagaatgagtctcatttcactgatgctaactctcatgttatgcaaagtaaaagtcccgagaaaataccttccaaggatcaatgcttgactaaaggcgctaagaataaaggtttgaaaaaggaatatgaaaaaagttttgaagagtatagcgacgacagtgacgatgaattttctcctgctactccaccggagaatgttcttgaaggtccttacaaatttgtgtttcagacaccaaacacatttacatctcagcctaatataacagtagaaaatgattttcacaaaggtgggagacatgtgattgactatttgaacaaaaaattggctactatgaacattgatattgatttgacttctggggggaaacaaaacgtatcttgggaggaagagctcgaccaattgagcgaccacgttatagaaagtattactaaccacatttccaagggtagaatgcacgcacaagagaagcaagatgagttggaaaagttaaaattggagaatttgaacttgagtacattaaagcaagaaaatctccaacataagcaggaaattaactctttgaaagacaaccttgaatccattagtaaaaaaaacaatgatcttatattggaaatgaacaaattgaaaaaaaaaagtacgaataataaaacaaatgagtacatatctacggatgaaaacgaaaatgaggagattaccaaatccaatatgggtcctggcattttagaattgaacgtcaacgaaacttctaaaaaattacagcaatccacattcaaaccctctaaatatcttccaagagaaacgagaaacaatgaaaatagattaaaacacttggaaaagagaatatttggcttagaaaaatctcttgaaaaaaaaaaaaaacaggtaagggctgacagcgttagattagacttgaatagatatactatcgaccagtttttgacattattgaaaagcctcagcgaggttttgcaattccacaatgtttatggcaatgatttgaaggaaaacgacgataatattataaagattgaaacctgctgtagtgcgttgaacatgaaaaattgtttcgaagactcctcttttcgtttacaagaaaacagcttcaagaggcaattgggccctcttttcgcaaacatcaacttctccttaatcgaccaattgacaatgaacttcaggttctacgagagatctgccaatttccagaaggaaacaataggtgggttaagaatgatgttacaagataaggataactatatcaaaacattgatgcaacatttgaagaaaaaagagagtacaaagttgataaaagacagcaagaatggcgcctccaccttaacatcttga

SEQ ID NO: 691 - DNA, 1035 bp, Saccharomyces cerevisiae
atgtcttcttcagtagcctcaaccgaaaacatagtcgaaaatatgttgcatccaaagactacagaaatatacttttcactcaacaatggtgttcgtatcccagcactgggtttggggacagcaaatcctcacgaaaagttagctgaaacaaaacaagccgtaaaagctgcaatcaaagctggatacaggcacattgatactgcttgggcctacgagacagagccattcgtaggtgaagccatcaaggagttattagaagatggatctatcaaaagggaggatcttttcataaccacaaaagtgtggccggttctatgggacgaagtggacagatcattgaatgaatctttgaaagctttaggcttggaatacgtcgacttgctcttgcaacattggccgctatgttttgaaaagattaaggaccctaaggggatcagcggactggtgaagactccggttgatgattctggaaaaacaatgtatgctgccgacggtgactatttagaaacttacaagcaattggaaaaaatttaccttgatcctaacgatcatcgtgtgagagccattggtgtctcaaatttttccattgagtatttggaacgtctcattaaggaatgcagagttaagccaacggtgaaccaagtggaaactcaccctcacttaccacaaatggaactaagaaagttctgctttatgcacgacattctgttaacagcatactcaccattaggttcccatggcgcaccaaacttgaaaatcccactagtgaaaaagcttgccgaaaagtacaatgtcacaggaaatgacttgctaatttcttaccatattagacaaggcactatcgtaattccgagatccttgaatccagttaggatttcctcgagtattgaattcgcatctttgacaaaggatgaattacaagagttgaacgacttcggtgaaaaatacccagtgagattcatcgatgagccatttgcagccatccttccagagtttactggtaacggaccaaacttggacaatttaaagtattaa

SEQ ID NO: 692 - DNA, 1035 bp, Artificial Sequence
  Description of Artificial Sequence: Synthetic polynucleotide
atgtcttcttctgtagccagcaccgaaaacatagtcgaaaatatgttgcatccaaagactacagaaatatacttttctctcaacaatggtgttcgtatcccagcattgggtttggggacagcaaatcctcacgaaaagttagctgaaacaaaacaagccgtaaaagctgcaatcaaagctggatacaggcacattgatactgcttgggcctacgagacagagccattcgtaggtgaagccatcaaggagttattagaagatggatctatcaaaagggaggatcttttcataaccacaaaagtgtggccggttttatgggacgaagtggacagaagtttgaatgaatctttgaaagctttaggcttggaatacgtcgacttgctcttgcaacattggccgttatgttttgaaaagattaaggaccctaaggggatcagcggattggtgaagactccggttgatgattctggaaaaacaatgtatgctgccgacggtgactatttagaaacttacaagcaattggaaaaaatttaccttgatcctaacgatcatcgtgtgagagccattggtgtctccaatttttccattgagtatttggaacgtctcattaaggaatgcagagttaagccaacggtgaaccaagtggaaactcaccctcacttaccacaaatggaattgagaaagttctgctttatgcacgacattttattaacagcatactctccattaggttcccatggcgcaccaaacttgaaaatcccattggtgaaaaagcttgccgaaaagtacaatgtcacaggaaatgacttgttaatttcttaccatattagacaaggcactatcgtaattccgagatccttgaatccagttaggatttcctccagtattgaattcgcatctttgacaaaggatgaattacaagagttgaacgacttcggtgaaaaatacccagtgagattcatcgatgagccatttgcagccatccttccagagtttactggtaacggaccaaacttggacaatttaaagtattga

SEQ ID NO: 693 - DNA, 3285 bp, Saccharomyces cerevisiae
atgaatatggattctggtattacaagtagtcatggaagcatggataagacacaaaagcaaagttctgagtgggcagctaaccagaaacataatcaaagagtcgaaaatacaagagttttaatgggccccgctgtccctgcgatgcctccagtaccatcaaattttccgcctgttccaactggtacaataatgtcgcctcagttgagcccttttccggatcaccgtttaagacatcacccattagctcatatgatgcctgctgataagaattttctggcatataacatggagtctttcaaaagtagagtgactaaagcatgtgattattgtcggaagaggaagattagatgtacggaaatcgagccgatttctggtaaatgtagaaactgtatcaagtataataaagattgcacgtttcatttccatgaagaactgaaaagaaggcgagaagaagctttgaataacaagggaaatgggaagtcggttaagaagccgaggttggataaggagaataagttcaaggatgaaaattttgatatcgccgtgcgatcaagaaatacttcttctacagacagctcgccgaaattacacaccaacttatcacaagaatatattggagtttctgccggcaaaagtgcaagcgataaagaagatacttggcctgactttgttcctattgacaggacagtgcttgaaaaaattgaactcaaccatacgaaggttgctgggaaagtttttgttttggaagagatttgtaaaaacatgaagggaacaatagagaagctagctgaaaaaagcaaaattgacgtcattgataaagaatacatgaaaaggcctaaaagaaagcaatattcaaaggccttgttaacaaaacaaaaaatgtttcattttcgacaaaatgttttatcacatttaactgacgaagaatttctttcgcccattaatgaaatgtttactactactttcaaatattctattttacagaccaagctggtcctggacttctctttccgatccgcatcatcaccatctagtgataatattttgtatcctctgccccgtttagcaattgcaaagcgtttgctcaaaaatataaaatgtccatcattagcctctcttctccacatagtggatgtagatcaatgtttgcaatttgccgacgtgcactttgatcctgctaaaggaagattgacatcatcacaggcatttttgctaaatatctgcctctgccttggggccaccgttacaaattttgaggagaagcaggagctagttgatgaagataatcatgaaacctattattttgagaagttcgaattatggagactcagatctttcacttttctcaattctgtctattactaccataaactgtctgtagcacgcgcagatatgacggcattaaaggcattactgttactggcaaagtttgcccaacaaaaaataagtgcttcatcagcggtcaaagtactatccgttgctatcaaagtggctttggatttacggctcaatttacattccacctatgaggatctagaacttgatgaaatcattaaaagaagacgcttgtggtgttattgtttttcaacagacaaattcttttctgtggtgttgtcaagaccgccctttctcaaggaggaaaacactgatgtattaacagatgaaagctatgttgaactattcagagataaaattctgcccaatctttctataaaatacgatgattcaaaactagaaggggtgaaagatattgtatccgttgtaaacttactcgcgaatcaccttgaatatgtaccatacattcaatcatattttttgtcgagattatccctcatagagtctcaaatatattactcatgtttttccatcagaacaactttagacgatacactagatgaaatcattgaaaatgtactggaaaatcaaaaggcgttagatagaatgcgagacgatttgcccaccatattatcattagaaaattacaaggaaaacatgaggattttatctttggattcttcgaagttagattttgaagtgagttgttgtactactattctattacacctcagatggtaccatcaaaagataaccctgagtttatttgtcatatccatcattggagataacttagatcaacgggaaagttcccggcatgatatagctgaaattattagaaggtcaagattggatttcaagcgaaattgcatcgaagtacttaatattttgaaagattttgaatactaccctactgttcagaatgagtttctgtatttttctctcacaacggttttttccatgtttctgtatttgtcagagattatggttaatgacgaacatgccatggagactggttatataattggattattgagggatacacatacccgtatgcttggatctgaagaacgctgtctttcagtacacaatctgaagtggcaaacatctctttttttttacactttttttctacggagtacgatggaaaagttcaatctgacaagtaaatacgcaaaattctatgcctttgattcaaattattatgagggtgttctcaataggttagttaagcatacgagagaatcaaaagatgatatggtcgagctcttgaaaacttcgttcataaataaagagaagatggctgcatttggtagtttcgttacagaggaccaagaaaaaatggaagtgtccttcaatattttcaatgaaataacaatccaggatttgaacttcttgcaattttcaagcattccgaaattgtgggaaaataaaactcttgagccaggcgaggaatatcatcatagtaatggtaccaatactgataataacgagactactggcgctgatgatactgacgataataataataataataataataataataaaaatggcaataatagtagtagtactattaataataataacaataactacagtaacagtaacaataatgacaatgacaacaatattaatgatgatgatgatgatgatgatgatgatgatgatgatgatgatgatgatgatgatgatgatgacaatgatgatgattatagtaataatggtgctgatgatgatgaagaagacgatgactatgacagatctttatttccaacaggtttagcttcgctgcttgatgcgtcatatcctgaacgtacggcgaatgattatagagatgagaatgaacaatcgaataaattattcgaaaagattgaaggccatttggagcacggtgtttttttttacgatcgggatttcttcttcaagaatgtgtgtgtaaaaatgtaa

SEQ ID NO: 694 - DNA, 3285 bp, Artificial Sequence
  Description of Artificial Sequence: Synthetic polynucleotide
atgaatatggattctggtattacaagtagtcatggaagcatggataagacacaaaagcaaagttctgagtgggcagctaaccagaaacataatcaaagagtcgaaaatacaagagttttaatgggccccgctgtccctgcgatgcctccagtaccatccaattttccgcctgttccaactggtacaataatgtctcctcagttgagcccttttccggatcaccgtttaagacatcacccattagctcatatgatgcctgctgataagaattttttggcatataacatggagtctttcaaaagtagagtgactaaagcatgtgattattgtagaaagaggaagattagatgtacggaaatcgagccgatttctggtaaatgtagaaactgtatcaagtataataaagattgcacgtttcatttccatgaagaattgaaaagaaggagagaagaagctttgaataacaagggaaatgggaagtctgttaagaagccgaggttggataaggagaataagttcaaggatgaaaattttgatatcgccgtgagatctagaaatacttcttctacagacagctctccgaaattacacaccaacttatctcaagaatatattggagtttctgccggcaaaagtgcaagcgataaagaagatacttggcctgactttgttcctattgacaggacagtgcttgaaaaaattgaactcaaccatacgaaggttgctgggaaagtttttgttttggaagagatttgtaaaaacatgaagggaacaatagagaagttggctgaaaaaagcaaaattgacgtcattgataaagaatacatgaaaaggcctaaaagaaagcaatattccaaggccttgttaacaaaacaaaaaatgtttcattttagacaaaatgttttatctcatttaactgacgaagaatttctttctcccattaatgaaatgtttactactactttcaaatattctattttacagaccaagttggtcttggacttctctttcagatccgcatcttctccatctagtgataatattttgtatcctttgccccgtttagcaattgcaaagcgtttgctcaaaaatataaaatgtccatctttagcctctcttctccacatagtggatgtagatcaatgtttgcaatttgccgacgtgcactttgatcctgctaaaggaagattgacatcttctcaggcatttttgttgaatatctgcctctgccttggggccaccgttacaaattttgaggagaagcaggagttagttgatgaagataatcatgaaacctattattttgagaagttcgaattatggagactcagatctttcacttttctcaattctgtctattactaccataaattatctgtagcacgcgcagatatgacggcattaaaggcattattattattggcaaagtttgcccaacaaaaaataagtgcttcttctgcggtcaaagtattgtccgttgctatcaaagtggctttggatttaagactcaatttacattccacctatgaggatttggaacttgatgaaatcattaaaagaagacgcttgtggtgttattgtttttctacagacaaattcttttctgtggtgttgtccagaccgccctttctcaaggaggaaaacactgatgtattaacagatgaaagctatgttgaattattcagagataaaattttgcccaatctttctataaaatacgatgattctaaattagaaggggtgaaagatattgtatccgttgtaaacttactcgcgaatcaccttgaatatgtaccatacattcaaagttattttttgtccagattatccctcatagagtctcaaatatattactcttgtttttccatcagaacaactttagacgatacattagatgaaatcattgaaaatgtattggaaaatcaaaaggcgttagatagaatgagagacgatttgcccaccatattatctttagaaaattacaaggaaaacatgaggattttatctttggattcttccaagttagattttgaagtgagttgttgtactactattttattacacctcagatggtaccatcaaaagataaccttaagtttatttgtcatatccatcattggagataacttagatcaaagagaaagttccagacatgatatagctgaaattattagaaggagcagattggatttcaagagaaattgcatcgaagtacttaatattttgaaagattttgaatactaccctactgttcagaatgagtttttatatttttctctcacaacggttttttccatgtttttatatttgagtgagattatggttaatgacgaacatgccatggagactggttatataattggattattgagggatacacatacccgtatgcttggatctgaagaacgctgtctttctgtacacaatttgaagtggcaaacatctctttttttttacactttttttttaagaagtacgatggaaaagttcaatttgacaagtaaatacgcaaaattctatgcctttgattctaattattatgagggtgttctcaataggttagttaagcatacgagagaaagtaaagatgatatggtcgagctcttgaaaacttctttcataaataaagagaagatggctgcatttggtagtttcgttacagaggaccaagaaaaaatggaagtgtccttcaatattttcaatgaaataacaatccaggatttgaacttcttgcaattttctagcattccgaaattgtgggaaaataaaactcttgagccaggcgaggaatatcatcatagtaatggtaccaatactgataataacgagactactggcgctgatgatactgacgataataataataataataataataataataaaaatggcaataatagtagtagtactattaataataataacaataactacagtaacagtaacaataatgacaatgacaacaatattaatgatgatgatgatgatgatgatgatgatgatgatgatgatgatgatgatgatgatgatgatgacaatgatgatgattatagtaataatggtgctgatgatgatgaagaagacgatgactatgacagatctttatttccaacaggtttagcttctttacttgatgcgtcttatcctgaacgtacggcgaatgattatagagatgagaatgaacaaagcaataaattattcgaaaagattgaaggccatttggagcacggtgtttttttttacgatagagatttcttcttcaagaatgtgtgtgtaaaaatgtga

SEQ ID NO: 695 - DNA, 951 bp, Saccharomyces cerevisiae
atggcttttttgaatattttcaagcaaaaacgtggtgatgaagcttcacaactgagcgcaaagggacgggaggaaatttctcaatcgattaagatatgcaaaagtgacgatgctgctaacgaacatagctgctctggtgattgcaaaacagaaattgaagaaggagagcaggcctttgcgaaactaaagatcgaacatgaaactcctttgttgaactcttctaaaacgccaaaaattcacttcgttgtccccacctctcaaatcgattggcagcatgatgcctgcctcgaggacccaaagtcagtacagtataaaatttcccagtggtgtgataagaattcagctaaattttccaacgtgggcacaggcaagacactaaactgtgcagtttcatctttacctaaagatatcatggatattgatgttatgcggggaaccaagaataatgtacttattttgccttacttcatttggctgaacgaccttagatcagatgacgtcgaagcaacgctggatggtttagttcctgacttattagacgagaatatttcaagagagaaattgctagaaacacgaccaaatgttgccgttgcacgtgaacgtgcatttgtatttatatgttcacatactacgagggataaacgatgcgggattacggcaccctatttaaagaaagtttttgacagtaaattacaggaacatgggctgtatagggacaattcggattacagggcagagggtgtcaaaattgcatttgttaatcatgttggtggtcacaaatttgctgcaaatgttcaaatttatttacgaaatccaaataccttaatttggttgggaagagtaactccaaccatagttccttctattgtcgaacatctgattgttcctgaagaaccaacgttgccgtttcccgaaaaagttcgctgtattaagaaatatcaaagctggtaa

SEQ ID NO: 696 - DNA, 951 bp, Artificial Sequence
  Description of Artificial Sequence: Synthetic polynucleotide
atggcttttttgaatattttcaagcaaaaacgtggtgatgaagcttctcaattgagcgcaaagggaagagaggaaatttctcaatctattaagatatgcaaaagtgacgatgctgctaacgaacatagctgctctggtgattgcaaaacagaaattgaagaaggagagcaggcctttgcgaaattgaagatcgaacatgaaactcctttgttgaactcttctaaaacgccaaaaattcacttcgttgtccccacctctcaaatcgattggcagcatgatgcctgcctcgaggacccaaagagtgtacagtataaaatttcccagtggtgtgataagaattctgctaaattttccaacgtgggcacaggcaagacattgaactgtgcagtttcttctttacctaaagatatcatggatattgatgttatgagaggaaccaagaataatgtacttattttgccttacttcatttggttgaacgaccttagaagtgatgacgtcgaagcaacgttagatggtttagttcctgacttattagacgagaatatttctagagagaaattgttggaaacaagaccaaatgttgccgttgcacgtgaacgtgcatttgtatttatatgttctcatactacgagggataaaagatgcgggattacggcaccctatttaaagaaagtttttgacagtaaattacaggaacatgggttatatagggacaattctgattacagggcagagggtgtcaaaattgcatttgttaatcatgttggtggtcacaaatttgctgcaaatgttcaaatttatttaagaaatccaaataccttaatttggttgggaagagtaactccaaccatagttccttctattgtcgaacatttgattgttcctgaagaaccaacgttgccgtttcccgaaaaagttcgctgtattaagaaatatcaaagctggtga

SEQ ID NO: 697 - DNA, 876 bp, Saccharomyces cerevisiae
atgagttttagacatttcaagaggagacttgacacaagctcagcagatgaaagctcttcggcggatgaagagcatccagaccaaaacgtatctctaacagaaaaatcagcctcattaagccatagtgatttgggcggcgaaattttaaatggtacaggaaagaaccgcacccccaatgatggccaagaatcaaatgaaagtgatgggagtcccgaaagtgatgagagtcccgaaagtgaagaaagtagcgacaacagtgattcgagcgatagtgacgatatgagacctttaccgaggccattatttatgaagaaaaaggccaataatttgcagaaagctaccaagatagatcaaccctggaatgcccaagatgacgcacgagttctgcaaacaaagaaggaaaatatgataaaaaacatcgacaaagctaatcaagtggcaaagaactacgaaacgatgaagctgagacttaacaccaattacagcaccaacgaagaattgatcaagcagtgcttgctcttagatgataacgatgaagtcgattcagaaaaggagagacagaaatggtttgaaaggcagaacgaacgaaagcaaaagcatagaagaatacaacttgcgaaacaaagagaatcagaagaatatgaggcaaaacgatttgaagcgatgcaaaaaggcaaagatgggaataccaaatacgacgttatcttggacaaggagaaagagaaacttgatcacaaaaaacaaagatcggctgaaaaagtagaaaaatctcacaataacaaccgttacaagattacaagaactaaaaatgttgaatttggtgacctaggcaagaatagtagagattacgaagaaactgaatattcggttatataa

SEQ ID NO: 698 - DNA, 876 bp, Artificial Sequence
  Description of Artificial Sequence: Synthetic polynucleotide
atgagttttagacatttcaagaggagacttgacacaagcagcgcagatgaaagctcttctgcggatgaagagcatccagaccaaaacgtatctttaacagaaaaaagtgcctctttaagccatagtgatttgggcggcgaaattttaaatggtacaggaaagaaccgcacccccaatgatggccaagaaagtaatgaaagtgatgggagtcccgaaagtgatgagagtcccgaaagtgaagaaagtagcgacaacagtgattctagcgatagtgacgatatgagacctttaccgaggccattatttatgaagaaaaaggccaataatttgcagaaagctaccaagatagatcaaccctggaatgcccaagatgacgcaagagttttgcaaacaaagaaggaaaatatgataaaaaacatcgacaaagctaatcaagtggcaaagaactacgaaacgatgaagttgagacttaacaccaattacagcaccaacgaagaattgatcaagcagtgcttgctcttagatgataacgatgaagtcgattctgaaaaggagagacagaaatggtttgaaaggcagaacgaaagaaagcaaaagcatagaagaatacaacttgcgaaacaaagagaaagtgaagaatatgaggcaaaaagatttgaagcgatgcaaaaaggcaaagatgggaataccaaatacgacgttatcttggacaaggagaaagagaaacttgatcacaaaaaacaaagatctgctgaaaaagtagaaaaatctcacaataacaaccgttacaagattacaagaactaaaaatgttgaatttggtgacttgggcaagaatagtagagattacgaagaaactgaatattctgttatatga

SEQ ID NO: 699 - DNA, 735 bp, Saccharomyces cerevisiae
atgtctttgacaccactgtgtgaagatttaccacaatttctgcaaaactatctaccgaatgctggtcaaacggaaaataccattgtgccctttgtcacactaacttatgctcaatcgctcgacgcgagagtatctaggggccctggagtgaggactacaatttcacatcccgagaccaaaacaatgacgcattatttgagacatcatcacgatggaatactcgtaggaagtggaacagtgctagctgataatcctggattgaattgtaaatggggtcccgatccggctgcaaattccccaaggccaataataatagatacaaagcaaaagtggcgatttgatggttcaaaaatgcaagaactttttattaaacgacagggtaagccgccaatcgttgttgtcacaagtgagcccattataaaagaacaacatgtagactacgcaatttgtccaataaatgatactacgaaattggtcgattggaagaaattgtttgagatattaaaagaagaattcaatataaggtcagtaatggttgaaggaggtgccaatgtaataaatcagttgttgctgaggagcgatattgtcaacagtcttataataactattggatcaacatttctgggtagctcaggcaccgaagttagcccaccccaaacagtaaatttaaaggatatgtcatggtggaagggcattaccgatgtggtgctttgtgcgagactggccgatgactaa

SEQ ID NO: 700 - DNA, 735 bp, Artificial Sequence
  Description of Artificial Sequence: Synthetic polynucleotide
atgtctttgacaccattatgtgaagatttaccacaatttttgcaaaactatttaccgaatgctggtcaaacggaaaataccattgtgccctttgtcacattgacttatgctcaatctctcgacgcgagagtatctaggggccctggagtgaggactacaatttctcatcccgagaccaaaacaatgacgcattatttgagacatcatcacgatggaatactcgtaggaagtggaacagtgttggctgataatcctggattgaattgtaaatggggtcccgatccggctgcaaattccccaaggccaataataatagatacaaagcaaaagtggagatttgatggttccaaaatgcaagaactttttattaaaagacagggtaagccgccaatcgttgttgtcacaagtgagcccattataaaagaacaacatgtagactacgcaatttgtccaataaatgatactacgaaattggtcgattggaagaaattgtttgagatattaaaagaagaattcaatataaggtctgtaatggttgaaggaggtgccaatgtaataaatcagttgttgttgaggagcgatattgtcaacagtcttataataactattggaagtacatttttaggtagcagtggcaccgaagttagcccaccccaaacagtaaatttaaaggatatgtcttggtggaagggcattaccgatgtggtgctttgtgcgagattggccgatgactga

SEQ ID NO: 701 - DNA, 648 bp, Saccharomyces cerevisiae
atggaccaagaaaatgaaagaaacatctcaagattatggagagcattcagaacagtaaaagaaatggttaaggacaggggttattttatcactcaagaggaagtcgaattgccattggaagatttcaaggccaagtattgtgactccatgggcagaccacaacgtaaaatgatgtccttccaggcaaatccaacagaagaatctatatcaaagttcccagacatgggctccttatgggtagaattttgtgatgagccttccgttggtgtaaagacaatgaagacttttgttatacatattcaagaaaaaaatttccaaacaggtatctttgtttaccaaaataatattacaccaagtgcaatgaaattggtgccttctataccaccagccaccattgaaacttttaatgaagctgccttagtggttaatattactcaccacgaattggttccaaagcatatcagattgagtagtgatgagaaaagagagcttttaaaaaggtatagattgaaggaatcccaattgccaagaattcaaagagctgatcctgtagccttatacttgggattgaaaagaggcgaagtagttaaaatcataagaaaaagtgaaacctctggtcgttatgccagttacagaatctgtatgtag

SEQ ID NO: 702 - DNA, 648 bp, Artificial Sequence
  Description of Artificial Sequence: Synthetic polynucleotide
atggaccaagaaaatgaaagaaacatctccagattatggagagcattcagaacagtaaaagaaatggttaaggacaggggttattttatcactcaagaggaagtcgaattgccattggaagatttcaaggccaagtattgtgactccatgggcagaccacaacgtaaaatgatgtccttccaggcaaatccaacagaagaatctatatccaagttcccagacatgggctccttatgggtagaattttgtgatgagccttccgttggtgtaaagacaatgaagacttttgttatacatattcaagaaaaaaatttccaaacaggtatctttgtttaccaaaataatattacaccaagtgcaatgaaattggtgccttctataccaccagccaccattgaaacttttaatgaagctgccttagtggttaatattactcaccacgaattggttccaaagcatatcagattgagtagtgatgagaaaagagagcttttaaaaaggtatagattgaaggaatcccaattgccaagaattcaaagagctgatcctgtagccttatacttgggattgaaaagaggcgaagtagttaaaatcataagaaaaagtgaaacctctggtcgttatgccagttacagaatctgtatgtga

SEQ ID NO: 703 - DNA, 1158 bp, Saccharomyces cerevisiae
atgagctccgttaacgcaaatggaggatataccaaaccacaaaaatatgtgccagggccaggtgatcctgaacttccaccccaactatccgaatttaaagataaaacatcggatgaaatcttgaaagaaatgaacagaatgccttttttcatgaccaagttggatgaaacagacggtgcaggtggtgaaaacgtggagttagaagctttaaaggcattagcttatgaaggcgaaccacacgaaatcgctgaaaatttcaagaagcaaggtaacgaactatacaaagcaaaaagattcaaggatgcaagggaactttactcaaagggcttggctgtagaatgcgaagataaatcaataaatgagtcactatatgccaatagagcggcatgtgagttagagctgaaaaattacaggaggtgtatcgaggactgcagtaaagctctaactattaaccccaagaatgttaagtgctactatcgtacaagcaaggcttttttccaattaaacaagttggaggaggccaaatcagccgcaacatttgccaatcaaaggattgacccagagaacaaatcaattttgaatatgttatcagtgattgatagaaaagaacaagaattgaaagcaaaagaagaaaaacagcaaagagaagctcaggaacgtgaaaacaagaaaattatgttagagagcgcaatgacgctgagaaacataactaacatcaaaactcactctccagtagagttacttaatgagggtaaaataaggctagaagacccaatggattttgaatctcaattgatctatcccgcattaattatgtaccccacgcaagatgaatttgattttgtaggtgaagtaagtgagttaactactgtgcaagaacttgttgacctagttttggaagggccgcaagaacgcttcaaaaaagaaggtaaggaaaacttcacaccaaagaaagtgttggtgttcatggaaacaaaggcaggtggtttgattaaagctggtaagaaactgacatttcacgatatcttgaagaaagagtcgccagatgtaccattgttcgataacgctttgaaaatatatattgtgccaaaggtagaaagtgaagggtggatttccaagtgggataagcaaaaagccttagaaagaagatctgtgtga

SEQ ID NO: 704 - DNA, 1158 bp, Artificial Sequence
  Description of Artificial Sequence: Synthetic polynucleotide
atgagctccgttaacgcaaatggaggatataccaaaccacaaaaatatgtgccagggccaggtgatcctgaacttccaccccaattatccgaatttaaagataaaacatctgatgaaatcttgaaagaaatgaacagaatgccttttttcatgaccaagttggatgaaacagacggtgcaggtggtgaaaacgtggagttagaagctttaaaggcattagcttatgaaggcgaaccacacgaaatcgctgaaaatttcaagaagcaaggtaacgaattatacaaagcaaaaagattcaaggatgcaagggaactttactccaagggcttggctgtagaatgcgaagataaatctataaatgagtctttgtatgccaatagagcggcatgtgagttagagttgaaaaattacaggaggtgtatcgaggactgcagtaaagctttgactattaaccccaagaatgttaagtgctactatcgtacaagcaaggcttttttccaattaaacaagttggaggaggccaaaagtgccgcaacatttgccaatcaaaggattgacccagagaacaaatccattttgaatatgttatctgtgattgatagaaaagaacaagaattgaaagcaaaagaagaaaaacagcaaagagaagctcaggaacgtgaaaacaagaaaattatgttagagagcgcaatgacgttgagaaacataactaacatcaaaactcactctccagtagagttacttaatgagggtaaaataaggttagaagacccaatggattttgaatctcaattgatctatcccgcattaattatgtaccccacgcaagatgaatttgattttgtaggtgaagtaagtgagttaactactgtgcaagaacttgttgacttggttttggaagggccgcaagaacgcttcaaaaaagaaggtaaggaaaacttcacaccaaagaaagtgttggtgttcatggaaacaaaggcaggtggtttgattaaagctggtaagaaattaacatttcacgatatcttgaagaaagagtctccagatgtaccattgttcgataacgctttgaaaatatatattgtgccaaaggtagaaagtgaagggtggatttccaagtgggataagcaaaaagccttagaaagaagatctgtgtga

SEQ ID NO: 705 - DNA, 2097 bp, Saccharomyces cerevisiae
atggactgggcaatcaaagcagctaggaagaaaactcaaaggaagccaggctctacccgttcaatcatagaaaccctcgatgatctaaataatctaacaacagatgcacattcagaaataaatcaacgattgtacgaaagtagtgaatggttaagaaataatgtttatatgaatacactcaagtatgaagacaaaaagatggaagagtctttaattagccccgaaaatacgcataacaaaatggatgtcgaatttcctaaaatgaaaggagaatatgaactttctaactcccagaatgatgccgcaaaagacgttactaagacacccagaaatggattacataacgataaaagtatcacgcctaaatcactccgcaggaaggaagtcaccgaaggaatgaatagatttagtatacatgataccaataaaagcccggttgagccattgaatagcgttaaagtcgacgccaatgaaagcgaaaaatcctcaccatggtcaccttacaaagttgaaaaggttctaagagaatcctccaagacttcggagtctccgattaatacaaaacgcttcgataatcaaacatgggcggctaaggaagaaatggagaatgaacctatacttcaagctttaaagaaagctgaatcagtaaaggtgaaaccaccaccgaattctgggatagcgagatctcaaagaaggtcgaatatgtttgttccactgccgaataaagatcctcttattattcaacacattccaccaacaaaatcttcaggatcaataccaaaagtacgaacagtaaaggaatcaccaatcgcatttaaaaaaaaatctacgataaatagtcctgctataagagctgtggaaaacagtgataccgcgggatctacaaaagcatccagtgttttcgataggctatcatctattccaacaaaatcatttgaaaacaaaatttcccgtggaaacgttggtcacaaatactcctcttcatcaatcgatttaacaggctcccccatgaaaaaagtttctcaaaagtttaagtcaataaactccacggatactgatatgcaagaagcgttaagagatatattctcagtaaaaaataaaataaccaaaaataattcacccaaaggaaaaaactctcgaaaatcctctattccgaggtttgataagacttctttgaagctaacgacacacaaaaagctagcaatcattgcagaacagaaaaagaagtccaaacactctagtgatgttcataaaactggttcaagaccgcacagtatttctccaacaaaaataagtgtcgattcaagctcgccatctaaagaagttaaaaattattaccaaagccctgtaagaggttatttgagaccaacaaaagcgtctatttcgcctaataaaaataaaaatttaacaacgtcgcaaacgccacatcgtttgaaaattaaagagaaaacattaagaaaactttctccgaatattgctgacatctccaagccagagtctcgtaaatccaaaaattatcggcttacaaaccttcaattacttccaccagcagaggcagaacgagatgacttaaaaaaaaagtttgataaaaggttatcaggaattatgaggtctcaacaggaacatcatcggcgtaaacaagagaaacaaaaaaggatgtcgcatttggaacaagatctaaaaaagcaaacaagctttagtaatgactacaaggacatacgtctaaaagaatctttggctcctttcgataatcatgtgcgagataccatcaacaaaaatactgcatttagtaccgacaatatattggccacaataaatacagttgaccatcgagaaataatcggaaatgtgaccccaaagatagcctctgtcaatgattctttaccagagataaatactgattctgaagatgaggctagcgtaactttagcggcatgggctaaatccccgtatttgcaagagcaattgataagacagcaagatataaatccacaaactatctttggaccaattccgcctttgcacaccgatgaaattttcccaaatcctaggctaaacaggttgaaaccgcgtcaaattgtgcccaaaaggtcttga

SEQ ID NO: 706 - DNA, 2097 bp, Artificial Sequence
  Description of Artificial Sequence: Synthetic polynucleotide
atggactgggcaatcaaagcagctaggaagaaaactcaaaggaagccaggctctacccgttccatcatagaaaccctcgatgatttgaataatttgacaacagatgcacattctgaaataaatcaaagattgtacgaaagtagtgaatggttaagaaataatgtttatatgaatacactcaagtatgaagacaaaaagatggaagagtctttaattagccccgaaaatacgcataacaaaatggatgtcgaatttcctaaaatgaaaggagaatatgaactttctaactcccagaatgatgccgcaaaagacgttactaagacacccagaaatggattacataacgataaaagtatcacgcctaaatctctccgcaggaaggaagtcaccgaaggaatgaatagatttagtatacatgataccaataaaagcccggttgagccattgaatagcgttaaagtcgacgccaatgaaagcgaaaaatcctctccatggtctccttacaaagttgaaaaggttttgagagaatcctccaagacttccgagtctccgattaatacaaaacgcttcgataatcaaacatgggcggctaaggaagaaatggagaatgaacctatacttcaagctttaaagaaagctgaaagtgtaaaggtgaaaccaccaccgaattctgggatagcgagatctcaaagaaggtctaatatgtttgttccattaccgaataaagatcctcttattattcaacacattccaccaacaaaatcttctggatccataccaaaagtaagaacagtaaaggaatctccaatcgcatttaaaaaaaaatctacgataaatagtcctgctataagagctgtggaaaacagtgataccgcgggatctacaaaagcatccagtgttttcgataggttatcttctattccaacaaaaagttttgaaaacaaaatttcccgtggaaacgttggtcacaaatactcctcttcttctatcgatttaacaggctcccccatgaaaaaagtttctcaaaagtttaagagtataaactccacggatactgatatgcaagaagcgttaagagatatattcagtgtaaaaaataaaataaccaaaaataattctcccaaaggaaaaaactctagaaaatcctctattccgaggtttgataagacttctttgaagttgacgacacacaaaaagttagcaatcattgcagaacagaaaaagaagtccaaacactctagtgatgttcataaaactggttccagaccgcacagtatttctccaacaaaaataagtgtcgattctagctctccatctaaagaagttaaaaattattaccaaagccctgtaagaggttatttgagaccaacaaaagcgtctatttctcctaataaaaataaaaatttaacaacgtctcaaacgccacatcgtttgaaaattaaagagaaaacattaagaaaactttctccgaatattgctgacatctccaagccagagtctcgtaaatccaaaaattatagacttacaaaccttcaattacttccaccagcagaggcagaaagagatgacttaaaaaaaaagtttgataaaaggttatctggaattatgaggtctcaacaggaacatcatcgtcgtaaacaagagaaacaaaaaaggatgtcccatttggaacaagatttgaaaaagcaaacaagctttagtaatgactacaaggacatacgtttgaaagaatctttggctcctttcgataatcatgtgagagataccatcaacaaaaatactgcatttagtaccgacaatatattggccacaataaatacagttgaccatagagaaataatcggaaatgtgaccccaaagatagcctctgtcaatgattctttaccagagataaatactgattctgaagatgaggctagcgtaactttagcggcatgggctaaatccccgtatttgcaagagcaattgataagacagcaagatataaatccacaaactatctttggaccaattccgcctttgcacaccgatgaaattttcccaaatcctaggttaaacaggttgaaaccgcgtcaaattgtgcccaaaaggtcttga

SEQ ID NO: 707 - DNA, 768 bp, Saccharomyces cerevisiae
atgggcaaatttgagcaaaaagaaagagaaagaataagcacatttagttttcctactacgggcagtcaatctagtacatccattaaatcacttggcagcccactctatggacgtttcagctctctctcttcaacagaatctcagttcgatagcagcaaacaaccccatgagtacgaaaagagcttttattttgaagagtctcaaggcgaagctctgttcaacaagctgaagacctactctttccctggagacaaggatggtgtgaaaacgaggagaaattcctccatatgtccaagaaagcctaatgcggtatcacctttaagggtagaaagtaatgaattatcatcacattcgcattcacgttcattatcacacgaacttacaaagccttcagggcgaaggaaaagttaccacagaaaaagtcatgcaatctcattcagcaggtcttgtaagccaaatttcattgacgggtacgattctaattcaagcataggcgtcaattcaagaaaaacttcattggcaagttctttcttggacaaagaatatcattcttcaccggatacttcatatacccaccaaatgtccccgaaaaacacaatcatgaataccaatgaacaattaagaagaaacgcaagcggtagattcgggagtttgaaagaattcgctgaaaaaaatcagataaatattgagggcaaaatttttgctcataaagtggaaactggagacatattgcaaccactaattgacttagatattgacaataaatga

SEQ ID NO: 708 - DNA, 768 bp, Artificial Sequence
  Description of Artificial Sequence: Synthetic polynucleotide
atgggcaaatttgagcaaaaagaaagagaaagaataagcacatttagttttcctactacgggcagtcaatctagtacatccattaaatctcttggcagcccactctatggacgtttcagctctctctcttctacagaatctcagttcgatagcagcaaacaaccccatgagtacgaaaagagcttttattttgaagagtctcaaggcgaagctttattcaacaagttgaagacctactctttccctggagacaaggatggtgtgaaaacgaggagaaattcctccatatgtccaagaaagcctaatgcggtatctcctttaagggtagaaagtaatgaattatcttctcattctcattctcgttccttatcccacgaacttacaaagccttctgggagaaggaaaagttaccacagaaaaagtcatgcaatctctttcagcaggtcttgtaagccaaatttcattgacgggtacgattctaatagtagcataggcgtcaattctagaaaaacttctttggcaagttctttcttggacaaagaatatcattcttctccggatacttcttatacccaccaaatgtccccgaaaaacacaatcatgaataccaatgaacaattaagaagaaacgcaagcggtagattcgggagtttgaaagaattcgctgaaaaaaatcagataaatattgagggcaaaatttttgctcataaagtggaaactggagacatattgcaaccattgattgacttagatattgacaataaatga

SEQ ID NO: 709 - DNA, 1650 bp, Saccharomyces cerevisiae
atgaaactagaacgcgtaagcagcaatggctccttcaaaagaggtagagatatccagtcacttgaatctccgtgtactagaccgctgaaaaaaatgtcacctagtccatctttcacatctcttaaaatggagaagcctttcaaagatattgtaaggaagtatggaggtcatcttcatcaaagtagttacaatcccggctcaagcaaagtggagttagtaagaccagatttgtctttaaaaacagatcaaagttttcttcaaagtagtgtgcaaactacgcctaataagaaaagctgcaatgagtatctttcaactccagaggccacaccattaaaaaatacggctacagaaaatgcatgggcaacctctcgagttgtttctgcatccagtctttctatagtgacaccaacggaaattaaaaacattcttgttgatgaattctctgaattgaagttagggcaacctttgactgctcaacatcagcgaagtcatgcggtctttgaaattcctgagattgtggaaaatatcataaaaatgatagtttctctagaatctgcaaatataccaaaggaaagaccatgcttaagaagaaatccacaatcttatgagcactctctgcttatgtacaaagacgaagagagagcaaaaaaagcatggtcagcagcccagcagctacgagacccaccattagtcggacacaaggagaagaagcaaggggccttatttagttgtatgatggttaacaggttatggcttaacgtaacaaggccttttcttttcaaaagcttgcactttaagagcgtccataattttaaggagtttttacgaacttcccaggagacgacacaagtaatgagaccgtctcattttatattgcacaaattacatcaagtaacacaaccagatatagaaaggctttccagaatggagtgtcaaaatttgaaatggttagaattttacgtttgccctagaataactcccccattaagctggtttgataacctccataaacttgaaaagcttattattccaggcaataaaaacatagatgataactttttactcagactatcacagagcataccaaatttaaagcacttagttttaagagcatgtgataatgtcagtgattcaggtgttgtttgcattgctttgaattgcccgaaattaaaaacatttaacattggcagacataggcgtggaaatttaattacgagtgtctcactggtcgcgctaggcaaatacacacaggtggaaactgtggggtttgccggttgtgatgttgatgatgccggtatttgggaatttgctcgattaaatggcaaaaatgttgaaagattgtctttaaattcctgtcgtcttttgactgattactctctacccattctttttgctttaaactcatttccaaatctggctgttttagagatcagaaatttagataaaataactgatgtgaggcatttcgtgaagtacaacttgtggaaaaaatcattggatgcccccattctaatcgaagcatgtgaacgtattacgaaactaatcgatcaagaagaaaatagagttaagaggattaactccttggttgccttaaaagatatgacagcttgggttaatgcagacgacgaaatagagaataatgtggactag

SEQ ID NO: 710 - DNA, 1650 bp, Artificial Sequence
  Description of Artificial Sequence: Synthetic polynucleotide
atgaaattagaacgcgtaagcagcaatggctccttcaaaagaggtagagatatccagtctcttgaatctccgtgtactagaccgttaaaaaaaatgtctcctagtccatctttcacatctcttaaaatggagaagcctttcaaagatattgtaaggaagtatggaggtcatcttcatcaaagtagttacaatcccggcagtagcaaagtggagttagtaagaccagatttgtctttaaaaacagatcaaagttttcttcaaagtagtgtgcaaactacgcctaataagaaaagctgcaatgagtatctttctactccagaggccacaccattaaaaaatacggctacagaaaatgcatgggcaacctctagagttgtttctgcatccagtctttctatagtgacaccaacggaaattaaaaacattcttgttgatgaattctctgaattgaagttagggcaacctttgactgctcaacatcagagaagtcatgcggtctttgaaattcctgagattgtggaaaatatcataaaaatgatagtttctttggaatctgcaaatataccaaaggaaagaccatgcttaagaagaaatccacaatcttatgagcactctttacttatgtacaaagacgaagagagagcaaaaaaagcatggtctgcagcccagcagttaagagacccaccattagtcggacacaaggagaagaagcaaggggccttatttagttgtatgatggttaacaggttatggcttaacgtaacaaggccttttcttttcaaaagcttgcactttaagagcgtccataattttaaggagtttttaagaacttcccaggagacgacacaagtaatgagaccgtctcattttatattgcacaaattacatcaagtaacacaaccagatatagaaaggctttccagaatggagtgtcaaaatttgaaatggttagaattttacgtttgccctagaataactcccccattaagctggtttgataacctccataaacttgaaaagcttattattccaggcaataaaaacatagatgataactttttactcagattatctcagagcataccaaatttaaagcacttagttttaagagcatgtgataatgtcagtgattctggtgttgtttgcattgctttgaattgcccgaaattaaaaacatttaacattggcagacataggcgtggaaatttaattacgagtgtctctttggtcgcgttgggcaaatacacacaggtggaaactgtggggtttgccggttgtgatgttgatgatgccggtatttgggaatttgctagattaaatggcaaaaatgttgaaagattgtctttaaattcctgtcgtcttttgactgattactctttacccattctttttgctttaaactcttttccaaatttggctgttttagagatcagaaatttagataaaataactgatgtgaggcatttcgtgaagtacaacttgtggaaaaaatctttggatgcccccattttgatcgaagcatgtgaacgtattacgaaattaatcgatcaagaagaaaatagagttaagaggattaactccttggttgccttaaaagatatgacagcttgggttaatgcagacgacgaaatagagaataatgtggactga

SEQ ID NO: 711 - DNA, 1044 bp, Saccharomyces cerevisiae
atgacttttatgcaacagcttcaagaggctggggaaagatttaggtgtatcaatggtcttttatgggttgtttttgggcttggtgtcttaaaatgtacaacgttatcacttagatttttagctcttatttttgatctttttttactaccagcagtcaatttcgacaagtatggtgctaaaactggtaaatactgtgctatcactggtgcaagtgacggtattggtaaagaatttgctagacaaatggcgaaacgtggcttcaacttggtattgatctcgagaacgcaatctaaattggaggctttacaaaaagaactagaagatcaacatcatgtcgttgtaaagattctagccattgacattgcggaggataaagaatccaactatgaatccattaaggaattgtgtgcgcagttaccaatcaccgttttggtcaataatgttggtcaatcacactccattcctgttccatttttggaaacagaagagaaggagcttagaaatattatcactatcaataacactgctacattattaattacacaaatcattgcaccaaagattgtggaaactgtgaaagctgaaaacaagaagtcgggtactcgtggtttgatcttaaccatgggctcatttggtggtctgattcccaccccacttttggctacatacagtggttcgaaatcattcttacaaggttggtctaactctttggctggggaattatctaaagatgctatcgatgttgaattaatcatttcatatttggtcactagctcgatgtctaaaatcagaagatcatctttaatgatcccaaatccacaacagtttgtaaaatccactttaagaagcgttggcagacgctgcggctctcaagaaagatacgctactatgaccccttactgggcgcacgcagtgtatcaatttgtaattacagagacctttggcgtttactctaagattgttaactccattaattattccttccataaatctatcagaattagagccttaaaaaaagccgcaagacaggttaaaaaggaatag

SEQ ID NO: 712 - DNA, 1044 bp, Artificial Sequence
  Description of Artificial Sequence: Synthetic polynucleotide
atgacttttatgcaacagcttcaagaggctggggaaagatttaggtgtatcaatggtcttttatgggttgtttttgggcttggtgtcttaaaatgtacaacgttatctcttagatttttagctcttatttttgatctttttttattaccagcagtcaatttcgacaagtatggtgctaaaactggtaaatactgtgctatcactggtgcaagtgacggtattggtaaagaatttgctagacaaatggcgaaacgtggcttcaacttggtattgatctccagaacgcaatctaaattggaggctttacaaaaagaattggaagatcaacatcatgtcgttgtaaagattttagccattgacattgcggaggataaagaatccaactatgaatccattaaggaattgtgtgcgcagttaccaatcaccgttttggtcaataatgttggtcaatctcactccattcctgttccatttttggaaacagaagagaaggagcttagaaatattatcactatcaataacactgctacattattaattacacaaatcattgcaccaaagattgtggaaactgtgaaagctgaaaacaagaagtctggtactcgtggtttgatcttaaccatgggctcttttggtggtttgattcccaccccacttttggctacatacagtggttccaaatctttcttacaaggttggtctaactctttggctggggaattatctaaagatgctatcgatgttgaattaatcatttcttatttggtcactagcagtatgtctaaaatcagaagatcttctttaatgatcccaaatccacaacagtttgtaaaatccactttaagaagcgttggcagacgctgcggctctcaagaaagatacgctactatgaccccttactgggcgcacgcagtgtatcaatttgtaattacagagacctttggcgtttactctaagattgttaactccattaattattccttccataaatctatcagaattagagccttaaaaaaagccgcaagacaggttaaaaaggaatga

SEQ ID NO: 713 - DNA, 897 bp, Saccharomyces cerevisiae
atgagcggtgaattagcaaattacaaaagacttgagaaagtcggtgaaggtacatacggtgttgtttataaagcgttagacttaagacctggccaaggtcaaagagtagtcgcattgaagaaaataagactagagagtgaagacgagggtgttcccagtacagccatcagagaaatctcattattgaaggaattaaaagacgataatattgtcagattatacgatattgttcactctgatgcacacaagctatatcttgtttttgagttcctcgatttggacctgaaaagatatatggagggtattccaaaggaccaaccgttaggagctgatattgttaagaagtttatgatgcaactttgtaagggtattgcatactgccactcacaccgtattctgcatcgtgatttaaaaccgcagaacttattgattaacaaagatgggaatctaaaactaggtgattttggcttagcgcgtgcttttggtgttccgttgagagcttacacacatgaaattgttactctatggtatagagctccggaggtattactgggtggaaaacaatatagtacaggtgtcgatacatggtccatcggctgtatatttgccgaaatgtgtaacaggaaaccaatcttcagtggcgatagtgagatcgatcagattttcaagatattcagagtattgggaacgccgaatgaagctatatggccagatattgtctacttgcctgatttcaagccaagctttcctcaatggcgcagaaaagacctatcacaagtggtaccaagtctagatccacgcggtattgatttgttggacaaactcctcgcgtatgaccctattaaccggattagcgccagaagagcagccatccacccctacttccaagaatcataa

SEQ ID NO: 714 - DNA, 897 bp, Artificial Sequence
  Description of Artificial Sequence: Synthetic polynucleotide
atgagcggtgaattagcaaattacaaaagacttgagaaagtcggtgaaggtacatacggtgttgtttataaagcgttagacttaagacctggccaaggtcaaagagtagtcgcattgaagaaaataagattggagagtgaagacgagggtgttcccagtacagccatcagagaaatctctttattgaaggaattaaaagacgataatattgtcagattatacgatattgttcactctgatgcacacaagctttatcttgtttttgagttcctcgatttggacttgaaaagatatatggagggtattccaaaggaccaaccgttaggagctgatattgttaagaagtttatgatgcaactttgtaagggtattgcatactgccactctcaccgtattttgcatcgtgatttaaaaccgcagaacttattgattaacaaagatgggaatttgaaattgggtgattttggcttagcgcgtgcttttggtgttccgttgagagcttacacacatgaaattgttactttatggtatagagctccggaggtattattgggtggaaaacaatatagtacaggtgtcgatacatggtccatcggctgtatatttgccgaaatgtgtaacaggaaaccaatcttcagtggcgatagtgagatcgatcagattttcaagatattcagagtattgggaacgccgaatgaagctatatggccagatattgtctacttgcctgatttcaagccaagctttcctcaatggcgcagaaaagacttatctcaagtggtaccaagtttggatccacgcggtattgatttgttggacaaactcctcgcgtatgaccctattaacagaattagcgccagaagagcagccatccacccctacttccaagaaagttga

SEQ ID NO: 715 - DNA, 1131 bp, Saccharomyces cerevisiae
atgaagaaggagttgaaaattcttataatagcgaacattgcattacttatctctataatacattacacatttgatttgttgacgttatgtatagatgatacttccaaagatgcgctaacagatgaacagctgaacccccccaatggcttcaattcaacattctatgagtctcctcctcaactcataccgaaaatcattcatcaaacctacaaaacaaacgatatcccagaacagtgggtaaaagggaggcagaagtgcattgatttacatccggattacacttacattttatggacggatgaaatgtctgatactttcattaaacaggaatacccgtggtttcttgacacctttaggagttatgaatatccaattgagagggcggatgcaatacggtatttcatcctttcgcattatggtggtatttacattgacttggatgatggttgtgaaagaaggctagaccctttgttgaaagtaccagcatttctaaggaaaacttcgcctacaggagtgtcaaatgatgtgatgggctctgttccaaggcaccccttcttcttgaaggtcatcaaatcgttgaaacactataagaaaaactggtacattccatatatgacaatcatgggctctacgggccccttattcattagtgtggtttggaagcaatataagagatggtctaatacggccgaaaatggtgcggtaagaattttacaacctgcagattataaaatgcataataattcttttttctcaatatctaaaggttcctcctggcatacgggtgatgccaattttatgaaaactctagagaatcacatcttgtcttgcgtggttaccggattcatttttggctttttcatattatacggtgaatttacattttatacttggctgtgctcgggaccatttaacaacaaacgctattacattcagtggttgagtgacaagttcaagttacacaagtggaaactaacatcgtcttacaagaataaggaaaagaggcggaatcctactcgtcacgaatataattcgaggggtaagagattaagaaaagattctaatatcccctacgacagcgttttccttgatatagaaaagaatcacgcaaaatttaccgacttaacctga

SEQ ID NO: 716 - DNA, 1131 bp, Artificial Sequence
  Description of Artificial Sequence: Synthetic polynucleotide
atgaagaaggagttgaaaattcttataatagcgaacattgcattacttatctctataatacattacacatttgatttgttgacgttatgtatagatgatacttccaaagatgcgttaacagatgaacagttgaacccccccaatggcttcaattctacattctatgagtctcctcctcaactcataccgaaaatcattcatcaaacctacaaaacaaacgatatcccagaacagtgggtaaaagggaggcagaagtgcattgatttacatccggattacacttacattttatggacggatgaaatgtctgatactttcattaaacaggaatacccgtggtttcttgacacctttaggagttatgaatatccaattgagagggcggatgcaataagatatttcatcctttctcattatggtggtatttacattgacttggatgatggttgtgaaagaaggttggaccctttgttgaaagtaccagcatttttaaggaaaacttctcctacaggagtgagtaatgatgtgatgggctctgttccaaggcaccccttcttcttgaaggtcatcaaatctttgaaacactataagaaaaactggtacattccatatatgacaatcatgggctctacgggccccttattcattagtgtggtttggaagcaatataagagatggtctaatacggccgaaaatggtgcggtaagaattttacaacctgcagattataaaatgcataataattcttttttctctatatctaaaggttcctcctggcatacgggtgatgccaattttatgaaaactttagagaatcacatcttgtcttgcgtggttaccggattcatttttggctttttcatattatacggtgaatttacattttatacttggttgtgctctggaccatttaacaacaaacgctattacattcagtggttgagtgacaagttcaagttacacaagtggaaattaacatcttcttacaagaataaggaaaagaggagaaatcctactcgtcacgaatataattctaggggtaagagattaagaaaagattctaatatcccctacgacagcgttttccttgatatagaaaagaatcacgcaaaatttaccgacttaacctga

SEQ ID NO: 717 - DNA, 1368 bp, Saccharomyces cerevisiae
atgttacaaaagctttccatgaccgcattagtcggtttgttttcttcagttgtgtcactcgtgaacgctgattgtacttactctggcggtaattactattgtgctcaaaccgatgccatcatttactctaacgtcggtttatctgctacctaccaagatgtcaccaatatggatgaatcttcttgtgcttgtacccaagctgatttcactgcttctggtagcttggctcccttcaacgaggaactatctgttcatttcaggggtccgatcgagttactacaatttggtgtttactacccaaatggtgaatctaatgctttgaagaaaagatcagagaaacaatcaatcgagtcctgtaaggaaggtgaagctgttgtctccagacataagcatcagcacaagagggatgttgctgttgaatatgttcaagttacttccactgtttacgtcgacagtaatggtcaaacagtcacagccgattccaccaataccgttgtcggtcctgctgttccttcttcttacactaaagactctactgttttgtccagcagtgctcaagcagttgaaacgagtgaaagccagtcttccatctcttcctctaaaaccacctcttctgctgctgctgcttcatcatcttcgtcatcatcttctaacactaacggtgactggtccagaggttcctactttgtcccaggctctactagcaactgtacattcatgaacaaccaaggggggactgccggttctggtgtctggtcgagttgtttcggtaactccatctcttttgctgcttcagatggtgtttctggtgctgcctccgctcaagctcttggtgatgtcaccattaaatctggtaatgaattcatgattttctccggtgaagaatgttccggtaataacggcgattgtggttattacagagaaggcattcctgcttatcatgggtttggtggggctgataaaattttcgtcttcgaattttctatgccaagtgacaccagcggttctgcctacaatcaagatatgccagctatttggttattaaatgcaaaaatcccaagaaccttgcaatatggtgatgcatcttgttcttgttggaaaactggctgtggtgaaatggatttgttcgaaattttgaccgctggttctgataaattaatctcacacatccatgacggccaagatggtggtactcaagattacttcgagagaccaactgatggtactttaaaggctgccgtaatctttaattcaagtgataaaactattcacattatcgaagtcgacgaaagctttgatgctactttaagcgatgatgtcgttgaccaatggttgagcaagtccggttcttctgcggccttgccatag

SEQ ID NO: 718 - DNA, 1368 bp, Artificial Sequence
  Description of Artificial Sequence: Synthetic polynucleotide
atgttacaaaagctttccatgaccgcattagtcggtttgttttcttctgttgtgagtctcgtgaacgctgattgtacttactctggcggtaattactattgtgctcaaaccgatgccatcatttactctaacgtcggtttatctgctacctaccaagatgtcaccaatatggatgaatcttcttgtgcttgtacccaagctgatttcactgcttctggtagcttggctcccttcaacgaggaattatctgttcatttcaggggtccgatcgagttattacaatttggtgtttactacccaaatggtgaatctaatgctttgaagaaaagaagtgagaaacaatccatcgagtcctgtaaggaaggtgaagctgttgtctccagacataagcatcagcacaagagggatgttgctgttgaatatgttcaagttacttccactgtttacgtcgacagtaatggtcaaacagtcacagccgattccaccaataccgttgtcggtcctgctgttccttcttcttacactaaagactctactgttttgtccagcagtgctcaagcagttgaaacgagtgaaagccagtcttccatctcttcctctaaaaccacctcttctgctgctgctgcttcttcttcttcttcttcttcttctaacactaacggtgactggtccagaggttcctactttgtcccaggctctactagcaactgtacattcatgaacaaccaaggggggactgccggttctggtgtctggtctagttgtttcggtaactccatctcttttgctgcttctgatggtgtttctggtgctgcctccgctcaagctcttggtgatgtcaccattaaatctggtaatgaattcatgattttctccggtgaagaatgttccggtaataacggcgattgtggttattacagagaaggcattcctgcttatcatgggtttggtggggctgataaaattttcgtcttcgaattttctatgccaagtgacaccagcggttctgcctacaatcaagatatgccagctatttggttattaaatgcaaaaatcccaagaaccttgcaatatggtgatgcatcttgttcttgttggaaaactggctgtggtgaaatggatttgttcgaaattttgaccgctggttctgataaattaatcagccacatccatgacggccaagatggtggtactcaagattacttcgagagaccaactgatggtactttaaaggctgccgtaatctttaatagtagtgataaaactattcacattatcgaagtcgacgaaagctttgatgctactttaagcgatgatgtcgttgaccaatggttgagcaagtccggttcttctgcggccttgccatga

SEQ ID NO: 719 - DNA, 198 bp, Saccharomyces cerevisiae
atggccgtacagacaccaagacaaagactggctaatgccaagtttaacaagaataacgaaaagtatagaaaatacggtaagaagaaggagggcaaaactgagaaaaccgcacctgtgatatccaaaacttggttgggtattcttctgtttcttctcgtaggtggtggtgttttgcaactaatcagctatatcctatga

SEQ ID NO: 720 - DNA, 198 bp, Artificial Sequence
  Description of Artificial Sequence: Synthetic polynucleotide
atggccgtacagacaccaagacaaagattggctaatgccaagtttaacaagaataacgaaaagtatagaaaatacggtaagaagaaggagggcaaaactgagaaaaccgcacctgtgatatccaaaacttggttgggtattcttttatttcttctcgtaggtggtggtgttttgcaattgatcagctatatcttgtga

SEQ ID NO: 721 - DNA, 1758 bp, Saccharomyces cerevisiae
atgctgggccgggcactaatcaacaagtatggatttttaattcatcctaggagatttgtacatttaaacgataagtcccttgatggaacatttatactaccttcgaagaaaaatcatatgtatgatgttccaactaatgatccaagcggtatcctgaatgcctcggatatcgatagaatcaataatttgccatttttcgataacaccagtccgacaaaagagacaaatactaaggaaggagcattgttgagcgaaaaattggccagcgttaaagaattatttggagaagaccctgaaaatccttcgtttatcaattacagattccccagaggtttagagaatccctattttgacattcaagtaaatcagctaaagaaaaaacgattatccgtcacacaattatgcactacgcagaattggtgcgagttaaggaatttttacgacttttattctcaaaatttgtctaaccaactactgaacttaaaatttcaggtgcagaaaggtaaaaagattcataaatcactagaggacgaaacgcatcctgaattaaatcagtataaaagctttacccacaatttccttgcactgacaaaattatctatggatattgataatgatatggatgccctgctagataactggttcaactctatcaatagattggtctctttattcaccaaaggtgacggtcatgcaagagaaatagtttgtcatggcttcattaacttagaagatggcaaactggtggagcatttgctgaacagtgatagcaagacaaaggaaaatgtgattatatcaggtgttattgaccacttaactcttagaaataggcacaatcatcaagtacagaaaggtgcagctcatcttgatacggaatatcagagctggggtaatatcctcactaatttactatcaaatctaaaagaactgaagtcgaataacgagattgttatctctgatatcaaaactaggtcagtaccaaaaataccatctattgagtccgttatagaatcctctaaattacagacaatgtattataagttttttttttcccaccttagtcaagacatgacacaaacctaccatagctttttaatcaatgcccagagaagaggactcgacgttgatgcgcccataaatcctaccaagattttaacattcatactaacaaacccactcttcgctaatgatgtgaagaacctcctgtacggactaccgataaatcattctgctttcgataacgacgccaaaggctctaatacatttgatatgaccgcgttcaatgatttgctggatagaggtcccacatcttttaacgttccgattgagcaagacgaagatagttcggagtcaacaaaatgtgtatctttgcgagattatggacatttttatacgaaatggaagacacctctaactttgaaatactttgcggcaaggttatcacagatctattttattgtgggtaatctcgtttcgaatgatttaatgatagaatattattaccataacgataatttccacaatatcatcttcccatatgatcccttgaaactgggaacccatgcccatgattctgcaatggtttggtttggtggcagagatatgcatccaattgagcctactcaaaaaaacttcaacacatactgtaagttttgtgactacagacacgtttgttcttggaaaaataaaaatgaattgaaacttattgatctagggaaagaattaaaaaaaattattcttgaatcaagtatgaagtag

SEQ ID NO: 722 - DNA, 1758 bp, Artificial Sequence
  Description of Artificial Sequence: Synthetic polynucleotide
atgcttggcagagcattaatcaacaagtatggatttttaattcatcctaggagatttgtacatttaaacgataagtcccttgatggaacatttatattaccttctaagaaaaatcatatgtatgatgttccaactaatgatccaagcggtatcttgaatgcctctgatatcgatagaatcaataatttgccatttttcgataacaccagtccgacaaaagagacaaatactaaggaaggagcattgttgagcgaaaaattggccagcgttaaagaattatttggagaagaccctgaaaatccttcttttatcaattacagattccccagaggtttagagaatccctattttgacattcaagtaaatcagttgaagaaaaaaagattatccgtcacacaattatgcactacgcagaattggtgcgagttaaggaatttttacgacttttattctcaaaatttgtctaaccaattattaaacttaaaatttcaggtgcagaaaggtaaaaagattcataaatctttggaggacgaaacgcatcctgaattaaatcagtataaaagctttacccacaatttccttgcattaacaaaattatctatggatattgataatgatatggatgccttgttggataactggttcaactctatcaatagattggtctctttattcaccaaaggtgacggtcatgcaagagaaatagtttgtcatggcttcattaacttagaagatggcaaattagtggagcatttgttgaacagtgatagcaagacaaaggaaaatgtgattatatctggtgttattgaccacttaactcttagaaataggcacaatcatcaagtacagaaaggtgcagctcatcttgatacggaatatcagagctggggtaatatcctcactaatttattatccaatttgaaagaattgaagagcaataacgagattgttatctctgatatcaaaactaggtctgtaccaaaaataccatctattgagtccgttatagaatcctctaaattacagacaatgtattataagttttttttttcccaccttagtcaagacatgacacaaacctaccatagctttttaatcaatgcccagagaagaggactcgacgttgatgcgcccataaatcctaccaagattttaacattcatattaacaaacccactcttcgctaatgatgtgaagaacctcttatacggattaccgataaatcattctgctttcgataacgacgccaaaggctctaatacatttgatatgaccgcgttcaatgatttgttggatagaggtcccacatcttttaacgttccgattgagcaagacgaagatagtagtgagtctacaaaatgtgtatctttgagagattatggacatttttatacgaaatggaagacacctttaactttgaaatactttgcggcaaggttatctcagatctattttattgtgggtaatctcgtttctaatgatttaatgatagaatattattaccataacgataatttccacaatatcatcttcccatatgatcccttgaaattaggaacccatgcccatgattctgcaatggtttggtttggtggcagagatatgcatccaattgagcctactcaaaaaaacttcaacacatactgtaagttttgtgactacagacacgtttgttcttggaaaaataaaaatgaattgaaacttattgatttagggaaagaattaaaaaaaattattcttgaaagtagtatgaagtga

SEQ ID NO: 723 - DNA, 552 bp, Saccharomyces cerevisiae
atgggtaacatttttagttcaatgtttgacaaactatggggttcaaacaaagaattgcgtatattgattttgggtttggatggtgcaggtaaaactaccatcttatatcgtttacaaattggcgaagtagtcactacaaagccaaccattggtttcaatgtagagacgctaagttataaaaacttaaaattgaacgtctgggatcttggtggtcaaacaagtatcaggccctactggaggtgttattatgcagacactgctgcagttattttcgttgttgattcgactgataaagatcgtatgtctacagcctctaaggaacttcatttgatgttacaggaagaagaattgcaagatgcagcactgctggtttttgcaaataaacaagaccaaccgggtgcattaagtgccagtgaagtctccaaagaactgaatcttgtagaattgaaggacagaagttggtctatcgtagcatccagtgcaattaaaggcgaaggtattaccgaaggtttagattggttgattgatgttataaaagaggaacagttatag

SEQ ID NO: 724 - DNA, 552 bp, Artificial Sequence
  Description of Artificial Sequence: Synthetic polynucleotide
atgggtaacatttttagttctatgtttgacaaattatggggttccaacaaagaattgcgtatattgattttgggtttggatggtgcaggtaaaactaccatcttatatcgtttacaaattggcgaagtagtcactacaaagccaaccattggtttcaatgtagagacgttgagttataaaaacttaaaattgaacgtctgggatcttggtggtcaaacaagtatcaggccctactggaggtgttattatgcagacactgctgcagttattttcgttgttgattctactgataaagatcgtatgtctacagcctctaaggaacttcatttgatgttacaggaagaagaattgcaagatgcagcattattggtttttgcaaataaacaagaccaaccgggtgcattaagtgccagtgaagtctccaaagaattgaatcttgtagaattgaaggacagaagttggtctatcgtagcatccagtgcaattaaaggcgaaggtattaccgaaggtttagattggttgattgatgttataaaagaggaacagttatga

SEQ ID NO: 725 - DNA, 834 bp, Saccharomyces cerevisiae
atggcttactctttaacaaggaaattgctgaaggattggaaatattttatgcgccatcctgagaagacccaaggtctttttcatgtaaggccacatgattcagacttacatctttggcacgtggtaatgtacgagcccaggacttctttggaagtatatctactactttatattggcggaaacgaccaggatccatatatcatcatgaaatgtctgtctccaaattgttgctttccaattaacagaacggtttcgatgacacacttaaactatcttttattgaaagacttgggattacaggatttacttttccacatatggcaaccgctttttcatattcaagcaacggaagacttacagtattcaccgtcaacggtaaaattcaacagggcgtggaataggattatatataaggactttaaatcttattttccggaactgataggtactttacaaccaggtgattactctatagtaaagagctattccaaaaatcataatatcagcaatagtaatggtggcagtgtcaatgaatttatgtcctcttacaatgctcaaagccacacctttcacgcacaagacaacagcaagaacccttatactaacagcagcataggaaagtctagtatgttatctactctcaacaataataacgttaacaaaaggacacatgactacaatgctatcgactttatgaccaaaaacttacttgcatgtgatgatgacagtattcatccggtcgtaagttctaaaaggtcaagaacgttggcatgtccagatgaaacgaacgataatcgcggtagtgagcattacacaaagaggaaaaaaatctaa

SEQ ID NO: 726 - DNA, 834 bp, Artificial Sequence
  Description of Artificial Sequence: Synthetic polynucleotide
atggcttactctttaacaaggaaattgttgaaggattggaaatattttatgcgccatcctgagaagacccaaggtctttttcatgtaaggccacatgattctgacttacatctttggcacgtggtaatgtacgagcccaggacttctttggaagtatatttattactttatattggcggaaacgaccaggatccatatatcatcatgaaatgtttgtctccaaattgttgctttccaattaacagaacggtttctatgacacacttaaactatcttttattgaaagacttgggattacaggatttacttttccacatatggcaaccgctttttcatattcaagcaacggaagacttacagtattctccgtccacggtaaaattcaacagggcgtggaataggattatatataaggactttaaatcttattttccggaattgataggtactttacaaccaggtgattactctatagtaaagagctattccaaaaatcataatatcagcaatagtaatggtggcagtgtcaatgaatttatgtcctcttacaatgctcaaagccacacctttcacgcacaagacaacagcaagaacccttatactaacagcagcataggaaagtctagtatgttatctactctcaacaataataacgttaacaaaaggacacatgactacaatgctatcgactttatgaccaaaaacttacttgcatgtgatgatgacagtattcatccggtcgtaagttctaaaaggagcagaacgttggcatgtccagatgaaacgaacgataatcgcggtagtgagcattacacaaagaggaaaaaaatctga

SEQ ID NO: 727 - DNA, 1359 bp, Saccharomyces cerevisiae
atggtatcagaggataagattgagcaatggaaagccacaaaagtcattggtataattggtctgggtgatatgggcctattatacgctaataaatttacagatgctggatggggtgttatatgttgtgatagggaagaatattatgatgaactgaaagaaaaatatgcctcagctaaattcgaactggtgaaaaatggtcatttggtatccaggcaaagcgactatattatctatagtgttgaagcatccaatattagtaagatcgtcgcaacgtatggaccatcttctaaggttggaacaattgttgggggtcaaacgagttgtaagctgccggaaatcgaggctttcgaaaagtatttacccaaggactgcgacatcattaccgtgcattcccttcatgggcctaaagttaatactgaaggccaaccactagttattatcaatcacagatcacagtacccagaatcttttgagttcgttaattctgttatggcatgtttgaaaagtaagcaagtttatttgacatatgaagagcatgacaagattaccgctgatacacaagctgtgacacatgctgctttcttaagtatgggatctgcgtgggcaaagataaagatttatccttggactctgggtgtaaacaaatggtacggtggcctagaaaatgtgaaagttaatatatcactaagaatctattcgaacaagtggcatgtttacgcaggattagccataacaaacccaagtgcacatcagcaaattcttcaatatgcaaccagtgcaacagaactatttagtttaatgatagataacaaagaacaagaacttactgatagactattaaaagctaagcaatttgtatttggaaagcatactggtctcttactattggatgacacgattttagagaaatattcgctatcaaaaagcagcattggtaacagcaacaattgcaagccagtgccgaattcacatttatcattgttggcgattgttgattcgtggtttcaacttggtattgatccatatgatcatatgatttgttcgacgccattattcagaatattcctgggtgtgtccgaatatctttttttaaaacctggcttattagaacagacaattgatgcagctatccatgataaatcattcataaaagatgatttagaatttgttatttcggctagagaatggagctcggttgtttcttttgccaattttgatatatacaaaaagcaatttcagagtgttcaaaagttctttgagccaatgcttccagaggctaatctcattggcaacgagatgataaaaaccattctgagtcattctagtgaccgttcggccgctgaaaaaagaaatacataa

SEQ ID NO: 728 - DNA, 1359 bp, Artificial Sequence
  Description of Artificial Sequence: Synthetic polynucleotide
atggtatctgaggataagattgagcaatggaaagccacaaaagtcattggtataattggtttaggtgatatgggcttattatacgctaataaatttacagatgctggatggggtgttatatgttgtgatagggaagaatattatgatgaattgaaagaaaaatatgcctctgctaaattcgaattagtgaaaaatggtcatttggtatccaggcaaagcgactatattatctatagtgttgaagcatccaatattagtaagatcgtcgcaacgtatggaccatcttctaaggttggaacaattgttgggggtcaaacgagttgtaagttaccggaaatcgaggctttcgaaaagtatttacccaaggactgcgacatcattaccgtgcattcccttcatgggcctaaagttaatactgaaggccaaccattagttattatcaatcacagaagccagtacccagaatcttttgagttcgttaattctgttatggcatgtttgaaaagtaagcaagtttatttgacatatgaagagcatgacaagattaccgctgatacacaagctgtgacacatgctgctttcttaagtatgggatctgcgtgggcaaagataaagatttatccttggactttaggtgtaaacaaatggtacggtggccttgaaaatgtgaaagttaatatatctttgagaatctattccaacaagtggcatgtttacgcaggattagccataacaaacccaagtgcacatcagcaaattcttcaatatgcaaccagtgcaacagaattatttagtttaatgatagataacaaagaacaagaacttactgatagattattaaaagctaagcaatttgtatttggaaagcatactggtctcttattattggatgacacgattttagagaaatattctttatccaaaagcagcattggtaacagcaacaattgcaagccagtgccgaattctcatttatctttgttggcgattgttgattcttggtttcaacttggtattgatccatatgatcatatgatttgttccacgccattattcagaatattcttgggtgtgtccgaatatctttttttaaaacctggcttattagaacagacaattgatgcagctatccatgataaatctttcataaaagatgatttagaatttgttatttctgctagagaatggagctctgttgtttcttttgccaattttgatatatacaaaaagcaatttcagagtgttcaaaagttctttgagccaatgcttccagaggctaatctcattggcaacgagatgataaaaaccattttaagtcattctagtgaccgttctgccgctgaaaaaagaaatacatga

SEQ ID NO: 729 - DNA, 423 bp, Saccharomyces cerevisiae
atggcactcaaaaagaatacacacaacaaatctaccaaacgagtaacgaaacacccatctttgaaaactctaacgcataagcaaatacacacaacaattttcgttaagtctacaacaccatacgttagtgcactgaaaagaataaataagtttctcgatagcgttcataagcaaggatcatcctatgttgcggttttgggtatgggtaaagctgtagaaaagacactggcattaggttgtcattttcaagatcagaagaacaagaaaatagaggtttacactaaaactatagaagttcttgatgaagtaataactgaaggccaagctgatatcgacatggaaagtgatgttgaagatgacgataaagaaacccaactaaagaaaagggctgtaagcggtgtagaattgcgtatttatgtttaa

SEQ ID NO: 730 - DNA, 423 bp, Artificial Sequence
  Description of Artificial Sequence: Synthetic polynucleotide
atggcactcaaaaagaatacacacaacaaatctaccaaaagagtaacgaaacacccatctttgaaaactttaacgcataagcaaatacacacaacaattttcgttaagtctacaacaccatacgttagtgcattgaaaagaataaataagtttctcgatagcgttcataagcaaggatcttcctatgttgcggttttgggtatgggtaaagctgtagaaaagacattagcattaggttgtcattttcaagatcagaagaacaagaaaatagaggtttacactaaaactatagaagttcttgatgaagtaataactgaaggccaagctgatatcgacatggaaagtgatgttgaagatgacgataaagaaacccaattgaagaaaagggctgtaagcggtgtagaattgcgtatttatgtttga

SEQ ID NO: 731 - DNA, 1242 bp, Saccharomyces cerevisiae
atggacacaaattctaaaaccaaagtacaaactgaaaataaaaaaattaaggcgaaatttatacataatcatgggcaaaagccctctcttatccaaattacacctccaatgatttccagcactctgtttcacgcatatccactactactaatattcgacaatgccttagcgaatataatgtggctgtccgacgataaatgtttaacattcatttatctaacgagcatatggctgaccataagtttttttatccccgttgaaacagaggctagccattttctgccatttacaaagattttgagactatggttaggcattataagcggggcatttctattcttatcattcatgtattatattgtttcattgatagcttcgttaagagacacggaacctcctacattggatgaaattgtcgtgctactagagtctgtgttggataaactggaagtactgagaaacgagctgaatgtttggaaaaaattaaagctttcatttgatggcgtcaataaggagtgttctggcaagaggttgttttgcagattattcttattcggtacaatttttcaaattattatcatgagatacatatcaccgggaacttatactagattttttattattaccggcttgatatacaatacgagtagttttcaagctaccttaaggctactttggaggtttactgctgttaggaatttctattatttggggattgaaagttttaaaatttcgagtttcttaccaaaacacttaaagatggaacaaattattcctttatctcaaggacgtgcaatcacggtgccactggtagaggtattgcctaaactacttcgggacaagaagggtgatgaccacattcatattctacagcttctacttaatgagcaaaaagataactttggtaatgaagaccttaaaatactagaaattgaagtatacgaaaatcaaagaaggtggtatcaaaataaaaattggagtacaaaattactgccgtacgaaagacaaaactactgcatagaaattaaaaacactgatggaactttaaccatgaggagttgtttgcccccagatggacttggtgaagaagaattacccaataattggcattggatcaatgataattgggacggaactgattggatatattcagattcagcatggaaagaaattggacaatacagttctttggaaagttttaccaggtcaagaaaatggaaacgacgcctcttccatttgtaa

SEQ ID NO: 732 - DNA, 1242 bp, Artificial Sequence
  Description of Artificial Sequence: Synthetic polynucleotide
atggacacaaattctaaaaccaaagtacaaactgaaaataaaaaaattaaggcgaaatttatacataatcatgggcaaaagccctctcttatccaaattacacctccaatgatttccagcactttatttcacgcatatccattgttattgatattcgacaatgccttagcgaatataatgtggttatccgacgataaatgtttaacattcatttatttgacgagcatatggttgaccataagtttttttatccccgttgaaacagaggctagccattttttaccatttacaaagattttgagattatggttaggcattataagcggggcatttcttttcttatctttcatgtattatattgtttctttgatagcttctttaagagacacggaacctcctacattggatgaaattgtcgtgcttttggagtctgtgttggataaattagaagtattaagaaacgagttgaatgtttggaaaaaattaaagctttcttttgatggcgtcaataaggagtgttctggcaagaggttgttttgcagattattcttattcggtacaatttttcaaattattatcatgagatacatatctccgggaacttatactagattttttattattaccggcttgatatacaatacgagtagttttcaagctaccttaaggttactttggaggtttactgctgttaggaatttctattatttggggattgaaagttttaaaatttccagtttcttaccaaaacacttaaagatggaacaaattattcctttatctcaaggacgtgcaatcacggtgccattagtagaggtattgcctaaattacttcgtgacaagaagggtgatgaccacattcatattttacagcttttacttaatgagcaaaaagataactttggtaatgaagaccttaaaatattggaaattgaagtatacgaaaatcaaagaaggtggtatcaaaataaaaattggagtacaaaattattaccgtacgaaagacaaaactactgcatagaaattaaaaacactgatggaactttaaccatgaggagttgtttgcccccagatggacttggtgaagaagaattacccaataattggcattggatcaatgataattgggacggaactgattggatatattctgattctgcatggaaagaaattggacaatacagttctttggaaagttttaccaggagcagaaaatggaaaagacgcctcttccatttgtga

SEQ ID NO: 733 - DNA, 2082 bp, Saccharomyces cerevisiae
atgagcactccatttggcttagatttaggtaacaataactcagtactagcagttgccagaaataggggtattgatgtcgttgtcaatgaagtttctaataggtctacaccatccttggtcggctttggccccagaaataggtacttaggtgaatctggtaaaactaagcaaacatcgaatgttaaaaacactgtggaaaacttgaaaagaatcattggactaaagttcaaagaccctgaatttgatatcgagaataagttcttcacttcgaaattggtacagctaaaaaatggtaaagttggtgtggaagtggagttcggcggtaaaacacacgtattttcagctactcaactgactgctatgttcattgataaggtgaagcacaccgttcaagaggaaacgaagtcatcaattaccgatgtctgcctcgcagttcctgtatggtattcggaagaacaacgttataacatagccgatgctgccagaattgcaggattaaatcctgtaaggattgtcaacgatgtgactgcagccgccgtttcgtacggcgtcttcaagaatgatctgccaggtcctgaagaaaagccaagaatcattggcttagtggacattgggcattctacctacacctgttctattatggctttccgcaaaggcgaaatgaaagtattaggtactgcttatgacaagcactttggtggtagagatttcgatcgcgcaatcacagaacattttgctgatcagtttaaggacaagtacaagattgacattaggaaaaatccgaaagcttataacagaattttaatcgctgctgaaaaattaaaaaaagtgctttctgcgaacactactgcccccttctccgttgaatctgttatggatgatatcgacgtttcctctcaattgagccgtgaagagctggaagaattagtagagcccttgttgaagcgtgtgacgtatccaatcaccaatgcattggctcaagctaaattaactgtcaatgatattgacttcgtagaaataattggtggtacaacccgtatcccagttttaaagaagtcaatttctgatgtttttggaaaacctttgtcatctactttaaatcaagacgaagctgtggccaagggggccgctttcatatgtgccattcactctccaactttaagggtcaggccgtttaaatttgaagatattgatccgtattcagtgtcatacacttgggataagcaggtcgatgacgaagaccgtttggaagtattccctgctaattcatcatatccatcaactaaactaattactttacatcgtactggagatttcagcatgaaagcggtgtacactcatccttcgaaactgccaaaaggtacttccaccactattgcaaaatggagcttcactggggtcaaggttcctaaagatcaagattttattcctgtaaaggtcaagttaagatgcgatccttccggcttgcatattatcgagaacgcttacacaacggaagatattacggttcaagagccagtgcctttaccggaagacgcaccagaagatgccgagccccagtttaaagaagttactaaaacaattaagaaagatgtgctaggtatgactgcaaaaacattcgcgctaaacccggttgagttgaacgatctaattgaaaaagagaatgaattaagaaaccaggataagttagttgccgaaaccgaggatcgcaaaaatgcccttgaagagtatatttatacccttcgtgccaaactcgatgatgaatactccgattttgcgtctgacgcagaaaaagaaaagctaaaaaacatgttagccactactgaaaattggttatatggtgatggtgacgattctaccaaggcaaaatacattgctaaatatgaggagctggcatcgttggggaatattattagaggtagatatttagcaaaggaggaagaaaaaagacaagcactcagagcgaatcaagaaacttctaaaatgaatgatattgctgaaaaattggctgagcaaagaagggcacgcgctgcaagtgatgatagcgatgacaacaatgatgaaaacatggaccttgattaa

SEQ ID NO: 734 - DNA, 2082 bp, Artificial Sequence
  Description of Artificial Sequence: Synthetic polynucleotide
atgagcactccatttggcttagatttaggtaacaataactctgtattggcagttgccagaaataggggtattgatgtcgttgtcaatgaagtttctaataggtctacaccatccttggtcggctttggccccagaaataggtacttaggtgaatctggtaaaactaagcaaacaagtaatgttaaaaacactgtggaaaacttgaaaagaatcattggattgaagttcaaagaccctgaatttgatatcgagaataagttcttcacttctaaattggtacagttgaaaaatggtaaagttggtgtggaagtggagttcggcggtaaaacacacgtattttctgctactcaattgactgctatgttcattgataaggtgaagcacaccgttcaagaggaaacgaagagttctattaccgatgtctgcctcgcagttcctgtatggtattctgaagaacaacgttataacatagccgatgctgccagaattgcaggattaaatcctgtaaggattgtcaacgatgtgactgcagccgccgtttcttacggcgtcttcaagaatgatttaccaggtcctgaagaaaagccaagaatcattggcttagtggacattgggcattctacctacacctgttctattatggctttccgcaaaggcgaaatgaaagtattaggtactgcttatgacaagcactttggtggtagagatttcgatcgcgcaatcacagaacattttgctgatcagtttaaggacaagtacaagattgacattaggaaaaatccgaaagcttataacagaattttaatcgctgctgaaaaattaaaaaaagtgctttctgcgaacactactgcccccttctccgttgaatctgttatggatgatatcgacgtttcctctcaattgagccgtgaagagttagaagaattagtagagcccttgttgaagcgtgtgacgtatccaatcaccaatgcattggctcaagctaaattaactgtcaatgatattgacttcgtagaaataattggtggtacaacccgtatcccagttttaaagaagtctatttctgatgtttttggaaaacctttgtcttctactttaaatcaagacgaagctgtggccaagggggccgctttcatatgtgccattcactctccaactttaagggtcaggccgtttaaatttgaagatattgatccgtattctgtgtcttacacttgggataagcaggtcgatgacgaagaccgtttggaagtattccctgctaattcttcttatccatctactaaattgattactttacatcgtactggagatttcagcatgaaagcggtgtacactcatccttccaaattaccaaaaggtacttccaccactattgcaaaatggagcttcactggggtcaaggttcctaaagatcaagattttattcctgtaaaggtcaagttaagatgcgatccttccggcttgcatattatcgagaacgcttacacaacggaagatattacggttcaagagccagtgcctttaccggaagacgcaccagaagatgccgagccccagtttaaagaagttactaaaacaattaagaaagatgtgttgggtatgactgcaaaaacattcgcgttgaacccggttgagttgaacgatttgattgaaaaagagaatgaattaagaaaccaggataagttagttgccgaaaccgaggatcgcaaaaatgcccttgaagagtatatttatacccttcgtgccaaactcgatgatgaatactccgattttgcgtctgacgcagaaaaagaaaagttgaaaaacatgttagccactactgaaaattggttatatggtgatggtgacgattctaccaaggcaaaatacattgctaaatatgaggagttggcaagtttggggaatattattagaggtagatatttagcaaaggaggaagaaaaaagacaagcactcagagcgaatcaagaaacttctaaaatgaatgatattgctgaaaaattggctgagcaaagaagggcacgcgctgcaagtgatgatagcgatgacaacaatgatgaaaacatggaccttgattga

SEQ ID NO: 735 - DNA, 1743 bp, Saccharomyces cerevisiae
atgcttatcagatttagatcaaaaaacggtacacacagggtttcttgtcaagaaaacgaccttttcggaacggtcattgaaaagttggtgggtaatctggaccccaatgccgatgtcgacacatttactgtttgtgagaagcccggtcaaggtattcatgctgtttctgaactagctgatcgaacagtgatggatctaggactaaagcacggtgacatgctgatccttaactattcggacaagcccgctaatgagaaagatggtgtcaatgttgaaatcggatccgtaggtattgacagcaagggaattcgtcaacacaggtacggtccactaaggatcaaagaactcgctgtagatgaggaactagagaaagaggacggattaattcctcgtcaaaaatcaaaactatgcaagcacggtgatagaggtatgtgtgaatactgctcgcctttacctccttgggacaaagaatatcatgagaagaataagatcaaacatatatcgtttcattcatatcttaaaaagctaaatgaaaatgctaataagaaggagaacggcagctcttatatttcccctctttcagaacctgattttagaatcaataagcgttgccataatggccatgaaccatggcctcgggggatatgttctaaatgtcaaccatcggcaattacattacaacagcaagaatttagaatggttgaccacgttgaatttcagaagagtgaaataattaatgaatttattcaggcgtggaggtacacgggtatgcaaagatttggctatatgtacggatcttattctaagtatgataacacacctttaggtataaaggccgtcgttgaggcgatatacgagccccctcagcatgatgagcaagacggtttaaccatggacgtagaacaggtcaagaatgaaatgctacagattgatagacaggctcaagaaatggggctttcgcgaattggcctaatatttacagatttatctgacgcgggagctggggatgggtctgttttttgcaaaagacataaggattcgttttttctttcatcattagaagttattatggctgctaggcatcaaacaaggcatcctaatgtaagcaagtatagcgaacaaggttttttttcttccaagtttgtaacttgcgttatatcaggtaatttggaaggtgaaattgatatttcgagctaccaagtatccacagaagctgaagcattggttactgcagatatgataagtgggtccacatttccttcaatggcatatattaatgacactacagatgaaagatatgtacctgagatattttacatgaagtcgaatgaatatggtataacagtgaaggaaaatgcgaagcctgcatttccggtagactatcttttagtgacgctgactcatgggttcccgaataccgatacggaaaccaactcgaaattcgttagttccaccggatttccatggagcaatcgacaagctatggggcaatctcaagattatcaagaattaaaaaagtatttattcaatgtggcttcaagtggagatttcaatcttttgcatgaaaaaatctcgaactttcatttactattatacataaattctctgcagatactctctccagacgaatggaagttactaatagaatctgctgtgaaaaatgaatgggaagaatctctactaaaacttgtctcatcggctggttggcaaacgttagtcatgatccttcaggaaagcggctag

SEQ ID NO: 736 - DNA, 1743 bp, Artificial Sequence
  Description of Artificial Sequence: Synthetic polynucleotide
atgcttatcagatttagaagtaaaaacggtacacacagggtttcttgtcaagaaaacgaccttttcggaacggtcattgaaaagttggtgggtaatttggaccccaatgccgatgtcgacacatttactgtttgtgagaagcccggtcaaggtattcatgctgtttctgaattggctgatagaacagtgatggatttgggattgaagcacggtgacatgttgatccttaactattctgacaagcccgctaatgagaaagatggtgtcaatgttgaaatcggatccgtaggtattgacagcaagggaattcgtcaacacaggtacggtccattaaggatcaaagaactcgctgtagatgaggaattagagaaagaggacggattaattcctcgtcaaaaatctaaattatgcaagcacggtgatagaggtatgtgtgaatactgctctcctttacctccttgggacaaagaatatcatgagaagaataagatcaaacatatatcctttcattcttatcttaaaaagttgaatgaaaatgctaataagaaggagaacggcagctcttatatttcccctctttctgaacctgattttagaatcaataagcgttgccataatggccatgaaccatggcctcgtgggatatgttctaaatgtcaaccatctgcaattacattacaacagcaagaatttagaatggttgaccacgttgaatttcagaagagtgaaataattaatgaatttattcaggcgtggaggtacacgggtatgcaaagatttggctatatgtacggatcttattctaagtatgataacacacctttaggtataaaggccgtcgttgaggcgatatacgagccccctcagcatgatgagcaagacggtttaaccatggacgtagaacaggtcaagaatgaaatgttacagattgatagacaggctcaagaaatggggctttctagaattggcttgatatttacagatttatctgacgcgggagctggggatgggtctgttttttgcaaaagacataaggattctttttttctttcttctttagaagttattatggctgctaggcatcaaacaaggcatcctaatgtaagcaagtatagcgaacaaggttttttttcttccaagtttgtaacttgcgttatatctggtaatttggaaggtgaaattgatatttctagctaccaagtatccacagaagctgaagcattggttactgcagatatgataagtgggtccacatttccttctatggcatatattaatgacactacagatgaaagatatgtacctgagatattttacatgaagagcaatgaatatggtataacagtgaaggaaaatgcgaagcctgcatttccggtagactatcttttagtgacgttgactcatgggttcccgaataccgatacggaaaccaactccaaattcgttagttccaccggatttccatggagcaatagacaagctatggggcaatctcaagattatcaagaattaaaaaagtatttattcaatgtggcttccagtggagatttcaatcttttgcatgaaaaaatctccaactttcatttattattatacataaattctttgcagatactctctccagacgaatggaagttattgatagaatctgctgtgaaaaatgaatgggaagaatctttattgaaacttgtctcttctgctggttggcaaacgttagtcatgatccttcaggaaagcggctga

SEQ ID NO: 737 - DNA, 621 bp, Saccharomyces cerevisiae
atgtccgaatttaatgaaacaaaattctccaacaacgggacgttttttgaaacggaagagccaattgtggagacgaaatcaatctccgtttataccccactcatatatgtctttattctggtggtgtcccttgtgatgtttgcttcaagctacagaaagaagcaggccaaaaaaattagtgagcaaccatccatatttgacgaaaacgatgcccatgatctgtatttccaaataaaggaaatgagtgaaaatgaaaaaattcacgagaaggtgttgaaggccgctttattgaacagaggagcagaatctgttagacgatcattaaagttaaaagagttggctcctcagataaaccttctatataaaaatggctctattggggaggattactggaagagatttgaaactgaagttaaattaattgaattggaatttaaagatactttacaagaagctgaaagattgcaaccgggctgggttcaattgttcgttatggtttgtaaagaaatttgctttaatcaagctctctctagacgttatcaatcaatcttgaaacggaaagaagtgtgtattaaagagtgggagctgaaaataaataatgatggaagattagtcaattag

SEQ ID NO: 738 - DNA, 621 bp, Artificial Sequence
  Description of Artificial Sequence: Synthetic polynucleotide
atgtccgaatttaatgaaacaaaattctccaacaacgggacgttttttgaaacggaagagccaattgtggagacgaaatctatctccgtttataccccactcatatatgtctttattttggtggtgtcccttgtgatgtttgcttctagctacagaaagaagcaggccaaaaaaattagtgagcaaccatccatatttgacgaaaacgatgcccatgatttatatttccaaataaaggaaatgagtgaaaatgaaaaaattcacgagaaggtgttgaaggccgctttattgaacagaggagcagaatctgttagaagatctttaaagttaaaagagttggctcctcagataaaccttttatataaaaatggctctattggggaggattactggaagagatttgaaactgaagttaaattaattgaattggaatttaaagatactttacaagaagctgaaagattgcaaccgggctgggttcaattgttcgttatggtttgtaaagaaatttgctttaatcaagctctctctagacgttatcaatccatcttgaaaagaaaagaagtgtgtattaaagagtgggagttgaaaataaataatgatggaagattagtcaattga

SEQ ID NO: 739 - DNA, 2223 bp, Saccharomyces cerevisiae
atgatagcaccagactcgcaaagattattcggttcctttgatgaacagtttaaggacttaaaactagattcagtcgatacagaaaacaataacacacacggtgtttctactatcctggattcctcccctgcgagcgttaataacaatacaaacggtgctgttgctgcaagcgtgaatacagtccctggatcgacgtttagatccaatacacctcttttaggaggtcgacatccactcagtaggacgtcttccttaatcgattctattggtatacagcgtgctgcgtcaccattttcttctatgaaagagccttttattcctcaaagttcgggagtaatgagttcctctttttggcacggcgaccatcctgaatcacgggttagtacgcctgttcagcagcatccactattgcaaagaaacgagtcctcctcctcctttagttatgctgctaatcttggagtgaatctgagtacacattcattggcggtagatattactccattaagtacaccaactgctgcccaatctcatgtcaatttgtttccgtcctctgatattcctcctaatatgagcatgaacggaatgtcacaactcccagcaccagtttcagttgaatccagttggaggtacatagacacgcagggacagattcatggtccatttactacccaaatgatgtcacaatggtacataggtggctattttgcttcaacccttcagatttcaagattgggaagcactccagaaacgctaggaataaacgatattttcatcacacttggtgagttaatgactaaactcgagaagtatgatacggatccattcactacttttgacaaacttcacgttcaaacaaccagctctgattctatcaacttgaatctagctccttacgcaagcggtgttgccgctactggcactattaaagctactgaaaacgatattttcaagccattgacacatgacaatatctgggatatggatggaggtaccacctccaagggagtcgatattaaattagcctcagcaaccaccattagtcaaacagatgaatctcacaagcaagaatacaaatcgaccactatgctggaaaaagggaagaaggaaaaatccgaatctgtagcaaaagcgttattggatgaacaagagaaacggaacagagaactcaaaaggaaggaagaagctcgcttatcgaagaaacaaaagcaaaaagaggatgatttattgaagaaacaaaaggaacaaaaggaacaaaaggaaaaagaagctttggaagcagaaaagcaaaaaaaatcagaaaagacaaaaaaggacacacaaacacaaacagaaggctttaagacatcaaaagatttgccttcattaaattcctcaagcgcgaatccggcaccatgggcctcaaaagtcaaagttaacaatgcaatcgaaacttcaattaaaaatggtgtaagtagcactggaaagaagaaaggagaacccttaggtctacaacagaggaacagcaaagaagaaaagcaaaaggaggaactaaaatccgtgcttaactgggctaacaagtccagcctaccatcgaatcaaactattgatattaaatctcagtttcaaaaaagcccaaaagggatgaaagagtcgtctccgttaaaggagttggaagatccaaatttcatagaagagcagaaaaaactatgggaaaaggttcagagttcttccaaacaagtaaagtccacatcctctgcatctactaccacatcttcttggactacggtgacttctaaagggaaagcacctataggaaccgttgtctccccatattcaaaaaccaataccagtttaaattcttcattaacggcaaaaactagcacaacttctactaccactacctttgctagcatgaacaatgtttctccccggcaagaatttatcaaatggtgtaaatcacagatgaaattaaattctggaataaccaataacaatgtcttagaactattattgagtttacctacggggccagaatctaaagaattgattcaagaaacaatttatgccaatagtgacgttatggatggtagaagatttgccactgaatttattaaaagacgtgttgcgtgcgaaaaacaaggtgatgatccactaagttggaatgaagcgctagctctatcaggcaatgatgacgacggctgggaattccaagtagtgagcaagaagaagggtagaaaacactga

SEQ ID NO: 740 - DNA, 2223 bp, Artificial Sequence
  Description of Artificial Sequence: Synthetic polynucleotide
atgatagcaccagactctcaaagattattcggttcctttgatgaacagtttaaggacttaaaattggattctgtcgatacagaaaacaataacacacacggtgtttctactatcttagattcctcccctgcgagcgttaataacaatacaaacggtgctgttgctgcaagcgtgaatacagtccctggaagtacgtttagatccaatacacctcttttaggaggtagacatccactcagtaggacgtcttccttaatcgattctattggtatacagcgtgctgcgtctccattttcttctatgaaagagccttttattcctcaaagtagtggagtaatgagttcctctttttggcacggcgaccatcctgaatctagagttagtacgcctgttcagcagcatccattgttgcaaagaaacgagtcctcctcctcctttagttatgctgctaatcttggagtgaatttgagtacacattctttggcggtagatattactccattaagtacaccaactgctgcccaatctcatgtcaatttgtttccgtcctctgatattcctcctaatatgagcatgaacggaatgtctcaactcccagcaccagtttctgttgaatccagttggaggtacatagacacgcagggacagattcatggtccatttactacccaaatgatgtctcaatggtacataggtggctattttgctagcacccttcagatttctagattgggaagcactccagaaacgttgggaataaacgatattttcatcacacttggtgagttaatgactaaactcgagaagtatgatacggatccattcactacttttgacaaacttcacgttcaaacaaccagctctgattctatcaacttgaatttggctccttacgcaagcggtgttgccgctactggcactattaaagctactgaaaacgatattttcaagccattgacacatgacaatatctgggatatggatggaggtaccacctccaagggagtcgatattaaattagcctctgcaaccaccattagtcaaacagatgaatctcacaagcaagaatacaaatctaccactatgttggaaaaagggaagaaggaaaaatccgaatctgtagcaaaagcgttattggatgaacaagagaaaagaaacagagaactcaaaaggaaggaagaagctcgcttatccaagaaacaaaagcaaaaagaggatgatttattgaagaaacaaaaggaacaaaaggaacaaaaggaaaaagaagctttggaagcagaaaagcaaaaaaaaagtgaaaagacaaaaaaggacacacaaacacaaacagaaggctttaagacaagtaaagatttgccttctttaaattcctctagcgcgaatccggcaccatgggcctccaaagtcaaagttaacaatgcaatcgaaacttctattaaaaatggtgtaagtagcactggaaagaagaaaggagaacccttaggtttacaacagaggaacagcaaagaagaaaagcaaaaggaggaattgaaatccgtgcttaactgggctaacaagtccagcttgccatccaatcaaactattgatattaaatctcagtttcaaaaaagcccaaaagggatgaaagagtcttctccgttaaaggagttggaagatccaaatttcatagaagagcagaaaaaattatgggaaaaggttcagagttcttccaaacaagtaaagtccacatcctctgcatctactaccacatcttcttggactacggtgacttctaaagggaaagcacctataggaaccgttgtctccccatattctaaaaccaataccagtttaaattcttctttaacggcaaaaactagcacaacttctactaccactacctttgctagcatgaacaatgtttctcccaggcaagaatttatcaaatggtgtaaatctcagatgaaattaaattctggaataaccaataacaatgtcttagaattattattgagtttacctacggggccagaatctaaagaattgattcaagaaacaatttatgccaatagtgacgttatggatggtagaagatttgccactgaatttattaaaagacgtgttgcgtgcgaaaaacaaggtgatgatccattaagttggaatgaagcgttagctttaagtggcaatgatgacgacggctgggaattccaagtagtgagcaagaagaagggtagaaaacactga

SEQ ID NO: 741 - DNA, 447 bp, Saccharomyces cerevisiae
atgaatatcgtcccacaagatacctttaaatctcaagtctctacagatcaagacaaaagtgttctttcatctgcagtgccctccttgccagacacattacgccagcaagaaggcggtgcagtacctctttccacacaattgaatgacagacatccattagaatcaacattgaagaactgggaaaccacacagcgccaaagacaaatggaacagtatcgacaaatatttggcattgccgaaccaatgaaaaggacgatggaaatggaaatcgtcaatcgtaccgacttcaaccccctttcaacaaacggtagtatacaccgtgacatactactgaacaaagagtgcagcatcgattgggaggacgtctaccctggtactggcctacaagccagcaccatggtaggtgatgacgtccacagcaaaatcgaaaaacaattaggcatttaa

SEQ ID NO: 742 - DNA, 447 bp, Artificial Sequence
  Description of Artificial Sequence: Synthetic polynucleotide
atgaatatcgtcccacaagatacctttaaatctcaagtctctacagatcaagacaaaagtgttctttcttctgcagtgccctccttgccagacacattacgccagcaagaaggcggtgcagtacctctttccacacaattgaatgacagacatccattagaatctacattgaagaactgggaaaccacacagcgccaaagacaaatggaacagtatagacaaatatttggcattgccgaaccaatgaaaaggacgatggaaatggaaatcgtcaatcgtaccgacttcaaccccctttctacaaacggtagtatacaccgtgacatattattaaacaaagagtgcagcatcgattgggaggacgtctaccctggtactggcttacaagccagcaccatggtaggtgatgacgtccacagcaaaatcgaaaaacaattaggcatttga

SEQ ID NO: 743 - DNA, 948 bp, Saccharomyces cerevisiae
atgttccagtttgttactcctgtgggaacacagaatggattgaaagctacttgtgcgaaaatatctcctgatgggcagtttcttgctataacacaaggacttaacatcctgatatacgacattaacagacgaactgtatcacaaacactagtcacatcacatgccaggcctttctcagagttatgctggtctccagatggacagtgcatagctactgcatcggatgatttttctgtggaaatcattcatttatcttatgggctgctgcacacttttatcggccatacagcgccagtgatatctctgacattcaatagaaaggggaacttgctgtttacatcctcaatggacgaaagtatcaaaatatgggacacactgaacgggtctttgatgaaaacaatatctgcacactcagaagcagttgtgtcggtggacgtacccatgaatgattcatccattctgagttcaggttcatatgacgggctcatacggatctttgatgcagagacgggccattgtttgaagacattgacctatgacaaggattggaaaagagaaaatggtgtggtacccatctcccaagttaagttttctgagaatgcaagatatctcctggtgaaatcgctggacggtgtagtgaaaatatgggattgcatcgggggttgtgtagttcgtactttccaggttcagcctcttgaaaagggcgtactgcatcattcctgcggtatggacttcttaaatcctgaagatggatccactcctttggtgatcagcggttatgaaaatggcgatatatattgttggaattctgatacaaaaagcctcttacagttgctcgatggttctttatatcaccacagcagccctgtaatgagcatacattgcttcggtaatataatgtgttcccttgcattgaatggagattgctgtttatggagatgggtttaa

SEQ ID NO: 744 - DNA, 948 bp, Artificial Sequence
  Description of Artificial Sequence: Synthetic polynucleotide
atgttccagtttgttactcctgtgggaacacagaatggattgaaagctacttgtgcgaaaatatctcctgatgggcagtttcttgctataacacaaggacttaacatcttaatatacgacattaacagaagaactgtatctcaaacattggtcacatctcatgccaggcctttcagtgagttatgctggtctccagatggacagtgcatagctactgcatctgatgatttttctgtggaaatcattcatttatcttatgggttgttgcacacttttatcggccatacagcgccagtgatatctttaacattcaatagaaaggggaacttgttatttacatcctctatggacgaaagtatcaaaatatgggacacattgaacgggtctttgatgaaaacaatatctgcacacagtgaagcagttgtgtctgtggacgtacccatgaatgattcttccattttaagttctggttcttatgacgggctcataagaatctttgatgcagagacgggccattgtttgaagacattgacctatgacaaggattggaaaagagaaaatggtgtggtacccatctcccaagttaagttttctgagaatgcaagatatctcttggtgaaatctttggacggtgtagtgaaaatatgggattgcatcgggggttgtgtagttcgtactttccaggttcagcctcttgaaaagggcgtattacatcattcctgcggtatggacttcttaaatcctgaagatggatccactcctttggtgatcagcggttatgaaaatggcgatatatattgttggaattctgatacaaaaagcctcttacagttgctcgatggttctttatatcaccacagcagccctgtaatgagcatacattgcttcggtaatataatgtgttcccttgcattgaatggagattgctgtttatggagatgggtttga

SEQ ID NO: 745 - DNA, 939 bp, Saccharomyces cerevisiae
atgaatataatgaaaagacaattatgcacctcctctaagcgatttttttctacagcaaaaaacgttgtcaaatataatacgattcaggatatcaggaacaaatattttactggtacgcctttgtcgatgtgtactgcgtatgacttcattactgcaacatgggttaacaaggctaattgtgatttactcttagtcggagattctttggcgatgacttcattggggtacgatagcacaattacactatccttgaatgagtttaaatatcatgttgcctctgtgtgcagagctgaaggttcttccatggtagtggtagacatgccattcggtacgtttgaatcgggcatatctgatggcttgaagaatgccatagatatcatgaaattggacagtaaagtcacctcagtcaaagttgaagtcggttcttacaccaaagacaaatatgcaatgaaatttattgaagaactgtgctcccggggtatacctgttatggctcatataggactaactccccaaaaagttcattcacttggaggttataaagtgcaaggtagcaaaagtctattacaaatgcaggagctgtatgaaaccgccatgcaactacaaaaaattggctgttggtctatcctgattgaatgtgtcccccataagatggctcagttcataacatctaaactctcagtaccaacaataggtatcggtgcaggtaacggtaccagtggacaagttctagttatatctgaccttctcgggatgcaaggcgattctgtcccaaaatttgtgaagcaagctgtaaatatgacagatattgccactcagggcttgaaggagtacattgcaagtgtagaggataggacatttcctgagagaggtactcatactttcaaagttaaggaggacttatggaatgaattcctctcttcaattaacgaaaagtaa

SEQ ID NO: 746 - DNA, 939 bp, Artificial Sequence
  Description of Artificial Sequence: Synthetic polynucleotide
atgaatataatgaaaagacaattatgcacctcctctaagagatttttttctacagcaaaaaacgttgtcaaatataatacgattcaggatatcaggaacaaatattttactggtacgcctttgtccatgtgtactgcgtatgacttcattactgcaacatgggttaacaaggctaattgtgatttactcttagtcggagattctttggcgatgacttctttggggtacgatagcacaattacattatccttgaatgagtttaaatatcatgttgcctctgtgtgcagagctgaaggttcttccatggtagtggtagacatgccattcggtacgtttgaaagtggcatatctgatggcttgaagaatgccatagatatcatgaaattggacagtaaagtcacctctgtcaaagttgaagtcggttcttacaccaaagacaaatatgcaatgaaatttattgaagaattgtgctccagaggtatacctgttatggctcatataggattaactccccaaaaagttcattctcttggaggttataaagtgcaaggtagcaaaagtttgttacaaatgcaggagttgtatgaaaccgccatgcaattacaaaaaattggctgttggtctatcttgattgaatgtgtcccccataagatggctcagttcataacatctaaactctccgtaccaacaataggtatcggtgcaggtaacggtaccagtggacaagttttggttatatctgaccttctcgggatgcaaggcgattctgtcccaaaatttgtgaagcaagctgtaaatatgacagatattgccactcagggcttgaaggagtacattgcaagtgtagaggataggacatttcctgagagaggtactcatactttcaaagttaaggaggacttatggaatgaattcctctcttccattaacgaaaagtga

SEQ ID NO: 747 - DNA, 1356 bp, Saccharomyces cerevisiae
atgtcagaagtttccaaatggccagcaatcaacccattccattggggatacaatggtacagtttcgcatattgtcggtgaaaatggttccattaaactccatttaaaagacaacaaggagcaagttgattttgacgagttcgctaacaaatatgtcccaacgttgaagaatggtgcccaattcaaattgagtccttacttgttcacaggtattttgcaaactttgtacttaggtgctgctgatttctctaagaaatttcctgtattctacggcagggaaattgtcaaattctcggatggtggagtttgcaccgctgactggctcatagattcatggaaaaaggattatgaattcgatcaaagtactacgagctttgataaaaaaaaatttgataaagacgagaaggcgacacatccagaaggatggcctcgtttacaaccacgtacaaggtacctgaaagataatgagttggaagaactacgggaggttgatctacccctagtagttattctacatggtcttgctggtggtagtcatgagccgattataagatctcttgctgaaaacctgtctcgcagtgggagatttcaagtggtcgtcctaaataccagaggttgtgcacgttccaaaattaccaccagaaatttatttacagcttatcacacaatggatattcgcgagtttttgcaaagagaaaagcaaagacatccagatagaaaactatacgctgtgggatgctcttttggtgctacgatgctggcaaactatctgggagaagagggcgataaatcacctttatccgcagctgctactttgtgcaatccttgggatcttctcctttcagcaattaggatgagccaggattggtggtcaagaactttattttccaaaaatattgcgcaattcttaacaagaaccgttcaggttaatatgggtgaattaggagttccaaatggctctctccccgatcatcctcccacagtcaagaatccatctttctatatgttcacgcctgaaaatctaataaaggcaaagagctttaaatcgacccgggaatttgatgaagtgtacactgcgcctgctttaggcttcccaaatgctatggagtattataaagcggccagctcaataaacagagttgatacaattcgggttcctacccttgttatcaattccagggatgatcctgttgtcggcccagatcaaccatactcaatcgtggaaaagaatcctcgtattttgtattgtagaaccgatttaggtggtcatttagcttacctagataaagacaacaactcgtgggctaccaaggcaattgcagaatttttcactaagtttgatgaattagtcgtatga

SEQ ID NO: 748 - DNA, 1356 bp, Artificial Sequence
  Description of Artificial Sequence: Synthetic polynucleotide
atgtctgaagtttccaaatggccagcaatcaacccattccattggggatacaatggtacagtttctcatattgtcggtgaaaatggttccattaaactccatttaaaagacaacaaggagcaagttgattttgacgagttcgctaacaaatatgtcccaacgttgaagaatggtgcccaattcaaattgagtccttacttgttcacaggtattttgcaaactttgtacttaggtgctgctgatttctctaagaaatttcctgtattctacggcagggaaattgtcaaattcagtgatggtggagtttgcaccgctgactggctcatagattcttggaaaaaggattatgaattcgatcaaagtactacgagctttgataaaaaaaaatttgataaagacgagaaggcgacacatccagaaggatggcctcgtttacaaccacgtacaaggtacttgaaagataatgagttggaagaattaagagaggttgatttgcccttagtagttattttgcatggtcttgctggtggtagtcatgagccgattataagatctcttgctgaaaacttatctcgcagtgggagatttcaagtggtcgtcttgaataccagaggttgtgcacgttccaaaattaccaccagaaatttatttacagcttatcacacaatggatattcgcgagtttttgcaaagagaaaagcaaagacatccagatagaaaactttacgctgtgggatgctcttttggtgctacgatgttagcaaactatttgggagaagagggcgataaatctcctttatccgcagctgctactttgtgcaatccttgggatcttctcctttctgcaattaggatgagccaggattggtggtccagaactttattttccaaaaatattgcgcaattcttaacaagaaccgttcaggttaatatgggtgaattaggagttccaaatggctctctccccgatcatcctcccacagtcaagaatccatctttctatatgttcacgcctgaaaatttgataaaggcaaagagctttaaatctaccagagaatttgatgaagtgtacactgcgcctgctttaggcttcccaaatgctatggagtattataaagcggccagcagtataaacagagttgatacaattagagttcctacccttgttatcaattccagggatgatcctgttgtcggcccagatcaaccatactctatcgtggaaaagaatcctcgtattttgtattgtagaaccgatttaggtggtcatttagcttacttggataaagacaacaacagttgggctaccaaggcaattgcagaatttttcactaagtttgatgaattagtcgtatga

SEQ ID NO: 749 - DNA, 2568 bp, Saccharomyces cerevisiae
atgtctgaaggaaaacaacaattcaaagacagcaataaaccgcacaaggactccacagatcaggacgatgatgccgccacaatagtaccacaaactcttacttactcacgcaacgaaggtcattttttaggcagtaatttccatggagtaactgatgaccgtaccactttgtttgatggtgaagaggggcgtagggaggatgatttgttgccctcattgcgttcctccaactcaaaagcacacttaatttcttcacaacttagccagtggaattataacaacaatagagtacttttaaaaagatctatattaaagacacaagcttttatggatcaacttcaagaagaaaataatattcgcccgatttttattgctgcaaatgatgaacgggaaaaattacatgttctacaactgaatatcaagctagatggtcagtacaataccaaagaaaagaacggtttcaacattgagaaaaaagctttatcaaaattatttcactctcagatcgtatcagtgacaaatcatttaaacgctttgaaaaaaagagtggatgacgtttcatctaaagtattcatcacaggtgatgtaaatactggtaaatcagctctttgcaactctctattaaagcagcgtttgctacctgaggatcagctaccatgtaccaatgtattttccgaaatactagaggctcgggaaaatgacggcatagaggaggttcatgccataccactaaacattgctccgactctcaaggaagccattgatatgtattcaatacaaaatcccaagacttatgaaatacacactttgaaagaacttcccgatttggttccccaaaacggaaaatatgctttactgaagatttacataaaggacgataaaaggcctgcctctactagtctattaaggaatggtactgttgatatttcattaattgactcccctgggttgaacatggactcgttacaaaccgccgaagtaatgtcccgacaagaagaaatcgacttagttatatttgttgtcaatgcagagaaccagctaacactatctgccaaggagtttatttctttagcatctcgtgagaaaaaattaatgttttttgttgtgaaaaaatttgacaaaatcagggacaaacaacgttgtaaggagttgatcctaaagcaaatccgtgacctgtccccagaaacatataaacgtgcagctgattttgtccactttgtttccaaaaacggagatgaattgccacattatcataatgaaaatgacaatgaagatcatggtgaccgaaaacctgacgacgacccatattctagcagcgatcccgatccggattttgacagtctggaagattctctacgcaattttgttttgaagaaaagatcactttctaaattgttacctgccaagacttatctatcgaaattattaagcgatataataatgatctccaaatctaatatgaaaatgtatagtgaagaagaaataaaaattaacgaacaactggaaacattgagacctgaaattttgagcgctagagcaaagtgcaatgatttaacaacttccgttgatcaaatggccgagcaaacaattacaatgacttataacaatactaaagaagcacttctcaatgcgttggatgttccgctacacgaatatccgaaatatcagggcctcggtcaaatttatgacttcatattttcaacagaagcgttcatagcaaatcagattgatgagtcaataggatcaagtgaattatttgccaagcaaaagacagatttactggtaaaaaaaatttatgagattggaaaaaatgaacttggtgatgatttcatgtgtgaacgtgttttcagaagcgaactaatgtttagaaaaaggaagcatttgataggaaaaaggcttaaagtatctttgtcaataactgatttgtttgctccaacttggaaaggctttttgtcttacttaagctggcagaaacctgtcacagcaccactgccggatatagaaggacaaactaacgagggtcagattggcctaatgaagtatttgggtttgaaaaattatcctttgacacaatattggtcaagaccatcattgctcttcacatcaaaaattcccactctaacgctgtactttctaggaagtacaaaggttgtggggaacattatattaaacggcattaaattatcgtcgtggagctcactcaagaagttatcagttccggttatagtggtaggttccttgttgggacttacgtatttaattcatgacctcccccgtgccttaccaatgaatctttccattaaatacaaaagaaagttgcaagaactggattacattcatcttaacgctcaaagaacctcaaatgaagtacgtgatgttttgcgtgtacctacacgtgaaattctaaggtcgtgtgaaataattatggataaaaaacaaatcactaagaaagaattggaaaacaaaaaagaaagtaacttgttgtcaatcaaattcttccaatctctatacgaaggaaccgtggctcaaaaattgatggtggaagaaataaatttagacatcgattag

SEQ ID NO: 750 - DNA, 2568 bp, Artificial Sequence
  Description of Artificial Sequence: Synthetic polynucleotide
atgtctgaaggaaaacaacaattcaaagacagcaataaaccgcacaaggactccacagatcaggacgatgatgccgccacaatagtaccacaaactcttacttactctcgcaacgaaggtcattttttaggcagtaatttccatggagtaactgatgaccgtaccactttgtttgatggtgaagaggggcgtagggaggatgatttgttgccctctttgcgttcctccaactccaaagcacacttaatttcttctcaacttagccagtggaattataacaacaatagagtacttttaaaaagatctatattaaagacacaagcttttatggatcaacttcaagaagaaaataatattcgcccgatttttattgctgcaaatgatgaaagagaaaaattacatgttttgcaattgaatatcaagttggatggtcagtacaataccaaagaaaagaacggtttcaacattgagaaaaaagctttatccaaattatttcactctcagatcgtatctgtgacaaatcatttaaacgctttgaaaaaaagagtggatgacgtttcttctaaagtattcatcacaggtgatgtaaatactggtaaatctgctctttgcaactctttattaaagcagcgtttgttacctgaggatcagttaccatgtaccaatgtattttccgaaatattggaggctagagaaaatgacggcatagaggaggttcatgccataccattgaacattgctccgactctcaaggaagccattgatatgtattctatacaaaatcccaagacttatgaaatacacactttgaaagaacttcccgatttggttccccaaaacggaaaatatgctttattgaagatttacataaaggacgataaaaggcctgcctctactagtttgttaaggaatggtactgttgatatttctttaattgactcccctgggttgaacatggactctttacaaaccgccgaagtaatgtccagacaagaagaaatcgacttagttatatttgttgtcaatgcagagaaccagttgacattatctgccaaggagtttatttctttagcatctcgtgagaaaaaattaatgttttttgttgtgaaaaaatttgacaaaatcagggacaaacaacgttgtaaggagttgatcttgaagcaaatccgtgacttatccccagaaacatataaacgtgcagctgattttgtccactttgtttccaaaaacggagatgaattgccacattatcataatgaaaatgacaatgaagatcatggtgacagaaaacctgacgacgacccatattctagcagcgatcccgatccggattttgacagtttagaagattctttacgcaattttgttttgaagaaaagatctctttctaaattgttacctgccaagacttatttatccaaattattaagcgatataataatgatctccaaatctaatatgaaaatgtatagtgaagaagaaataaaaattaacgaacaattggaaacattgagacctgaaattttgagcgctagagcaaagtgcaatgatttaacaacttccgttgatcaaatggccgagcaaacaattacaatgacttataacaatactaaagaagcacttctcaatgcgttggatgttccgttgcacgaatatccgaaatatcagggcctcggtcaaatttatgacttcatattttctacagaagcgttcatagcaaatcagattgatgagagtataggaagtagtgaattatttgccaagcaaaagacagatttattggtaaaaaaaatttatgagattggaaaaaatgaacttggtgatgatttcatgtgtgaacgtgttttcagaagcgaattgatgtttagaaaaaggaagcatttgataggaaaaaggcttaaagtatctttgagcataactgatttgtttgctccaacttggaaaggctttttgtcttacttaagctggcagaaacctgtcacagcaccattaccggatatagaaggacaaactaacgagggtcagattggcttaatgaagtatttgggtttgaaaaattatcctttgacacaatattggtccagaccatctttgctcttcacaagtaaaattcccactttaacgttgtactttttgggaagtacaaaggttgtggggaacattatattaaacggcattaaattatcttcttggagctctctcaagaagttaagtgttccggttatagtggtaggttccttgttgggacttacgtatttaattcatgacctcccccgtgccttaccaatgaatctttccattaaatacaaaagaaagttgcaagaattagattacattcatcttaacgctcaaagaacctctaatgaagtacgtgatgttttgcgtgtacctacacgtgaaattttaaggagttgtgaaataattatggataaaaaacaaatcactaagaaagaattggaaaacaaaaaagaaagtaacttgttgtccatcaaattcttccaatctttgtacgaaggaaccgtggctcaaaaattgatggtggaagaaataaatttagacatcgattga

SEQ ID NO: 751 - DNA, 1719 bp, Saccharomyces cerevisiae
atgggaagcgaaccgtttcagaaaaagaatttgggtctgcaaattaattcgcaagaaagtggaacaacccgctcaacatttcattcgctagaagatctaggagatgatgtaattaatgaaagctgggatcaggtgaaccaaaagagagccaatatagatcatgatgtctttcatgagcaccctgactcttccccatcattgtcagcacagaaagcaaaaacaaaagaagaggaagttgctgtaaagtcatcgaactcccagtcaagagacccttctcctgatactcaagcacatattccatatacttatttttccaaggatcaaagactaatcatttttggaattatcatttttataggatttttgggcccaatgtctggaaacatatatataccggctttaccattgctgcaaagggaatatgatgtaagtgcaacaacaataaacgctacagtttctgtatttatggctgttttttccgttggtccattgttttggggcgcactggcggattttggtggaaggaaattcttatatatggtgtcgttatcactaatgttaattgttaatatacttttggccgctgtaccagtcaatattgctgccctttttgttttaagaattttccaagctttcgcttccagctctgtgatttctctgggagctggcactgtaacagacgttgttcctccaaaacacaggggaaaggccatagcgtatttcatgatgggtccaaacatgggtcctattatagcacccattgttgctgggcttattttaatgaaaggaaattactggagatggctttttggtttcacttctatcatgacaggaatagcattgatcttggttactgctttacttccagaaacgctacgttgtatagttggtaatggagaccctaaatggggtgacaaaaaagatgaacgtgaaaataacgaatctccattcttcgaaggtaataaaatatcacatcggcgtctgttcccagacattggtatccgtaaaccagtcaataatgatgctttcttccaagaaaattttccaaagccgcctaaagcaggtttgacactatattggaaaatgattaaatgtcctccaataataatcacgtccgtcagtactgcactcctgttctccagttactatgcgttcagcgtcacgttttcgtattaccttgaacatgactaccgttttactatgttagaaattggtgctgcttatgtctgcccaggtgtagctatgttactaggatctcaatctggtgggcacctctcagattatcttcgttcacgctggatcaaaagtcatcctaaaaagaaattcccggcagagtttcgtttattactgaacctaattggaattttactaacaatatgtggcacaataggatacggatgggcaatcttctttcattatcattttgtggttcttttagttttttccgctctcactgcctttggtatgacctggtgcagcaacacatcaatgacatatttaactgagttattccccaaaagagctgctggaactgttgctgttagtagtttctttcgaaatgtgggcgctgccattagttccgctatcattttacagctctgtaacgcaatgggaattggatggtgttttacagggctcggtctctgcagttcaatttcattgattggtatattatatcttctcatttttcaaagaaaatatactgccaaagaattttaa

SEQ ID NO: 752 - DNA, 1719 bp, Artificial Sequence
  Description of Artificial Sequence: Synthetic polynucleotide
atgggaagcgaaccgtttcagaaaaagaatttgggtttacaaattaattctcaagaaagtggaacaacccgctctacatttcattctttggaagatttgggagatgatgtaattaatgaaagctgggatcaggtgaaccaaaagagagccaatatagatcatgatgtctttcatgagcaccctgactcttccccatctttgagtgcacagaaagcaaaaacaaaagaagaggaagttgctgtaaagtcttccaactcccagtctagagacccttctcctgatactcaagcacatattccatatacttatttttccaaggatcaaagattgatcatttttggaattatcatttttataggatttttgggcccaatgtctggaaacatatatataccggctttaccattgttgcaaagggaatatgatgtaagtgcaacaacaataaacgctacagtttctgtatttatggctgttttttccgttggtccattgttttggggcgcattagcggattttggtggaaggaaattcttatatatggtgtctttaagtttaatgttaattgttaatatacttttggccgctgtaccagtcaatattgctgccctttttgttttaagaattttccaagctttcgcttccagctctgtgatttctttgggagctggcactgtaacagacgttgttcctccaaaacacaggggaaaggccatagcgtatttcatgatgggtccaaacatgggtcctattatagcacccattgttgctgggcttattttaatgaaaggaaattactggagatggctttttggtttcacttctatcatgacaggaatagcattgatcttggttactgctttacttccagaaacgttgcgttgtatagttggtaatggagaccctaaatggggtgacaaaaaagatgaacgtgaaaataacgaatctccattcttcgaaggtaataaaatatctcatcgtcgtttattcccagacattggtatccgtaaaccagtcaataatgatgctttcttccaagaaaattttccaaagccgcctaaagcaggtttgacattatattggaaaatgattaaatgtcctccaataataatcacgtccgtcagtactgcactcttgttctccagttactatgcgttcagcgtcacgttttcttattaccttgaacatgactaccgttttactatgttagaaattggtgctgcttatgtctgcccaggtgtagctatgttattaggatctcaatctggtgggcacctctctgattatcttcgttcccgctggatcaaaagtcatcctaaaaagaaattcccggcagagtttcgtttattattaaacttgattggaattttattaacaatatgtggcacaataggatacggatgggcaatcttctttcattatcattttgtggttcttttagttttttccgctctcactgcctttggtatgacctggtgcagcaacacatctatgacatatttaactgagttattccccaaaagagctgctggaactgttgctgttagtagtttctttagaaatgtgggcgctgccattagttccgctatcattttacagctctgtaacgcaatgggaattggatggtgttttacagggctcggtctctgcagttctatttctttgattggtatattatatcttctcatttttcaaagaaaatatactgccaaagaattttga

SEQ ID NO: 753 - DNA, 711 bp, Saccharomyces cerevisiae
atgaagttgaacatttcttacccagtcaacgggtctcaaaagaccttcgaaattgatgatgaacaccgtattcgtgttttcttcgacaagagaatcggtcaagaagtcgatggtgaagccgttggtgatgaattcaagggctacgtcttcaagatctctggtggtaacgacaaacaaggtttcccaatgaagcaaggtgttttgttgccaactagaatcaagttgttgttgaccaagaacgtttcttgttacagaccaagacgtgatggtgaaagaaagagaaagtccgtcagaggtgccattgttggtccagatttggctgtcttggctttggtcattgtcaagaagggtgaacaagaattggaaggtctaactgacactactgttccaaagagattgggtccaaagagagctaacaacatcagaaagttcttcggtttgtccaaggaagatgacgttcgtgatttcgtcatcagaagagaagtcaccaagggtgaaaagacttacaccaaggctccaaagatccaaagattggttactcctcaaagattgcaaagaaagagacaccaaagagctttgaaggtcagaaacgctcaagctcaaagagaagctgctgccgaatacgctcaattgttggctaagagattgtctgaaagaaaggctgaaaaggccgaaatcagaaagagaagagcttcttctttgaaggcttaa

SEQ ID NO: 754 - DNA, 711 bp, Artificial Sequence
  Description of Artificial Sequence: Synthetic polynucleotide
atgaagttgaacatttcttacccagtcaacgggtctcaaaagaccttcgaaattgatgatgaacaccgtattcgtgttttcttcgacaagagaatcggtcaagaagtcgatggtgaagccgttggtgatgaattcaagggctacgtcttcaagatctctggtggtaacgacaaacaaggtttcccaatgaagcaaggtgttttgttgccaactagaatcaagttgttgttgaccaagaacgtttcttgttacagaccaagacgtgatggtgaaagaaagagaaagtccgtcagaggtgccattgttggtccagatttggctgtcttggctttggtcattgtcaagaagggtgaacaagaattggaaggtttgactgacactactgttccaaagagattgggtccaaagagagctaacaacatcagaaagttcttcggtttgtccaaggaagatgacgttcgtgatttcgtcatcagaagagaagtcaccaagggtgaaaagacttacaccaaggctccaaagatccaaagattggttactcctcaaagattgcaaagaaagagacaccaaagagctttgaaggtcagaaacgctcaagctcaaagagaagctgctgccgaatacgctcaattgttggctaagagattgtctgaaagaaaggctgaaaaggccgaaatcagaaagagaagagcttcttctttgaaggcttga

SEQ ID NO: 755 - DNA, 1359 bp, Saccharomyces cerevisiae
atgggtagaagaaaaattgaaattgaacctatcaaagatgatagaaatcgtacagttactttcataaagcgaaaagcaggactatttaaaaaggctcatgaattgtcagtactttgccaagtagacattgctgtcattattttaggatccaataatacattctacgaatactcttctgttgatatgagtaacctgcttaatgttcatcaaaacaacactgatcttcctcataatatcatagaaccatctgattatggtgactatgtgaaaaaaccacgtgttgttctgaatgaaaggaagcgcaggcgaagaagagcaaccgtgttgcaaccagcttcccattctgggagttgtacagtttcgagtcaagattcctccagtgtacaaaacaatgggaatttaagcgctccgttggcgtcaaatgacgccgggaacgctggtgtaagtacaccattggtgcattgccacggagcaatatcacgtagcggatccaatcattctgactgtgcaagaaatagtgcagattatcaaatgttgcaaggcggtttaaattctggtgggagttttcatgctaatgattataaagaaagcgtagaccaacagcatgttgcaaacgaggctattcataggaattttatgaacaagaggattaggccggatactcatttactactttctgaatctaaccactctaattatcataatttttacccgtcgccttacgagaatttgccaaagccttcattgcctgcaagtttagtgggcaatattccatcctttcaatcgcaatttgtacaggttattccggcaaatagtaacccaatgggaaaaggatttaatgggacgggtgacagcgagagctttgaagcaaagcaaaagatacacccgacagttgctatatcaaatactttggaaggtccagctccagtgcaggcgatggtccatcacctgcaccaactgaacagcaatagaggaaagctctcagggaagccatatttaaagctaaatattccgaaggccacaaatgacgcttgccagaggtcgccagcaatgtattcaggaaccgcatcaccgaaaacggatgtacaagccactcccaatcaaatgctcgccagcaacatgtcctcccctctttctcgttcaaagtttttgggattcaagaacaatgatatggacgacttatatcataatggccgatgtggcagcacttatgtaaataacaaaacattctttctgaaaccgccaattggaagaccgcctaaatttccgaaaagcccgtcttcatctattgtggtttttccttcctcggtagctagttcaactttgaaatccacgagttcgacaaactctccagattaa

SEQ ID NO: 756 - DNA, 1359 bp, Artificial Sequence
  Description of Artificial Sequence: Synthetic polynucleotide
atgggtagaagaaaaattgaaattgaacctatcaaagatgatagaaatcgtacagttactttcataaagagaaaagcaggattatttaaaaaggctcatgaattgagtgtactttgccaagtagacattgctgtcattattttaggatccaataatacattctacgaatactcttctgttgatatgagtaacttacttaatgttcatcaaaacaacactgatcttcctcataatatcatagaaccatctgattatggtgactatgtgaaaaaaccacgtgttgttttgaatgaaaggaagcgcaggagaagaagagcaaccgtgttgcaaccagcttcccattctgggagttgtacagtttctagtcaagattcctccagtgtacaaaacaatgggaatttaagcgctccgttggcgtctaatgacgccgggaacgctggtgtaagtacaccattggtgcattgccacggagcaatatctcgtagcggatccaatcattctgactgtgcaagaaatagtgcagattatcaaatgttgcaaggcggtttaaattctggtgggagttttcatgctaatgattataaagaaagcgtagaccaacagcatgttgcaaacgaggctattcataggaattttatgaacaagaggattaggccggatactcatttattactttctgaatctaaccactctaattatcataatttttacccgtctccttacgagaatttgccaaagccttctttgcctgcaagtttagtgggcaatattccatcctttcaatctcaatttgtacaggttattccggcaaatagtaacccaatgggaaaaggatttaatgggacgggtgacagcgagagctttgaagcaaagcaaaagatacacccgacagttgctatatccaatactttggaaggtccagctccagtgcaggcgatggtccatcacttgcaccaattgaacagcaatagaggaaagctcagtgggaagccatatttaaagttgaatattccgaaggccacaaatgacgcttgccagaggtctccagcaatgtattctggaaccgcaagtccgaaaacggatgtacaagccactcccaatcaaatgctcgccagcaacatgtcctcccctctttctcgttccaagtttttgggattcaagaacaatgatatggacgacttatatcataatggcagatgtggcagcacttatgtaaataacaaaacattctttttgaaaccgccaattggaagaccgcctaaatttccgaaaagcccgtcttcttctattgtggtttttccttcctctgtagctagttctactttgaaatccacgagttctacaaactctccagattga

SEQ ID NO: 757 - DNA, 195 bp, Saccharomyces cerevisiae
atgaagattttcacgctgtataccatgattcagcaatacttttttgataatggcggtgtttatagtataaagaatttttattctgcagttccgaaggagaaaatgaacataattcttgtttcacttgattgtgagctccaaaagcttgctcttaagctgtcaaagaaaactagtggcactcacactacgcactag

SEQ ID NO: 758 - DNA, 195 bp, Artificial Sequence
  Description of Artificial Sequence: Synthetic polynucleotide
atgaagattttcacgctttataccatgattcagcaatacttttttgataatggcggtgtttatagtataaagaatttttattctgcagttccgaaggagaaaatgaacataattcttgtttcccttgattgtgagctccaaaagcttgctcttaagttatccaagaaaactagtggcactcacactacgcactga

SEQ ID NO: 759 - DNA, 951 bp, Saccharomyces cerevisiae
atgggaatatttcgttggaactatccagagagttctgtccccggcgtttggggagaaacaacttccactattgactggtgtgaggagaactatgtcgtttctccctatattgccgagtggtcaaacactttaactaacagcgtattcatactgtcagcgatttacacaacttactctgcttacaagaataaattagaaaaaaggtttttacttattggcttcgggtacggtttggtcggagtaggatcatggctatttcatatgacactgaagtatagattccaactattggatgaacttccaatgatatacgccatgtgcattccgacatggagtttagtatgcgaggccaaagaggcattacttaacggagataatcacaagaaggttcctctatttgaacagatattcatcggcgtaattatcggcctggccgttacaacagcaagcatactctacgttatttacaaaaatgtcgatatccatcaaattttgtttggcgtacagattgtagttgtggctgctactgcaggaagtttgacgtacagatacgtccatgatccacttgccaaaagaaatctcaaggcttcaatggcgctcggcgcaattttgttcttatctggctacatttcgtggctacttgatatacactattgttcgttctgggtgcacgttagaagaagtattttggctttaccacttggtgtactgcttgaaccacacggatggtggcatatattaactggtatggggatttatttctacattgtttctttggaacatttaagggtcattacgctcaacgtcagctgcaattaccagttcatctggagatggaaagtcttccctgaactgatatggaaagggcgcaaaccctcaacaagatattcacttgaactatttggcccatacgtagaagatcaatcaattgaagttaaaaaggagaagtaa

SEQ ID NO: 760 - DNA, 951 bp, Artificial Sequence
  Description of Artificial Sequence: Synthetic polynucleotide
atgggaatatttcgttggaactatccagagagttctgtccccggcgtttggggagaaacaacttccactattgactggtgtgaggagaactatgtcgtttctccctatattgccgagtggagcaacactttaactaacagcgtattcatattatctgcgatttacacaacttactctgcttacaagaataaattagaaaaaaggtttttacttattggcttcgggtacggtttggtcggagtaggatcttggttatttcatatgacattgaagtatagattccaattattggatgaacttccaatgatatacgccatgtgcattccgacatggagtttagtatgcgaggccaaagaggcattacttaacggagataatcacaagaaggttcctttatttgaacagatattcatcggcgtaattatcggcttggccgttacaacagcaagcatactctacgttatttacaaaaatgtcgatatccatcaaattttgtttggcgtacagattgtagttgtggctgctactgcaggaagtttgacgtacagatacgtccatgatccacttgccaaaagaaatctcaaggcttccatggcgctcggcgcaattttgttcttatctggctacatttcttggttacttgatatacactattgttctttctgggtgcacgttagaagaagtattttggctttaccacttggtgtattgcttgaaccacacggatggtggcatatattaactggtatggggatttatttctacattgtttctttggaacatttaagggtcattacgctcaacgtcagctgcaattaccagttcatctggagatggaaagtcttccctgaattgatatggaaagggcgcaaaccctccacaagatattctcttgaattatttggcccatacgtagaagatcaatctattgaagttaaaaaggagaagtga

SEQ ID NO: 761 - DNA, 1572 bp, Saccharomyces cerevisiae
atgtaccaaaataatgtattgaatgctattttggcttctgaaaaatcaaactttcaatacgatagtggaacaatattaagaaaccacaaaagaccaataataacatttaataacaacatagagcacacagtatccgaacctaataattttacaggctatgaggaaaaggaagatttggatataatggatatttgtccttattacccaaaagcaagaatgctggcggatgccattcaacatgccaaaacgagcgcaagtgaaaacaaaatggaactatcaatgaaaactatcccatgtctcaagaaggaaaacgtccatgttgagaaagggcacgattggtctcaactcagtacgagcagaatttgtaaaattttagaagacatagcagataaaaaaaataaaactagaaggcaatctgccccattacaaaagacgaagtatttcccaacaaatgagaatcaaaataccgatatagaaaatcagaattggtcccaaatccccaatgaagacatatgtgcacttatagagaagattgctagcagacgcaataaaaatcgcaaacggaaaaatctttcatgttctaaagtccaagaaattcagggaaatattgatttacccaaaaaagacgtacaagagggagatatttcagattcgtctctatttgcagcagtaagaggaaccaaaaaagtttccggatatgattacaattcagaagataagatacctaatgcgatacgtcttccttactgtaagcaaatattacgattattctcacttttacaaatgaagagaaatgacttaatagtcacctctgaaaattgtaatagcggagttttcttcagcaattttaattatcaacttcaagttaaatcgaattgtattgcaaatatttcttctacactcagttttctaccccatcatgaaataaccgtatacacatcctttattctctatccaaacgttgtcgataatatttgggaatgcacacgatacgctattcaacttttgaagtccgaagcagcacagtttacgctactgcgtgatatatatagtggcttcacaattatactttcaaatcatcgatatcatcctaagggttttagcgctgattactgttacagtgcaaatgaattgacattatttctttttgttattcgaacagggcaaaaaaaagtactttatcgatctattcctcacaacacagcagcaattgaaaaagacagttcttttgatacagaaaatagaaagagaaggtccgaggaagaggttgttcttaaatgtaggaagtgttctaataattcattggcattaaaagaaatcagcacctatcgtttggatagcgcagaaggttttgagaagtctcagcctctaaaagatgaagcaaagctcagtgatatgaattatgtacaaggtagtatcagctataacaggactattcttaccggcttatggaaattatttcacagattgtgctgcaaagatcgttataggaaaaccaatctgtcagaaacattgttctatgacgattcaacggaaagatgggttagaatgggagagttaatgcactattga

SEQ ID NO: 762 - DNA, 1572 bp, Artificial Sequence
  Description of Artificial Sequence: Synthetic polynucleotide
atgtaccaaaataatgtattgaatgctattttggcttctgaaaaaagtaactttcaatacgatagtggaacaatattaagaaaccacaaaagaccaataataacatttaataacaacatagagcacacagtatccgaacctaataattttacaggctatgaggaaaaggaagatttggatataatggatatttgtccttattacccaaaagcaagaatgttggcggatgccattcaacatgccaaaacgagcgcaagtgaaaacaaaatggaattatctatgaaaactatcccatgtctcaagaaggaaaacgtccatgttgagaaagggcacgattggtctcaactcagtacgagcagaatttgtaaaattttagaagacatagcagataaaaaaaataaaactagaaggcaatctgccccattacaaaagacgaagtatttcccaacaaatgagaatcaaaataccgatatagaaaatcagaattggtcccaaatccccaatgaagacatatgtgcacttatagagaagattgctagcagacgcaataaaaatcgcaaaagaaaaaatctttcctgttctaaagtccaagaaattcagggaaatattgatttacccaaaaaagacgtacaagagggagatatttctgattcttctttatttgcagcagtaagaggaaccaaaaaagtttccggatatgattacaattctgaagataagatacctaatgcgatacgtcttccttactgtaagcaaatattaagattattctctcttttacaaatgaagagaaatgacttaatagtcacctctgaaaattgtaatagcggagttttcttcagcaattttaattatcaacttcaagttaaatctaattgtattgcaaatatttcttctacactcagttttttgccccatcatgaaataaccgtatacacatcctttattctctatccaaacgttgtcgataatatttgggaatgcacaagatacgctattcaacttttgaagtccgaagcagcacagtttacgttattacgtgatatatatagtggcttcacaattatactttctaatcatcgttatcatcctaagggttttagcgctgattactgttacagtgcaaatgaattgacattatttctttttgttattagaacagggcaaaaaaaagtactttatagatctattcctcacaacacagcagcaattgaaaaagacagttcttttgatacagaaaatagaaagagaaggtccgaggaagaggttgttcttaaatgtaggaagtgttctaataattctttggcattaaaagaaatcagcacctatcgtttggatagcgcagaaggttttgagaagtctcagcctttgaaagatgaagcaaagctcagtgatatgaattatgtacaaggtagtatcagctataacaggactattcttaccggcttatggaaattatttcacagattgtgctgcaaagatcgttataggaaaaccaatttatctgaaacattgttctatgacgattctacggaaagatgggttagaatgggagagttaatgcactattga

SEQ ID NO: 763 - DNA, 837 bp, Saccharomyces cerevisiae
atgagtgtattaagatctacatgccttttcttccctccaagatccttgttgatatcatttaacaagcggcgattattttcaacttcgaggttaattttgaataaagaaagtgaaactacaaagaagaaagataaaagtaagcagcaagattttaatcctcggcacctgggtgttgctgccgaaatatttatcccctcggcttacaagaaccttccaaatgtatttgctcatcctctcattgttgcaaatgcattgatcagaagactttacacgtttggtttgaactctgttcaagtcgcattgtttcgttttcaatcaggcattaaaccttcttttttactctggaaaaacaaagccatagagacgtatatcaatgtaaacacgtcatttgctcataaaaatttgtcggacatcaaagggttagtttcattatgggttcaggaagctctcgaggctaggtcccgtcaacttccaggtaatgcaacactggactggcagttgataaagtttaatgcagttcctaaactagtctcagtgcaaccaatcatgattcccggaatgccgttagagcatttacagttggtttacaaatttgatacgaagcaaagactaattaaagtcaatcagcaaactaagaagactgagacgttagaccgtgacgttgtagactatattgcctttttgtgtgatgctacaactaatgatatgattttaatgggatctttgtttgaaagtaaaccaaatgataaattaccgaaaagctacgaggacgatgctaaagttgccatacacagaatgaaagttaacggtgatatatatcgtttacctccaagctaa

SEQ ID NO: 764 - DNA, 837 bp, Artificial Sequence
  Description of Artificial Sequence: Synthetic polynucleotide
atgagtgtattaagatctacatgccttttcttccctccaagatccttgttgatatcctttaacaagagaagattattttccacttctaggttaattttgaataaagaaagtgaaactacaaagaagaaagataaaagtaagcagcaagattttaatcctcgtcacttgggtgttgctgccgaaatatttatcccctctgcttacaagaaccttccaaatgtatttgctcatcctctcattgttgcaaatgcattgatcagaagactttacacgtttggtttgaactctgttcaagtcgcattgtttcgttttcaaagtggcattaaaccttcttttttactctggaaaaacaaagccatagagacgtatatcaatgtaaacacgtcttttgctcataaaaatttgagtgacatcaaagggttagtttctttatgggttcaggaagctctcgaggctaggtcccgtcaacttccaggtaatgcaacattagactggcagttgataaagtttaatgcagttcctaaattggtctctgtgcaaccaatcatgattcccggaatgccgttagagcatttacagttggtttacaaatttgatacgaagcaaagattgattaaagtcaatcagcaaactaagaagactgagacgttagaccgtgacgttgtagactatattgcctttttgtgtgatgctacaactaatgatatgattttaatgggatctttgtttgaaagtaaaccaaatgataaattaccgaaaagctacgaggacgatgctaaagttgccatacacagaatgaaagttaacggtgatatatatcgtttacctccaagctga

SEQ ID NO: 765 - DNA, 1695 bp, Saccharomyces cerevisiae
atgagctacatagttgacctacaagtgcgaggatcatctctgagggttatcaaatgtatgtttagagaggatgagcaaatttcttctctacattctggttctgactcgaaacaaaacagcaacaaaaagctgggagaatttttgaatctgttaaaagcagtggtcaagaggaagttggaaagtttcccaaaagaccgtttaaagacttcgattataactggccaagaattaatgagagaggggcaaggaagtattgaaattaaggatccaccaacggaggcgcaacaacatttgattagaagcctagcaaaagttttattacaccagttttcaagcataaatggcaaagttaacacagtaaatgaaggacaagataatttgtttctatccttattcgttaaaaaaatttctatagagcaacagtccacatcacacgtctctattaaattgaactttcatgagaaaataaatttgggtcagcacatagattctattttagattcagaggagaccaacgagtcggacacttatcacatgggatctgttgacgagttcattatatatcccttttgctgtctggaagagcaagatgagctgaaaaatggcagcatactgtccacagagttcgacaagattgacttagaactagacgaggatgatggttttgagggagaaactttaaacaattgtatcaattcggtgggaaattttgacattccactaagtaagcaaacactaaacttagtaaatatatcatatcttccaggcacaactttcgagggccaatgggaatcgttgtattttggtaacaatattaaagaaaggttatatagctacgcaactatatctctcaagatagcaagattcaaacaaactggagactccaatcaagaagacattacaacgctaatcacaaataataaattactccttgtccatggtcctccgggaacaggtaaaacaacgttatgcaaagcactttgccaaaaattatctgtgaggcgggaattttcagacggttccgataccattgatactaattataaggggataataatagaattgtcttgtgcacgcatcttttctaaatggtttggagaatcgtcaaaaaatatatcaatagtattcaaagacattgaggagcttttaaaggtcaatgagggacgagggatctttatatgccttttgatagatgaggttgaagcaatagcaagttcaagaacaaatttgtcaagtagaaatgagtcaacagatggaatccgagttgtgaacactttacttacgcaacttgacaggctgaaaaaataccataactttttagcattagccacgtctaatttattagattcattagatgatgcttttgttgatcgagcagatggagttttttatgttggaaatccaacagctgagggcatcctccacattctaaaggtttgcatagaggagatgataacttcaggtataattctttttcacgcaagatcaactggagtcaagttcttcaataaatatcaggacattttgcggaaaattgctatcaaatgctcgaccgttgatatcagtggtagaacaataaggaaattgcccttgatgtgtctgtctgaatacttccggacatttcctgtagacgacgatgagtttgttctggcattagctatgtcagcgcggaagctgagcgcagcgcggaagtga

SEQ ID NO: 766 - DNA, 1695 bp, Artificial Sequence
  Description of Artificial Sequence: Synthetic polynucleotide
atgagctacatagttgacttgcaagtgagaggatcttctttgagggttatcaaatgtatgtttagagaggatgagcaaatttcttctttgcattctggttctgactctaaacaaaacagcaacaaaaagttgggagaatttttgaatttattaaaagcagtggtcaagaggaagttggaaagtttcccaaaagaccgtttaaagacttctattataactggccaagaattaatgagagaggggcaaggaagtattgaaattaaggatccaccaacggaggcgcaacaacatttgattagaagcttagcaaaagttttattacaccagttttctagcataaatggcaaagttaacacagtaaatgaaggacaagataatttgtttctttccttattcgttaaaaaaatttctatagagcaacagtccacaagtcacgtctctattaaattgaactttcatgagaaaataaatttgggtcagcacatagattctattttagattctgaggagaccaacgagagtgacacttatcacatgggatctgttgacgagttcattatatatcccttttgctgtttagaagagcaagatgagttgaaaaatggcagcatattatccacagagttcgacaagattgacttagaattagacgaggatgatggttttgagggagaaactttaaacaattgtatcaattctgtgggaaattttgacattccattaagtaagcaaacattgaacttagtaaatatatcttatcttccaggcacaactttcgagggccaatgggaatctttgtattttggtaacaatattaaagaaaggttatatagctacgcaactatatctctcaagatagcaagattcaaacaaactggagactccaatcaagaagacattacaacgttgatcacaaataataaattactccttgtccatggtcctccgggaacaggtaaaacaacgttatgcaaagcactttgccaaaaattatctgtgaggagagaattttctgacggttccgataccattgatactaattataaggggataataatagaattgtcttgtgcacgcatcttttctaaatggtttggagaatcttctaaaaatatatccatagtattcaaagacattgaggagcttttaaaggtcaatgagggaagagggatctttatatgccttttgatagatgaggttgaagcaatagcaagtagtagaacaaatttgagcagtagaaatgagtctacagatggaatcagagttgtgaacactttacttacgcaacttgacaggttgaaaaaataccataactttttagcattagccacgtctaatttattagattctttagatgatgcttttgttgatagagcagatggagttttttatgttggaaatccaacagctgagggcatcctccacattttgaaggtttgcatagaggagatgataacttctggtataattctttttcacgcaagatctactggagtcaagttcttcaataaatatcaggacattttgagaaaaattgctatcaaatgctccaccgttgatatcagtggtagaacaataaggaaattgcccttgatgtgtttgtctgaatacttcagaacatttcctgtagacgacgatgagtttgttttagcattagctatgagtgcgagaaagttgagcgcagcgagaaagtga

SEQ ID NO: 767 - DNA, 843 bp, Saccharomyces cerevisiae
atgggaaatatgataaagaaggcatctttaatagccctcctaccgctgttcaccgccgcagccgctgcagctactgatgcggagacatctatggaatctgggagttcttcacatttgaagtcttttttaatgtccgtttctatgattgggctttctgaaattggtgacaaaaccttcttgatcgcagccttgatggcaatgcgtcacaaaagagttctggtgttctcagcagcagctacctccctcgctattatgaccatcctttctggtgtggtgggtcattcagccgttgcttttctttctgaacgctatacagcattttttgcaggtattttattcttagtgttcggttacaaattgactatggaaggtttggagatgtctaaggatgcaggtgttgaggaggaaatggctgaagtggaggaagaaattgccattaaagacatgaaccaggatatggatgatgttgaaaaaggaggcgacactgcgtatgataaacagctgaagaacgcttcgattggtaaaaaaatagtgcacaggattcgcgaattagcatcatttatgttttccccagtttgggttcaaattttcctgatggttttcctaggcgagctaggtgaccgttcacaaattagtattattgccatggctactgacagcgactattggtatgttattgcaggtgctgttattggtcatgccatttgctctggattagcagtggtgggtgggaaattattggcaacaagaattagcataagaacaatcactcttgctagctcgttgttattcttcattttcgccttgatgtatatatatcaagcattcacaactcaggattga

SEQ ID NO: 768 - DNA, 843 bp, Artificial Sequence
  Description of Artificial Sequence: Synthetic polynucleotide
atgggaaatatgataaagaaggcatctttaatagccctcttgccgcttttcaccgccgcagccgctgcagctactgatgcggagacatctatggaatctgggagttcttctcatttgaagtcttttttaatgtccgtttctatgattgggctttctgaaattggtgacaaaaccttcttgatcgcagccttgatggcaatgcgtcacaaaagagttttggtgttcagtgcagcagctacctccctcgctattatgaccatcctttctggtgtggtgggtcattctgccgttgcttttctttctgaacgctatacagcattttttgcaggtattttattcttagtgttcggttacaaattgactatggaaggtttggagatgtctaaggatgcaggtgttgaggaggaaatggctgaagtggaggaagaaattgccattaaagacatgaaccaggatatggatgatgttgaaaaaggaggcgacactgcgtatgataaacagttgaagaacgcttccattggtaaaaaaatagtgcacaggattcgcgaattagcaagttttatgttttccccagtttgggttcaaattttcttaatggttttcttgggcgagttaggtgaccgttctcaaattagtattattgccatggctactgacagcgactattggtatgttattgcaggtgctgttattggtcatgccatttgctctggattagcagtggtgggtgggaaattattggcaacaagaattagcataagaacaatcactcttgctagctctttgttattcttcattttcgccttgatgtatatatatcaagcattcacaactcaggattga

SEQ ID NO: 769 - DNA, 423 bp, Saccharomyces cerevisiae
atgccctctctgcgagatttatcactagaaagggaccaagaattaaatcagttacgtgcccgtatcaaccagctgggcaaaacaggcaaagaagaagccaatgattttgttggtttaaatatttcaaatgaacctgtatatgacacggtgattcaaacaggacagagctctaacgcaacgaatagttttgtacaagaaactattcagaagacgaaacaaaaagagagtggtcagccatatattatcccccaaaaaaacgaacatcagcgttacatcgataaggtttgcgaaaccagcgatctcaaagccaaattagcgcctattatggaagtgctcgagaagaaaacgaatgaaaaaattaagggaataataaggaaaagggtattacaggaacccgaccgtgacaatgatgatagcggctga

SEQ ID NO: 770 - DNA, 423 bp, Artificial Sequence
  Description of Artificial Sequence: Synthetic polynucleotide
atgccctctttaagagatttaagtttagaaagggaccaagaattaaatcagttacgtgcccgtatcaaccagttaggcaaaacaggcaaagaagaagccaatgattttgttggtttaaatatttctaatgaacctgtatatgacacggtgattcaaacaggacagagctctaacgcaacgaatagttttgtacaagaaactattcagaagacgaaacaaaaagagagtggtcagccatatattatcccccaaaaaaacgaacatcagcgttacatcgataaggtttgcgaaaccagcgatctcaaagccaaattagcgcctattatggaagtgctcgagaagaaaacgaatgaaaaaattaagggaataataaggaaaagggtattacaggaacccgaccgtgacaatgatgatagcggctga

SEQ ID NO: 771 - DNA, 588 bp, Saccharomyces cerevisiae
atgccaagagctccaagaacttactctaagacttactctacaccaaagagaccttacgaatcttctcgtttggacgcagaattgaagttggccggtgaattcggtttgaagaacaagagagaaatttacagaatttctttccaattgtctaaaattcgtcgtgctgccagagacttgttaactagagacgaaaaggacccaaagagattgttcgaaggtaatgccttgatcagaagattggttagagttggtgtcttgtccgaagacaagaagaagttggattatgttttggctttgaaggttgaagatttcttggaaagaagattgcaaactcaagtctacaagttgggtttggccaagtctgtccaccacgccagagttttaatcactcaaagacacattgctgttggtaagcaaatcgtcaacatcccatctttcatggtcagattggactctgaaaagcacattgacttcgctccaacttctccattcggtggtgctagaccaggtagagttgctagaagaaacgctgctagaaaggctgaagcttccggtgaagctgctgaagaagccgaagacgaagaataa

SEQ ID NO: 772 - DNA, 588 bp, Artificial Sequence
  Description of Artificial Sequence: Synthetic polynucleotide
atgccaagagctccaagaacttactctaagacttactctacaccaaagagaccttacgaatcttctcgtttggacgcagaattgaagttggccggtgaattcggtttgaagaacaagagagaaatttacagaatttctttccaattgtctaaaattcgtcgtgctgccagagacttgttaactagagacgaaaaggacccaaagagattgttcgaaggtaatgccttgatcagaagattggttagagttggtgtcttgtccgaagacaagaagaagttggattatgttttggctttgaaggttgaagatttcttggaaagaagattgcaaactcaagtctacaagttgggtttggccaagtctgtccaccacgccagagttttaatcactcaaagacacattgctgttggtaagcaaatcgtcaacatcccatctttcatggtcagattggactctgaaaagcacattgacttcgctccaacttctccattcggtggtgctagaccaggtagagttgctagaagaaacgctgctagaaaggctgaagcttccggtgaagctgctgaagaagccgaagacgaagaatga

SEQ ID NO: 773 - DNA, 483 bp, Saccharomyces cerevisiae
atgggtaaatcacacggttacagatctcgtactcgttacatgttccaacgtgacttcagaaagcatggtgccgtccatctttctacttacttgaaggtctacaaggttggtgacattgtcgacatcaaagccaatggttctatccaaaagggtatgccacacaagttttaccaaggtaagaccggtgttgtctacaacgttactaagtcttctgttggtgttatcatcaacaagatggtcggtaacagatatctagaaaaaagattaaacttaagagttgaacacatcaagcactccaagtgtagacaagaatttttggaaagagttaaggccaatgctgctaagcgtgctgaagctaaggctcaaggtgttgctgttcaattgaagagacaaccagctcaaccaagagaatcccgtatcgtttctactgaaggtaacgttcctcaaactttggccccagttccatacgaaactttcatctaa

SEQ ID NO: 774 - DNA, 483 bp, Artificial Sequence
  Description of Artificial Sequence: Synthetic polynucleotide
atgggtaaatctcacggttacagatctcgtactcgttacatgttccaacgtgacttcagaaagcatggtgccgtccatctttctacttacttgaaggtctacaaggttggtgacattgtcgacatcaaagccaatggttctatccaaaagggtatgccacacaagttttaccaaggtaagaccggtgttgtctacaacgttactaagtcttctgttggtgttatcatcaacaagatggtcggtaacagatatttggaaaaaagattaaacttaagagttgaacacatcaagcactccaagtgtagacaagaatttttggaaagagttaaggccaatgctgctaagcgtgctgaagctaaggctcaaggtgttgctgttcaattgaagagacaaccagctcaaccaagagaatcccgtatcgtttctactgaaggtaacgttcctcaaactttggccccagttccatacgaaactttcatctga

SEQ ID NO: 775 - DNA, 1134 bp, Saccharomyces cerevisiae
atgcctaaaaaatccattgaagaatgggaagaggatgccattgaatcagttccatatttagcaagtgatgaaaagggctctaattataaggaagctacacaaattccactaaatttgaagcaatctgaaattgaaaatcatccaacagtaaaaccatgggttcattttgttgctgggggtattggaggaatggcgggtgcagttgttacgtgtccctttgatttggtgaagacccgattacaaagtgatatatttttgaaagcatacaaatcacaagctgttaatatcagtaaaggatctactcgtccaaagagtattaattatgtcattcaagcaggaacccatttcaaggaaacactgggaatcataggcaatgtgtacaaacaagagggttttagaagcttgtttaagggtttgggccccaatttagtcggggttattccagcaagaagtattaatttttttacctatggaactactaaagatatgtatgctaaagcgttcaataatggccaagaaacacctatgattcatctgatggctgctgcaaccgcaggttgggcaacggcgacggcaaccaatcctatttggttgattaaaacaagagtacagcttgataaagctgggaaaacatcggtccgacagtacaagaactcttgggattgcttaaaaagtgttataagaaatgagggtttcactggcttgtacaaagggttgagtgcctcttatttgggttctgttgaaggtatacttcaatggctattatatgaacaaatgaagaggttaataaaggaaaggtctattgagaaatttggatatcaagccgaaggtacaaaaagcacatcagagaaagtcaaggagtggtgtcaaagatcaggaagcgctggtcttgcaaaatttgtggctagtatagcaacatatccgcacgaagttgtcaggacgagattgagacaaacgcccaaggaaaatggtaaacgaaagtatacaggtttagtacaaagtttcaaagttataattaaagaagagggactcttttcaatgtatagtgggttgaccccgcatttgatgagaacagttccgaacagtataattatgtttggtacatgggaaattgttataaggctactatcgtag

SEQ ID NO: 776 - DNA, 1134 bp, Artificial Sequence
  Description of Artificial Sequence: Synthetic polynucleotide
atgcctaaaaaatccattgaagaatgggaagaggatgccattgaatctgttccatatttagcaagtgatgaaaagggctctaattataaggaagctacacaaattccattgaatttgaagcaatctgaaattgaaaatcatccaacagtaaaaccatgggttcattttgttgctgggggtattggaggaatggcgggtgcagttgttacgtgtccctttgatttggtgaagaccagattacaaagtgatatatttttgaaagcatacaaatctcaagctgttaatatcagtaaaggatctactcgtccaaagagtattaattatgtcattcaagcaggaacccatttcaaggaaacattaggaatcataggcaatgtgtacaaacaagagggttttagaagcttgtttaagggtttgggccccaatttagtcggggttattccagcaagaagtattaatttttttacctatggaactactaaagatatgtatgctaaagcgttcaataatggccaagaaacacctatgattcatttaatggctgctgcaaccgcaggttgggcaacggcgacggcaaccaatcctatttggttgattaaaacaagagtacagcttgataaagctgggaaaacatctgtcagacagtacaagaactcttgggattgcttaaaaagtgttataagaaatgagggtttcactggcttgtacaaagggttgagtgcctcttatttgggttctgttgaaggtatacttcaatggttgttatatgaacaaatgaagaggttaataaaggaaaggtctattgagaaatttggatatcaagccgaaggtacaaaaagcacaagtgagaaagtcaaggagtggtgtcaaagatctggaagcgctggtcttgcaaaatttgtggctagtatagcaacatatccgcacgaagttgtcaggacgagattgagacaaacgcccaaggaaaatggtaaaagaaagtatacaggtttagtacaaagtttcaaagttataattaaagaagagggactcttttccatgtatagtgggttgaccccgcatttgatgagaacagttccgaacagtataattatgtttggtacatgggaaattgttataaggcttttaagttga

SEQ ID NO: 777 - DNA, 672 bp, Saccharomyces cerevisiae
atgtcacaatctactgcatcactggtaccagagggcaatcaaggctccctccaagaagatgttagttttgatttcaatggtgtacctggccaggctttagatgccgtgcgcatgcgtttggctcaattaactcattcattgaggagaatcagagacgaaatgtccaaagccgaactgccacaatggtatacactccaatcacaactgaatgtcacattatcccagctcgtttctgtaacctccactctacaacatttccaagaaactttagactctacagtggtttaccctttgcctaaattcccaaccacctctcatgaaagtttggtcactacccttttgaggaagaagaatattcctgaagtggacgaatggatgaaatatgttagggaaacatctggagtaactacagccttgctaaaggatgaagaaatagaaaagctgctgcaacaggacagagaaataacgaattgggcgcgcactacgtttagaaacgaatatggaaagcacgatttcaaaaatgaagaatccctaagcgaagaacacgcttcacttctagtacgagatagcaaaccttcgaaacctttcaatgtggatgatgttctaaagttcaccttcacaggggaaaagcccattattacgggatctacttcaacatcatctagtaattga

SEQ ID NO: 778 - DNA, 672 bp, Artificial Sequence
  Description of Artificial Sequence: Synthetic polynucleotide
atgtctcaatctactgcatctttagtaccagagggcaatcaaggctccctccaagaagatgttagttttgatttcaatggtgtacctggccaggctttagatgccgtgcgcatgcgtttggctcaattaactcattctttgaggagaatcagagacgaaatgtccaaagccgaattaccacaatggtatacactccaatctcaattgaatgtcacattatcccagctcgtttctgtaacctccactttacaacatttccaagaaactttagactctacagtggtttaccctttgcctaaattcccaaccacctctcatgaaagtttggtcactacccttttgaggaagaagaatattcctgaagtggacgaatggatgaaatatgttagggaaacatctggagtaactacagccttgttgaaggatgaagaaatagaaaagttattacaacaggacagagaaataacgaattgggcgcgcactacgtttagaaacgaatatggaaagcacgatttcaaaaatgaagaatccttaagcgaagaacacgcttctcttttggtaagagatagcaaaccttccaaacctttcaatgtggatgatgttttgaagttcaccttcacaggggaaaagcccattattacgggatctacttctacatcttctagtaattga

SEQ ID NO: 779 - DNA, 372 bp, Saccharomyces cerevisiae
atggatcaaaagaaggacccaagtaataacttaacagaaagaagggtttccaaggtccaacgcccaaataagaaaaaggtacgaaatcaagttgaatcactttctagaaacctagagagaaataaagagggacagcttctgcagactgtatcaaaaggtcatttagaagctgattctggacactcactgggtcgtgaaaaagagaacggtgaactcggtataagaagtatattttacgataaagactggaatccaagaggcactgcaccatcacattacagaaatataccttataatcctgccactttcaaaaggcgaactgaagttcaagccagactgggaaacctcgagaatatcaaaataccaaagtga

SEQ ID NO: 780 - DNA, 372 bp, Artificial Sequence
  Description of Artificial Sequence: Synthetic polynucleotide
atggatcaaaagaaggacccaagtaataacttaacagaaagaagggtttccaaggtccaacgcccaaataagaaaaaggtaagaaatcaagttgaatctctttctagaaacttggagagaaataaagagggacagcttttacagactgtatccaaaggtcatttagaagctgattctggacactctttgggtcgtgaaaaagagaacggtgaactcggtataagaagtatattttacgataaagactggaatccaagaggcactgcaccatctcattacagaaatataccttataatcctgccactttcaaaaggagaactgaagttcaagccagattaggaaacctcgagaatatcaaaataccaaagtga

SEQ ID NO: 781 - DNA, 1269 bp, Saccharomyces cerevisiae
atgaatcagtgcgcgaaggacataactcatgaagcctccagtatacccatcgatttgcaagaaagatactcgcactggaagaaaaacactaaactactttatgattacctaaacacgaattcaacaaagtggccgtccttaacgtgccagttctttcctgatttagataccacttcggatgagcatcgcatcttgttatcctcatttacatcttcccaaaaacctgaagatgagaccatatatattagcaaaatatccacgttgggtcatataaaatggtcatctttaaataatttcgacatggacgaaatggaattcaaaccggagaactcgacaaggtttccctccaaacacttagtaaatgacatcagtattttcttcccaaacggggaatgcaatagggcaagatatttgcctcaaaatccagatattatagccggcgcctcttcagatggtgcaatctacatattcgatagaacaaaacacggctctactagaataagacagtccaaaatttcacatccctttgagacaaagctgtttggttcacatggtgttattcaagacgtggaggcaatggatacttcttcggcagatataaatgaggcgacttctttagcctggaacttgcagcaggaggcccttttactttcttctcactccaacggccaagttcaagtttgggacattaaacaatattcgcatgagaaccctataatagatttacccttagtgtcaataaacagcgacggaacagcggtgaatgatgtaacttggatgccaacacacgattccctctttgctgcttgtactgaaggaaatgcggtctccctattagatctgaggactaagaaagagaagctccagagtaaccgtgaaaaacacgatggtggagtaaactcctgtagatttaactataagaactctttaattctagcatctgcagattcaaatgggaggctaaatttatgggatattagaaacatgaacaaaagcccaatcgctaccatggagcacggtacttccgtttcaactttagaatggagtccaaatttcgatactgtattggcaacggctggccaagaagatgggttagtcaagctatgggatacctcctgcgaagaaactatatttacccatggtggtcatatgctcggtgtgaacgacatttcgtgggacgctcatgacccttggttaatgtgcagtgtggcaaatgataattcagttcacatatggaaacctgcaggaaaccttgttggacattcgtga

SEQ ID NO: 782 - DNA, 1269 bp, Artificial Sequence
  Description of Artificial Sequence: Synthetic polynucleotide
atgaatcagtgcgcgaaggacataactcatgaagcctccagtatacccatcgatttgcaagaaagatactctcactggaagaaaaacactaaattactttatgattacttgaacacgaattctacaaagtggccgtccttaacgtgccagttctttcctgatttagataccacttctgatgagcatcgcatcttgttatcctcttttacatcttcccaaaaacctgaagatgagaccatatatattagcaaaatatccacgttgggtcatataaaatggtcttctttaaataatttcgacatggacgaaatggaattcaaaccggagaactccacaaggtttccctccaaacacttagtaaatgacatcagtattttcttcccaaacggggaatgcaatagggcaagatatttgcctcaaaatccagatattatagccggcgcctcttctgatggtgcaatctacatattcgatagaacaaaacacggctctactagaataagacagtccaaaatttctcatccctttgagacaaagttatttggttctcatggtgttattcaagacgtggaggcaatggatacttcttctgcagatataaatgaggcgacttctttagcctggaacttgcagcaggaggcccttttactttcttctcactccaacggccaagttcaagtttgggacattaaacaatattctcatgagaaccctataatagatttacccttagtgtctataaacagcgacggaacagcggtgaatgatgtaacttggatgccaacacacgattccctctttgctgcttgtactgaaggaaatgcggtctccttattagatttaaggactaagaaagagaagctccagagtaaccgtgaaaaacacgatggtggagtaaactcctgtagatttaactataagaactctttaattttggcatctgcagattctaatgggaggttgaatttatgggatattagaaacatgaacaaaagcccaatcgctaccatggagcacggtacttccgtttccactttagaatggagtccaaatttcgatactgtattggcaacggctggccaagaagatgggttagtcaagttatgggatacctcctgcgaagaaactatatttacccatggtggtcatatgctcggtgtgaacgacatttcttgggacgctcatgacccttggttaatgtgcagtgtggcaaatgataattctgttcacatatggaaacctgcaggaaaccttgttggacatagctga

SEQ ID NO: 783 - DNA, 1665 bp, Saccharomyces cerevisiae
atgtccaataactcattcactaacttcaaactggccactgaattgccagcctggtctaagttgcaaaaaatttatgaatctcaaggtaagactttgtctgtcaagcaagaattccaaaaagatgccaagcgttttgaaaaattgaacaagactttcaccaactatgatggttccaaaatcttgttcgactactcaaagaacttggtcaacgatgaaatcattgctgcattgattgaactggccaaggaggctaacgtcaccggtttgagagatgctatgttcaaaggtgaacacatcaactccactgaagatcgtgctgtctaccacgtcgcattgagaaacagagctaacaagccaatgtacgttgatggtgtcaacgttgctccagaagtcgactctgtcttgaagcacatgaaggagttctctgaacaagttcgttctggtgaatggaagggttataccggtaagaagatcaccgatgttgttaacatcggtattggtggttccgatttgggtccagtcatggtcactgaggctttgaagcactacgctggtgtcttggatgtccacttcgtttccaacattgacggtactcacattgctgaaaccttgaaggttgttgacccagaaactactttgtttttgattgcttccaagactttcactaccgctgaaactatcactaacgctaacactgccaagaactggttcttgtcgaagacaggtaatgatccatctcacattgctaagcatttcgctgctttgtccactaacgaaaccgaagttgccaagttcggtattgacaccaaaaacatgtttggtttcgaaagttgggtcggtggtcgttactctgtctggtcggctattggtttgtctgttgccttgtacattggctatgacaactttgaggctttcttgaagggtgctgaagccgtcgacaaccacttcacccaaaccccattggaagacaacattccattgttgggtggtttgttgtctgtctggtacaacaacttctttggtgctcaaacccatttggttgctccattcgaccaatacttgcacagattcccagcctacttgcaacaattgtcaatggaatctaacggtaagtctgttaccagaggtaacgtgtttactgactactctactggttctatcttgtttggtgaaccagctaccaacgctcaacactctttcttccaattggttcaccaaggtaccaagttgattccatctgatttcatcttagctgctcaatctcataacccaattgagaacaaattacatcaaaagatgttggcttcaaacttctttgctcaagctgaagctttaatggttggtaaggatgaagaacaagttaaggctgaaggtgccactggtggtttggtcccacacaaggtcttctcaggtaacagaccaactacctctatcttggctcaaaagattactccagctactttgggtgctttgattgcctactacgaacatgttactttcactgaaggtgccatttggaatatcaactctttcgaccaatggggtgttgaattgggtaaagtcttggctaaagtcatcggcaaggaattggacaactcctccaccatttctacccacgatgcttctaccaacggtttaatcaatcaattcaaggaatggatgtga

SEQ ID NO: 784 - DNA, 1665 bp, Artificial Sequence
  Description of Artificial Sequence: Synthetic polynucleotide
atgtccaataactctttcactaacttcaaattggccactgaattgccagcctggtctaagttgcaaaaaatttatgaatctcaaggtaagactttgtctgtcaagcaagaattccaaaaagatgccaagcgttttgaaaaattgaacaagactttcaccaactatgatggttccaaaatcttgttcgactactccaagaacttggtcaacgatgaaatcattgctgcattgattgaattggccaaggaggctaacgtcaccggtttgagagatgctatgttcaaaggtgaacacatcaactccactgaagatcgtgctgtctaccacgtcgcattgagaaacagagctaacaagccaatgtacgttgatggtgtcaacgttgctccagaagtcgactctgtcttgaagcacatgaaggagttctctgaacaagttcgttctggtgaatggaagggttataccggtaagaagatcaccgatgttgttaacatcggtattggtggttccgatttgggtccagtcatggtcactgaggctttgaagcactacgctggtgtcttggatgtccacttcgtttccaacattgacggtactcacattgctgaaaccttgaaggttgttgacccagaaactactttgtttttgattgcttccaagactttcactaccgctgaaactatcactaacgctaacactgccaagaactggttcttgtccaagacaggtaatgatccatctcacattgctaagcatttcgctgctttgtccactaacgaaaccgaagttgccaagttcggtattgacaccaaaaacatgtttggtttcgaaagttgggtcggtggtcgttactctgtctggagtgctattggtttgtctgttgccttgtacattggctatgacaactttgaggctttcttgaagggtgctgaagccgtcgacaaccacttcacccaaaccccattggaagacaacattccattgttgggtggtttgttgtctgtctggtacaacaacttctttggtgctcaaacccatttggttgctccattcgaccaatacttgcacagattcccagcctacttgcaacaattgtccatggaatctaacggtaagtctgttaccagaggtaacgtgtttactgactactctactggttctatcttgtttggtgaaccagctaccaacgctcaacactctttcttccaattggttcaccaaggtaccaagttgattccatctgatttcatcttagctgctcaatctcataacccaattgagaacaaattacatcaaaagatgttggcttctaacttctttgctcaagctgaagctttaatggttggtaaggatgaagaacaagttaaggctgaaggtgccactggtggtttggtcccacacaaggtcttctctggtaacagaccaactacctctatcttggctcaaaagattactccagctactttgggtgctttgattgcctactacgaacatgttactttcactgaaggtgccatttggaatatcaactctttcgaccaatggggtgttgaattgggtaaagtcttggctaaagtcatcggcaaggaattggacaactcctccaccatttctacccacgatgcttctaccaacggtttaatcaatcaattcaaggaatggatgtga

SEQ ID NO: 785 - DNA, 150 bp, Saccharomyces cerevisiae
atgtcccgtgtctatatatatccattgacggtattctatttttttgctattgaaatgagcgttttttgttactacaattggttttacagacggaattttccctatttgtttcgtcccatttttccttttctcattgttctcatatcttaa

SEQ ID NO: 786 - DNA, 150 bp, Artificial Sequence
  Description of Artificial Sequence: Synthetic polynucleotide
atgtcccgtgtctatatatatccattgacggtattctatttttttgctattgaaatgagcgttttttgttactacaattggttttacagaagaaattttccctatttgtttcgtcccatttttccttttctcattgttctcatatcttga

SEQ ID NO: 787 - DNA, 105 bp, Saccharomyces cerevisiae
atgtgggtagtactttcaaaagaaaaaatattactgaagaaggcatactacgccaagactattttattctcagcacttgtcctacgtggggttagaggcgagtaa

SEQ ID NO: 788 - DNA, 105 bp, Artificial Sequence
  Description of Artificial Sequence: Synthetic polynucleotide
atgtgggtagtactttctaaagaaaaaatattattgaagaaggcatactacgccaagactattttattcagtgcacttgtcttgcgtggggttagaggcgagtga

SEQ ID NO: 789 - DNA, 654 bp, Saccharomyces cerevisiae
atgggagtgaagcaaaccccaccagtccaggtgaaagtaagcgacgcggattccaccaacagaaggaaatctagtagccaggaaggaaaccctcagctggttcaattaaaggcaaagagcgacaaagataaaagaaagggatcttcagattccactgcctctataatgggcagttccaacgcacttccgaccaaaaacctaaccacgcctccagcactaaaccccttaacgaccagcattagtaggggtaatactgcatacgaaagaagcgtaaatggtagccgtataacaatgcactcaaacctggcacctacggagacgcaagacgtatcatggtctgaaatcgatacactggatgatgtgaagaagatggcgaaagaacctatcgtcaacgacgggttcccacgagattttgagagcaatctcacgcaaatgcgcaagtcgcacgctcaactactgcgattaatgagggaaagaaatcagcgactaaagtatgccaagctgaggagccctcctcataaggatcagcataattctgccacgaataaagatcaagaaccagacgaggtattgcatgacccggaaatcgcacttgacggtgagaagtacgtgagccaagttgtcgatactattaaagatgttcaccgatgctga

SEQ ID NO: 790 - DNA, 654 bp, Artificial Sequence
  Description of Artificial Sequence: Synthetic polynucleotide
atgggagtgaagcaaaccccaccagtccaggtgaaagtaagcgacgcggattccaccaacagaaggaaatctagtagccaggaaggaaaccctcagttggttcaattaaaggcaaagagcgacaaagataaaagaaagggatcttctgattccactgcctctataatgggcagttccaacgcacttccgaccaaaaacttgaccacgcctccagcattgaaccccttaacgaccagcattagtaggggtaatactgcatacgaaagaagcgtaaatggtagccgtataacaatgcactccaacttggcacctacggagacgcaagacgtaagctggtctgaaatcgatacattagatgatgtgaagaagatggcgaaagaacctatcgtcaacgacgggttcccaagagattttgagagcaatctcacgcaaatgcgcaagtctcacgctcaattacttcgtttaatgagggaaagaaatcagaggttaaagtatgccaagttaaggagccctcctcataaggatcagcataattctgccacgaataaagatcaagaaccagacgaggtattgcatgacccggaaatcgcacttgacggtgagaagtacgtgagccaagttgtcgatactattaaagatgttcaccgttgctga

SEQ ID NO: 791 - DNA, 2397 bp, Saccharomyces cerevisiae
atgtcacagaagcaaagtacgaatcagaatcaaaatggcacgcatcagccacaaccagtaaagaatcaacgaactaataatgctgctggcgccaattccggccagcagccacagcaacagagtcaaggccagtctcaacagcaggggaggtccaatggtccgttttcggcgtcagacttgaatagaattgtcctagagtacctgaataaaaagggataccaccgtacagaggccatgctgagagccgagagtggacgtacactaacacctcaaaacaaacaatcaccagcaaatactaaaacaggtaaatttcctgaacaatcatcaattcctccgaaccccgggaagacagctaaacccataagcaatccaactaatttgtcatccaagagagatgcagaaggtggtatagtatctagcgggcgactagaagggctcaacgcacctgaaaattatatacgtgcatattcaatgttgaaaaactgggtagattcgtcgctggaaatttacaagccggaactaagctacatcatgtacccaatattcatttatttatttttaaatttggtggccaaaaatcctgtttacgcccgtcgtttctttgatagattttctcccgattttaaggacttccatggctcagaaattaatagacttttcagtgtcaattctatagatcacatcaaggaaaatgaggtcgcaagtgctttccaatctcacaagtacagaattactatgtctaaaaccactttaaatcttctcttatattttttgaatgaaaatgagagtattggaggttcattaataattagtgtaataaatcagcacctagatccaaatattgtagaatcagtaaccgcaagggaaaaattggctgatggaataaaagttctcagtgatagtgaaaacggaaatggtaaacaaaatttagaaatgaattctgttcctgtcaagctgggacctttcccaaaagacgaggagtttgttaaggagattgaaactgaattgaaaattaaggatgatcaagagaaacaactaaatcaacaaactgcaggtgacaattacagtggagccaacaatagaaccttattgcaagaatataaagctatgaataacgaaaaatttaaggataatactggcgacgatgataaagacaaaattaaagataaaatcgccaaagatgaggaaaaaaaagagagcgaattgaaggtggatggtgaaaaaaaagacagcaatttatcttcgccagcacgtgatattttacctttaccaccaaagacggcactagatttgaagttggagattcagaaggtcaaggaatctcgtgatgccatcaaactagataatttacagttggccttaccaagcgtgtgcatgtatacattccaaaacacaaataaagacatgtcatgtttagatttcagtgatgattgtaggatagcggctgctggctttcaagacagttatatcaagatctggtcactcgacggctcatcacttaataatcctaacatcgcgttaaataacaacgacaaggatgaagacccaacgtgtaaaactttggtggggcacagtggtacagtatattcaacaagtttcagtccggataataagtatttactttctggttctgaagataaaaccgtcaggctatggtccatggatactcacaccgcgctagtaagctataagggccataatcaccctgtgtgggatgttagtttctccccgctaggccattatttcgccactgcatcgcacgaccaaaccgcaaggttatggtcatgcgatcacatatatccattaagaatatttgcaggacatttaaatgatgttgattgtgtgtcatttcatccgaacggttgctatgtgtttacgggatccagcgataagacgtgtcgaatgtgggacgtttctacaggcgactcggttaggttatttcttggacatactgcgcccgtcatttctattgctgtttgtccagatggtaggtggttgtccactggtagcgaagatggtattattaatgtatgggatattggtaccggcaaaaggttgaaacaaatgcgtggccatggtaagaatgccatttattccttatcatatagcaaagagggaaacgtacttattagtggaggtgccgatcatacagtccgtgtatgggatttgaaaaaggccactactgagccaagcgcagaaccagatgagccattcattggatacttgggtgacgttactgcatctataaaccaagatataaaagaatatggtcgcagaagaacagtaatacctacaagcgatttagtagcgtcgttctacaccaaaaagacgcctgtttttaaggtcaagttcagcagaagcaatttagcccttgcaggaggtgctttcaggccataa

SEQ ID NO: 792 - DNA, 2397 bp, Artificial Sequence
  Description of Artificial Sequence: Synthetic polynucleotide
atgtctcagaagcaaagtacgaatcagaatcaaaatggcacgcatcagccacaaccagtaaagaatcaaagaactaataatgctgctggcgccaattccggccagcagccacagcaacagagtcaaggccagtctcaacagcaggggaggtccaatggtccgttttctgcgtctgacttgaatagaattgtcttggagtacttgaataaaaagggataccaccgtacagaggccatgttgagagccgagagtggacgtacattaacacctcaaaacaaacaatctccagcaaatactaaaacaggtaaatttcctgaacaatcttccattcctccgaaccccgggaagacagctaaacccataagcaatccaactaatttgtcttccaagagagatgcagaaggtggtatagtatctagcgggagattagaagggctcaacgcacctgaaaattatatacgtgcatattccatgttgaaaaactgggtagattcttctttggaaatttacaagccggaattgagctacatcatgtacccaatattcatttatttatttttaaatttggtggccaaaaatcctgtttacgcccgtcgtttctttgatagattttctcccgattttaaggacttccatggctctgaaattaatagacttttcagtgtcaattctatagatcacatcaaggaaaatgaggtcgcaagtgctttccaatctcacaagtacagaattactatgtctaaaaccactttaaatcttctcttatattttttgaatgaaaatgagagtattggaggttctttaataattagtgtaataaatcagcacttggatccaaatattgtagaaagtgtaaccgcaagggaaaaattggctgatggaataaaagttctcagtgatagtgaaaacggaaatggtaaacaaaatttagaaatgaattctgttcctgtcaagttgggacctttcccaaaagacgaggagtttgttaaggagattgaaactgaattgaaaattaaggatgatcaagagaaacaattgaatcaacaaactgcaggtgacaattacagtggagccaacaatagaaccttattgcaagaatataaagctatgaataacgaaaaatttaaggataatactggcgacgatgataaagacaaaattaaagataaaatcgccaaagatgaggaaaaaaaagagagcgaattgaaggtggatggtgaaaaaaaagacagcaatttatcttctccagcacgtgatattttacctttaccaccaaagacggcattggatttgaagttggagattcagaaggtcaaggaatctcgtgatgccatcaaattggataatttacagttggccttaccaagcgtgtgcatgtatacattccaaaacacaaataaagacatgtcctgtttagatttcagtgatgattgtaggatagcggctgctggctttcaagacagttatatcaagatctggtctctcgacggctcttctcttaataatcctaacatcgcgttaaataacaacgacaaggatgaagacccaacgtgtaaaactttggtggggcacagtggtacagtatattctacaagtttcagtccggataataagtatttactttctggttctgaagataaaaccgtcaggctttggtccatggatactcacaccgcgttggtaagctataagggccataatcaccctgtgtgggatgttagtttctccccgttgggccattatttcgccactgcatctcacgaccaaaccgcaaggttatggtcctgcgatcacatatatccattaagaatatttgcaggacatttaaatgatgttgattgtgtgtcctttcatccgaacggttgctatgtgtttacgggatccagcgataagacgtgtagaatgtgggacgtttctacaggcgactctgttaggttatttcttggacatactgcgcccgtcatttctattgctgtttgtccagatggtaggtggttgtccactggtagcgaagatggtattattaatgtatgggatattggtaccggcaaaaggttgaaacaaatgcgtggccatggtaagaatgccatttattccttatcttatagcaaagagggaaacgtacttattagtggaggtgccgatcatacagtccgtgtatgggatttgaaaaaggccactactgagccaagcgcagaaccagatgagccattcattggatacttgggtgacgttactgcatctataaaccaagatataaaagaatatggtcgcagaagaacagtaatacctacaagcgatttagtagcgtctttctacaccaaaaagacgcctgtttttaaggtcaagttcagcagaagcaatttagcccttgcaggaggtgctttcaggccatga

SEQ ID NO: 793 - DNA, 1395 bp, Saccharomyces cerevisiae
atgaggtttctttcaaaaaggatactgaaacctgtactttcagtgatcattctaatatcgattgccgtaaccgttgttctttactttttaacggcgaatgagaactatttgcaagcagtcaaggatagtgccaagtcccagtatgcttctctccgggagagctacaaaagtattacaggtaaaactgaaagcgctgatgaacttcctgatcatgatgctgaggtgttagatagcataatggacaggctacacgagcccctttatgaaaaggacacttttgacccgaatgaagtccttgctgaaaataaacagttgtacgaggagtttttacttcaagaaatttctgagccaaaggtggacaatttggtacgtagcggggatccgttagccggcaaggcaaaaggaactattttgagtttggtgagaaattctgatttagaggatataatttcttctattcaacagctagaagaggagtacaataagaattttggatatccctataccttccttaacgatgaggaatttactgacgaattcaaagatggaataaaaagtattcttcctaaggaccgtgtagtagaatttggcactattggtccagataactggaatatgcctgatagcatagatagggagagatacgaccaagaaatggacaaaatgagtaaagagaacattcagtatgcagaggtggaatcctatcataacatgtgtcgtttctattctaaagaattttaccatcatcctctgctatctaaatataaatatgtgtggagattagagccaaacgtgaatttctattgcaaaattaactatgacgttttccaatttatgaacaagaatgacaagatttatgggtttgttttgaacctctatgatagtccgcaaaccatcgaaacgctatggacttcaactatggattttgtcgaggaacacccaaactatttgaacgtcaacggagccttcgcatggctaaaagataactctcaaaatccaaaaaattatgattatactcaagggtattcaacttgtcatttctggaccaattttgaaatagtcgatttagactttttgaggtcagaaccttatgaaaaatatatgcaatatcttgaagaaaagggaggattctactatgaaaggtggggtgatgcccctgtaagaagtttggcacttgctttatttgcggataagtcaagcatccattggttcagggatataggttatcaccatactccgtacacgaactgtccaacttgtccagcagattcagataggtgtaatggaaattgtgtaccaggcaaattcactccttggagtgatctagacaaccaaaattgccaggcaacctggataagacactctatgtctgaggaagagttagaaatgtattga

SEQ ID NO: 794 - DNA, 1395 bp, Artificial Sequence
  Description of Artificial Sequence: Synthetic polynucleotide
atgaggtttctttctaaaaggatattgaaacctgtactttctgtgatcattttaatatctattgccgtaaccgttgttctttactttttaacggcgaatgagaactatttgcaagcagtcaaggatagtgccaagtcccagtatgcttctctcagagagagctacaaaagtattacaggtaaaactgaaagcgctgatgaacttcctgatcatgatgctgaggtgttagatagcataatggacaggttacacgagcccctttatgaaaaggacacttttgacccgaatgaagtccttgctgaaaataaacagttgtacgaggagtttttacttcaagaaatttctgagccaaaggtggacaatttggtacgtagcggggatccgttagccggcaaggcaaaaggaactattttgagtttggtgagaaattctgatttagaggatataatttcttctattcaacagttagaagaggagtacaataagaattttggatatccctataccttccttaacgatgaggaatttactgacgaattcaaagatggaataaaaagtattcttcctaaggaccgtgtagtagaatttggcactattggtccagataactggaatatgcctgatagcatagatagggagagatacgaccaagaaatggacaaaatgagtaaagagaacattcagtatgcagaggtggaatcctatcataacatgtgtcgtttctattctaaagaattttaccatcatcctttattatctaaatataaatatgtgtggagattagagccaaacgtgaatttctattgcaaaattaactatgacgttttccaatttatgaacaagaatgacaagatttatgggtttgttttgaacctctatgatagtccgcaaaccatcgaaacgttgtggacttctactatggattttgtcgaggaacacccaaactatttgaacgtcaacggagccttcgcatggttgaaagataactctcaaaatccaaaaaattatgattatactcaagggtattctacttgtcatttctggaccaattttgaaatagtcgatttagactttttgaggtctgaaccttatgaaaaatatatgcaatatcttgaagaaaagggaggattctactatgaaaggtggggtgatgcccctgtaagaagtttggcacttgctttatttgcggataagagcagcatccattggttcagggatataggttatcaccatactccgtacacgaactgtccaacttgtccagcagattctgataggtgtaatggaaattgtgtaccaggcaaattcactccttggagtgatttggacaaccaaaattgccaggcaacctggataagacactctatgtctgaggaagagttagaaatgtattga

SEQ ID NO: 795 - DNA, 1656 bp, Saccharomyces cerevisiae
atgctgaaaaacttcaaactctcaaaaagagatagtaatgggtcgaagggcagaattacatccgcagatatttccacaccttctcatgataatgggagtgttataaagcatattaagacagtaccagtgaggtacctttcttcatcttccaccccagtgaaaagccaacgggactcttcaccaaaaaacagacataattctaaagatattacttctccagagaaagttataaaagccaaatacagttatcaggcacaaacttcaaaggaactatctttcatggaaggtgaatttttttatgtatctggagatgagaaggattggtataaagcttcaaatccttctactggaaaagagggtgttgtccccaaaacctattttgaagtgtttgatagaactaaaccttcctctgtgaatggatccaatagttcaagtcggaaggttacaaatgattcattaaacatgggatcgttatacgccattgttttatatgactttaaggcagaaaaagctgatgagttgacaacttatgtgggagagaatttgtttatttgcgcccaccataactgtgaatggttcattgctaagccaattggtcgacttggagggcccggccttgttcctgttgggtttgttagcatcatagatattgccacggggtacgcaacaggtaacgacgtaatagaagacatcaagtcagttaacctaccaactgttcaagaatggaaaagcaacattgcaagatacaaagctagtaatattagccttggttctgtggagcagcagcagcagcaatccattacaaaacctcagaacaaaagcgcaaagctggttgacggtgaattattagtgaaagcatccgttgaatcctttgggttagaagatgagaagtattggtttttggtttgctgtgaattatctaacggtaagacgaggcaactgaaaagatactatcaagatttctacgatctgcaggttcaacttttggatgcgttcccagcagaggccggtaagttgagggatgcaggtggacaatggtccaaacgtataatgccctatatccctggacccgttccatacgttaccaatagcataacaaaaaaaagaaaggaggacttgaatatatatgtggcagacctagtgaatcttcccgattatatatctcgctcagaaatggtgcattccttattcgttgttttgaataatggtttcgacagagaatttgaaagagacgaaaatcaaaacaatattaaaacattacaagaaaacgatacagcaacctttgcaacagcatctcaaacttctaattttgcctcaactaaccaagacaacactttaactggcgaagacttgaagttaaacaagaaactctcagatttatctttatcgggctccaagcaggctccagcccaatcaacttctggattgaaaactactaaaattaaattttattacaaagacgatatttttgctttaatgctgaagggtgacacaacctataaagaacttcgtagtaaaatcgctccaaggattgatacagataattttaaattacaaaccaaattatttgatggtagcggggaggaaattaagactgattcacaagtcagtaacataatccaagccaaactgaaaatttccgttcacgatatttga

SEQ ID NO: 796 - DNA, 1656 bp, Artificial Sequence
  Description of Artificial Sequence: Synthetic polynucleotide
atgttgaaaaacttcaaactctctaaaagagatagtaatgggtccaagggcagaattacatccgcagatatttccacaccttctcatgataatgggagtgttataaagcatattaagacagtaccagtgaggtacctttcttcttcttccaccccagtgaaaagccaaagagactcttctccaaaaaacagacataattctaaagatattacttctccagagaaagttataaaagccaaatacagttatcaggcacaaacttctaaggaattatctttcatggaaggtgaatttttttatgtatctggagatgagaaggattggtataaagcttctaatccttctactggaaaagagggtgttgtccccaaaacctattttgaagtgtttgatagaactaaaccttcctctgtgaatggatccaatagtagtagtaggaaggttacaaatgattctttaaacatgggatctttatacgccattgttttatatgactttaaggcagaaaaagctgatgagttgacaacttatgtgggagagaatttgtttatttgcgcccaccataactgtgaatggttcattgctaagccaattggtaggcttggagggcccggccttgttcctgttgggtttgttagcatcatagatattgccacggggtacgcaacaggtaacgacgtaatagaagacatcaagtctgttaacttaccaactgttcaagaatggaaaagcaacattgcaagatacaaagctagtaatattagccttggttctgtggagcagcagcagcagcaatccattacaaaacctcagaacaaaagcgcaaagttggttgacggtgaattattagtgaaagcatccgttgaatcctttgggttagaagatgagaagtattggtttttggtttgctgtgaattatctaacggtaagacgaggcaattgaaaagatactatcaagatttctacgatttacaggttcaacttttggatgcgttcccagcagaggccggtaagttgagggatgcaggtggacaatggtccaaacgtataatgccctatatccctggacccgttccatacgttaccaatagcataacaaaaaaaagaaaggaggacttgaatatatatgtggcagacttggtgaatcttcccgattatatatctcgcagtgaaatggtgcattccttattcgttgttttgaataatggtttcgacagagaatttgaaagagacgaaaatcaaaacaatattaaaacattacaagaaaacgatacagcaacctttgcaacagcatctcaaacttctaattttgcctctactaaccaagacaacactttaactggcgaagacttgaagttaaacaagaaactctctgatttatctttaagtggctccaagcaggctccagcccaatctacttctggattgaaaactactaaaattaaattttattacaaagacgatatttttgctttaatgttgaagggtgacacaacctataaagaacttcgtagtaaaatcgctccaaggattgatacagataattttaaattacaaaccaaattatttgatggtagcggggaggaaattaagactgattctcaagtcagtaacataatccaagccaaattgaaaatttccgttcacgatatttga

SEQ ID NO: 797 - DNA, 165 bp, Saccharomyces cerevisiae
atgcttttgtgcttccatatgtgtcaaaggataatgtggctccctttcgatttaatgaagtggcgtagatttcattgtggcgctgttcttgttggaacactgagcttacgtaaccgcagcccaaagatactttctctttattttattagcgataggacaggctaa

SEQ ID NO: 798 - DNA, 165 bp, Artificial Sequence
  Description of Artificial Sequence: Synthetic polynucleotide
atgcttttgtgcttccatatgtgtcaaaggataatgtggctccctttcgatttaatgaagtggcgtagatttcattgtggcgctgttcttgttggaacattgagcttacgtaaccgcagcccaaagatactttctctttattttattagcgataggacaggctga

SEQ ID NO: 799 - DNA, 636 bp, Saccharomyces cerevisiae
atggatgctgtaatactgaatctcttaggcgacattcctttggtcacaagattatggacaattggctgtcttgtactatcaggtctcacaagtctccggattgtggatccagggaaggtagtgtacagttatgatttagtattcaaaaagggacaatatggaagactactttattcgatattcgattacggcgcatttaattggatatccatgataaacatctttgtcagcgctaatcacttatcaactttggaaaactcattcaatctgagaagaaaattctgttggataatatttttactgttggtgatactggtaaagatgaccagcattgaacaacctgcagcatcactcggtgtgttattgcatgagaatctcgtgtactacgaactgaaaaagaacggaaaccaaatgaacgtacgattcttcggtgccattgatgtttcaccatctatattcccaatctacatgaatgcagtaatgtattttgtatataagcgtagctggttagaaattgccatgaatttcatgccaggtcacgtaatttactacatggatgatataatagggaagatttatggcatcgatttgtgtaaatctccgtacgactggttccgcaacactgaaacaccctaa

SEQ ID NO: 800 - DNA, 636 bp, Artificial Sequence
  Description of Artificial Sequence: Synthetic polynucleotide
atggatgctgtaatattgaatctcttaggcgacattcctttggtcacaagattatggacaattggctgtcttgtattatctggtctcacaagtctcagaattgtggatccagggaaggtagtgtacagttatgatttagtattcaaaaagggacaatatggaagattactttattctatattcgattacggcgcatttaattggatatccatgataaacatctttgtcagcgctaatcacttatctactttggaaaactctttcaatttaagaagaaaattctgttggataatatttttattattggtgatattagtaaagatgaccagcattgaacaacctgcagcaagtctcggtgtgttattgcatgagaatctcgtgtactacgaattgaaaaagaacggaaaccaaatgaacgtaagattcttcggtgccattgatgtttctccatctatattcccaatctacatgaatgcagtaatgtattttgtatataagcgtagctggttagaaattgccatgaatttcatgccaggtcacgtaatttactacatggatgatataatagggaagatttatggcatcgatttgtgtaaatctccgtacgactggttccgcaacactgaaacaccctga

SEQ ID NO: 801 - DNA, 204 bp, Saccharomyces cerevisiae
atgctggccatgaaatcattttcacaagtttctaaatcatacaaggcaagtgctcccagtaaaaagctgacgacgttgttttatgttgcttacatcactctgggactaacaacacctttccttctaccggcccgaatggcttctaaagacacacactactacaaggacgaattttgttctcaacgatcatacaccaggttttag

SEQ ID NO: 802 - DNA, 204 bp, Artificial Sequence
  Description of Artificial Sequence: Synthetic polynucleotide
atgttggccatgaaaagtttttctcaagtttctaaatcttacaaggcaagtgctcccagtaaaaagttgacgacgttgttttatgttgcttacatcactttgggattaacaacacctttccttttgccggccagaatggcttctaaagacacacactactacaaggacgaattttgttctcaaagatcttacaccaggttttga

SEQ ID NO: 803 - DNA, 2538 bp, Saccharomyces cerevisiae
atgagtgcggcacttccatcaattcagcttcctgtcgactataataatctttttaatgaaatcaccgattttttggtgactttcaagcaggatacgttgtcttctgatgcaacacgaaatgagaacgaagatgaaaatttggatgctgagaatatcgaacaacatctattggaaaaggggcccaagtacatggcgatgctacagaaagtggctaatagggaactgaattccgtgattattgatttagatgacattctacagtatcaaaacgaaaagtttctccagggcacacaggcagacgaccttgtgtctgccattcaacaaaacgctaatcacttcactgaattattttgccgtgccattgacaacaacatgccgctaccaacaaaagaaattgactacaaggacgacgttcttgatgttattttaaaccaaaggagactgaggaatgagagaatgctctcggacaggaccaatgagatccgaagcgaaaacctcatggataccacgatggatccaccctcttccatgaatgatgcgttaagagaagttgtcgaggatgaaactgagttatttcctcctaatttaactagacgctatttcctttattttaagcctctatcgcaaaattgtgctcgtcgttacaggaagaaagcaattagttctaaaccattatctgttaggcagattaaaggtgacttcctaggccaattgattaccgtcagaggtattatcaccagagtttctgatgtcaaaccagctgtggaagttatcgcatatacctgcgatcaatgtgggtacgaagttttccaagaggtcaactctcgtacttttactccgttgtcagaatgtacttccgaagaatgttcccaaaatcaaacaaagggtcaattgtttatgagtacacgagcttccaaatttagtgcctttcaggaatgtaaaattcaggagttatcacaacaagtgccagtgggtcatattcctaggtcgctaaatatccacgttaacgggacgctggtaagatctttatcgcctggtgatatcgtcgatgtaactggtatattcttgccagcgccctacaccggtttcaaagctttgaaagctggcttactgacagaaacttatttagaggcacagtttgtccgtcaacacaagaagaaatttgcgtctttcagtctgacttctgatgtagaagagagagttatggaattaatcacctctggtgatgtttataataggctggcaaaatctattgcaccggaaatctacggtaacttggacgtaaagaaagcgttgctgctattacttgtcggaggtgttgataaaagggtaggtgacggtatgaaaatcagaggtgatatcaatgtttgtctgatgggtgatcccggtgttgccaaatctcaactgctgaaggccatttgcaaaatatcacctcgaggagtgtataccactggtaagggttcctcaggcgttggtctgaccgctgccgtcatgaaagatcctgtcacggatgaaatgattctagaaggtggtgccttagtactcgctgataacggtatttgttgtatcgatgaatttgataagatggatgaaagtgacagaacggcaatccatgaagttatggaacaacaaacaatttcgatatccaaggcgggtatcaatacaactttgaacgccagaacctcaatcttagcggcagcaaatccgttgtatggtagatataatcctagattatcacctctggacaatataaatctaccagctgctttactatccagatttgatattctcttcttaatgttagatataccaagtagagatgacgacgaaaaattagccgagcacgttacatatgtgcatatgcataataaacaaccggatttggacttcactccagtagaaccctctaaaatgagagagtacattgcctatgctaagacaaagaggccagtgatgagtgaagctgtaaacgattatgtggtgcaagcttacatcagattaagacaagactccaagagagaaatggattccaaattttcctttggtcaagccactccgagaactttactaggtattataagattatctcaagcgctagcaaagttaaggttggctgatatggtggatatagatgatgtggaggaagccttgaggttggtccgagtctccaaggaatcattgtatcaagaaaccaacaaatctaaagaagatgaaagccccacaacgaaaatctttacgatcatcaagaaaatgttacaagaaactggtaaaaacacgctatcatatgaaaatattgtgaaaactgtaagactaagagggtttaccatgctacaattaagcaactgtatccaagaatattcttacttaaacgtctggcatttaattaatgagggtaacactttgaaattcgtggatgacggtaccatggacacagaccaggaagactcactagtgagcacgcctaaactcgcaccacaaacgaccgcttccgctaatgtgagcgcccaagattctgatatcgatctacaagacgcttga

SEQ ID NO: 804 - DNA, 2538 bp, Artificial Sequence
  Description of Artificial Sequence: Synthetic polynucleotide
atgagtgcggcacttccatctattcagcttcctgtcgactataataatctttttaatgaaatcaccgattttttggtgactttcaagcaggatacgttgtcttctgatgcaacaagaaatgagaacgaagatgaaaatttggatgctgagaatatcgaacaacatcttttggaaaaggggcccaagtacatggcgatgttacagaaagtggctaatagggaattgaattccgtgattattgatttagatgacattttacagtatcaaaacgaaaagtttctccagggcacacaggcagacgaccttgtgtctgccattcaacaaaacgctaatcacttcactgaattattttgccgtgccattgacaacaacatgccgttaccaacaaaagaaattgactacaaggacgacgttcttgatgttattttaaaccaaaggagattaaggaatgagagaatgctctctgacaggaccaatgagatcagaagcgaaaacctcatggataccacgatggatccaccctcttccatgaatgatgcgttaagagaagttgtcgaggatgaaactgagttatttcctcctaatttaactagacgctatttcctttattttaagcctttatctcaaaattgtgctcgtcgttacaggaagaaagcaattagttctaaaccattatctgttaggcagattaaaggtgacttcttgggccaattgattaccgtcagaggtattatcaccagagtttctgatgtcaaaccagctgtggaagttatcgcatatacctgcgatcaatgtgggtacgaagttttccaagaggtcaactctcgtacttttactccgttgagtgaatgtacttccgaagaatgttcccaaaatcaaacaaagggtcaattgtttatgagtacaagagcttccaaatttagtgcctttcaggaatgtaaaattcaggagttatctcaacaagtgccagtgggtcatattcctaggtccttgaatatccacgttaacgggacgttggtaagatctttatctcctggtgatatcgtcgatgtaactggtatattcttgccagcgccctacaccggtttcaaagctttgaaagctggcttattaacagaaacttatttagaggcacagtttgtccgtcaacacaagaagaaatttgcgtctttcagtttgacttctgatgtagaagagagagttatggaattaatcacctctggtgatgtttataataggttagcaaaatctattgcaccggaaatctacggtaacttggacgtaaagaaagcgttgttattattacttgtcggaggtgttgataaaagggtaggtgacggtatgaaaatcagaggtgatatcaatgtttgtttgatgggtgatcccggtgttgccaaatctcaattattgaaggccatttgcaaaatatctcctagaggagtgtataccactggtaagggttccagtggcgttggtttgaccgctgccgtcatgaaagatcctgtcacggatgaaatgattttggaaggtggtgccttagtactcgctgataacggtatttgttgtatcgatgaatttgataagatggatgaaagtgacagaacggcaatccatgaagttatggaacaacaaacaatttctatatccaaggcgggtatcaatacaactttgaacgccagaacctctatcttagcggcagcaaatccgttgtatggtagatataatcctagattatctcctttggacaatataaatttaccagctgctttattatccagatttgatattctcttcttaatgttagatataccaagtagagatgacgacgaaaaattagccgagcacgttacatatgtgcatatgcataataaacaaccggatttggacttcactccagtagaaccctctaaaatgagagagtacattgcctatgctaagacaaagaggccagtgatgagtgaagctgtaaacgattatgtggtgcaagcttacatcagattaagacaagactccaagagagaaatggattccaaattttcctttggtcaagccactccgagaactttattgggtattataagattatctcaagcgttggcaaagttaaggttggctgatatggtggatatagatgatgtggaggaagccttgaggttggtcagagtctccaaggaatctttgtatcaagaaaccaacaaatctaaagaagatgaaagccccacaacgaaaatctttacgatcatcaagaaaatgttacaagaaactggtaaaaacacgttatcttatgaaaatattgtgaaaactgtaagattgagagggtttaccatgttacaattaagcaactgtatccaagaatattcttacttaaacgtctggcatttaattaatgagggtaacactttgaaattcgtggatgacggtaccatggacacagaccaggaagactctttggtgagcacgcctaaactcgcaccacaaacgaccgcttccgctaatgtgagcgcccaagattctgatatcgatttgcaagacgcttga

SEQ ID NO: 805 - DNA, 2775 bp, Saccharomyces cerevisiae
atgtcaagtgcttcaagacttcaaaacgtcaatattgtttctaacaactattctcgttacggaacttccgtttacgataagttgtatcatagtaacggcagtggtagcaataatgctggtaagaattctaccacagttggtaaactgtcatctatctcacaaaagtccaggagcaaacagcgtcatggctcaaattgctccagatcaatgagtcaatcacccttatcgacgttcaaatctccactcagcaatcaaaatcaatccagcgctcctgatgatttggcttccataggtcagagacgcagtgacgacgtcacatctttagataatgaaactatcataacgatgaattcaaggaaatcaaggattaaaaaaaagtataaatccttaatctccacctcttcaaaaaaatttatgaataaattgtacgatcatggtgcttcatccgactcattttctatattttctctgaagacttcccattctggtaaacatgaaaattccagatttgaaaagctgaggaagagaaaataccatgcttggggcaaatttgccgatatcaacgatttaccagttgaaataattgccaaaatactttctgaattcgagttaggtcgtgatcaaaagacactcgtaagatgtctatacgtatcgaagaagttttataaggcgacaaagatcgtcctttataggctaccttacttcacttccacttacagagtggcgcagtttgtcacctcactaagattacatccggataacggggcatacgtgaaagtattggacctatcacacttgaagccgggaattataggccaagactcgaaggattctcaaggcctagacgatgatggccactcaaggcgtcacagacgccgtcgccgcagatctactaacacaagtttgaatctacctccagctactccaacatctaccatttctaacgaggatgatgccaatagcggattaatcaaagacgacgcttcaaatggcagtgaagttgaagacttggcattagctggttggagagactggagatacagaaatgaacccctttatagctctcctctgttgaacagctttaaactgaaaaaagtggtttctcgttcttcttctatcacttctacatcttctggaaattccaccggtgttcactctacaaggagacaacgttccaatagttccgttgcttccataacgacgagtatcatgtcatccatctataacacctcccatgtctcattgtcttcaaccacgtctaataccagcaatggtaacatctcttctggtagtaatctgtcaagagtttccactgctggatcattgaaaaaagcttctgcgaagtccacaaggtcatctcctcagaaagcaaaacctatatctgacattacgtcatcttcctggtttagaatgaggttaagttcaagaaatagaaaggcaaggacagctaatacgattaatttaaagaactcgaaggataagtctgacgatgactttaaagttttaaagcacgattcggggcatccatccaattatcgttcttcgacattaaaatttagcattgaacaaccatttagtacgcatcatccgtatgccaacaaatttcttttaaagtacgctccttataaagatctgcccctaggttatattttacatatgctgaacctgtgtcctaaccttgttgaactaaacctttccaatttagttatttgtaccgatttcaaattaatcaaccaaagatccgaaagaagaaggatgacatcttcactgttgcccgctgtccaggagtctagtgtttctgcaggccctgagaaagatttagaaattgtctatatgaccgattctggcaaaggttatgaatattatgaggggttaagcaagaaacactcacgttcttcaagcctaggtaccaatccatctagttggattggaggtcaggcgaattggacagattacccacctccaatcgatgcacaaacgaaaacaagagaggaacacagacgcaacaataccttgaacaataagaacgtcgtattaaagaagctaaacccttttgaaatttttgaaatgatctgcaatagaaatgaagaaaaaggtggctactgctccttaactaaggtgaaaatgaatgacattgtgtggtgcaggcaatatatggtaaagtattttgtaatgaggacgtttcgccagcatttggattataaatccatggaaaacaactcttatgaaagacacttattcagtttccgggactctggcttggatagaaatttttcctgggcttgtaatgccaaattgcatgaatttgtcgcattgatggttatggatcatctttcaaatttagatgatttaggattagaagagctttttaatatcaagtccgaaaagctatatataaaaaactattgttgccgagacccggatattctcgaaatatcaaacttatttgatattagatatggggccggatctgaggctgatgctacttctgattccaatctcgaagcagaatctttacaattcaggttgacaatattaaaaacagaaaagccaacttcattttggctcacaaaagtttccaaagattatgtttctttagtggttaaattatgtgtggatgatgacattgatatggacaaaatgaaagttggaaaaccaactttgagaatagacagtattacacacaatttgattagtaggttaaaggagttgaggagagttgatctaaggagaaatgttggcgaaaataactactatgctgaaagcatcatataa

SEQ ID NO: 806 - DNA, 2775 bp, Artificial Sequence
  Description of Artificial Sequence: Synthetic polynucleotide
atgagcagtgcttccagacttcaaaacgtcaatattgtttctaacaactattctcgttacggaacttccgtttacgataagttgtatcatagtaacggcagtggtagcaataatgctggtaagaattctaccacagttggtaaattatcttctatctctcaaaagtccaggagcaaacagcgtcatggcagtaattgctccagaagtatgagtcaatctcccttatctacgttcaaatctccactcagcaatcaaaatcaatccagcgctcctgatgatttggcttccataggtcagagacgcagtgacgacgtcacatctttagataatgaaactatcataacgatgaattctaggaaatctaggattaaaaaaaagtataaatccttaatctccacctcttctaaaaaatttatgaataaattgtacgatcatggtgcttcttccgactctttttctatattttctttgaagacttcccattctggtaaacatgaaaattccagatttgaaaagttaaggaagagaaaataccatgcttggggcaaatttgccgatatcaacgatttaccagttgaaataattgccaaaatactttctgaattcgagttaggtcgtgatcaaaagacactcgtaagatgtctttacgtatccaagaagttttataaggcgacaaagatcgtcctttataggttgccttacttcacttccacttacagagtggcgcagtttgtcacctctttgagattacatccggataacggggcatacgtgaaagtattggacttatcccacttgaagccgggaattataggccaagactccaaggattctcaaggccttgacgatgatggccactctaggcgtcacagacgccgtcgccgcagatctactaacacaagtttgaatttacctccagctactccaacatctaccatttctaacgaggatgatgccaatagcggattaatcaaagacgacgcttctaatggcagtgaagttgaagacttggcattagctggttggagagactggagatacagaaatgaacccctttatagctctcctttattgaacagctttaaattgaaaaaagtggtttctcgttcttcttctatcacttctacatcttctggaaattccaccggtgttcactctacaaggagacaacgttccaatagttccgttgcttccataacgacgagtatcatgtcttccatctataacacctcccatgtctctttgtcttccaccacgtctaataccagcaatggtaacatctcttctggtagtaatttatctagagtttccactgctggatctttgaaaaaagcttctgcgaagtccacaaggtcttctcctcagaaagcaaaacctatatctgacattacgtcttcttcctggtttagaatgaggttaagtagtagaaatagaaaggcaaggacagctaatacgattaatttaaagaactccaaggataagtctgacgatgactttaaagttttaaagcacgattctgggcatccatccaattatcgttcttctacattaaaatttagcattgaacaaccatttagtacgcatcatccgtatgccaacaaatttcttttaaagtacgctccttataaagatttgcccttaggttatattttacatatgttgaacttgtgtcctaaccttgttgaattgaacctttccaatttagttatttgtaccgatttcaaattaatcaaccaaagatccgaaagaagaaggatgacatcttctttgttgcccgctgtccaggagtctagtgtttctgcaggccctgagaaagatttagaaattgtctatatgaccgattctggcaaaggttatgaatattatgaggggttaagcaagaaacacagtcgttcttctagccttggtaccaatccatctagttggattggaggtcaggcgaattggacagattacccacctccaatcgatgcacaaacgaaaacaagagaggaacacagacgcaacaataccttgaacaataagaacgtcgtattaaagaagttgaacccttttgaaatttttgaaatgatctgcaatagaaatgaagaaaaaggtggctactgctccttaactaaggtgaaaatgaatgacattgtgtggtgcaggcaatatatggtaaagtattttgtaatgaggacgtttcgccagcatttggattataaatccatggaaaacaactcttatgaaagacacttattcagtttcagggactctggcttggatagaaatttttcctgggcttgtaatgccaaattgcatgaatttgtcgcattgatggttatggatcatctttctaatttagatgatttaggattagaagagctttttaatatcaagtccgaaaagctttatataaaaaactattgttgcagagacccggatattctcgaaataagcaacttatttgatattagatatggggccggatctgaggctgatgctacttctgattccaatctcgaagcagaatctttacaattcaggttgacaatattaaaaacagaaaagccaacttctttttggctcacaaaagtttccaaagattatgtttctttagtggttaaattatgtgtggatgatgacattgatatggacaaaatgaaagttggaaaaccaactttgagaatagacagtattacacacaatttgattagtaggttaaaggagttgaggagagttgatttaaggagaaatgttggcgaaaataactactatgctgaaagcatcatatga

SEQ ID NO: 807 - DNA, 1128 bp, Saccharomyces cerevisiae
atgaatatggcagaacgtgcagaagcaacaaaaagttggtcctgtgagcccctttctggaaagacgctagaagagattgttcaaaatgcagaaaatgcagctgatttggtagcttacattcgcaaaccagaggtagatttggactttaggttgaagtttatcgcagaacatgaggagttttttaatgtacaactatcggatcgaaattcaagaataaggacgtgtcacaacttgagcgataaagggatacggggtgatactgttttcgtcttcgtgcctgggttggctggcaacttagaacaatttgaacccttactcgagcttgtggactctgatcaaaaggcatttttgacgttagatctgcccggctttggtcatagttcagaatggagcgactaccccatgctgaaagtggtggaacttattttcgttcttgtatgtgacgtcttaagaaaatggtctacagcggtgccgaataatgataacgtaaatccatttaacggtcataagatagtgcttgtagggcattctatgggttgttttctggcatgtcatctttacgagcagcacatggctgatacaaaagcggtacaaacgctagttttgttgacgccccccaaagcacatatcgagcagctttctaaggataaacatattatccagtgggctctctatggtgtgtttaaattgccatggctatttgacgtttatagaaacaaattcgatcaggtaaaaggtctacaaagttccggcatcaagcagtatttttatcaacaaggtgatgatgtcaagttgaaatacaggaagttctggcaatttaaaaacaacataagcaacaaaagtagaaccatcataggttatttactaggatgggaaactgttgattgggttaaattcaatggtgtattgacgcaaacggatatgaaacagaaaattataatatttggcgctgaaaaagatcctatagctcctattgaaaatttggaattttacaaacaaactataaataaagaatgtcttcgtaaagtgattattttacctgactgttctcataatttatgcttcgaccgtccagaattggtgtgtgaaaactttcaacgagaggtgattgataattccaaattgtag

SEQ ID NO: 808 - DNA, 1128 bp, Artificial Sequence
  Description of Artificial Sequence: Synthetic polynucleotide
atgaatatggcagaacgtgcagaagcaacaaaaagttggtcctgtgagcccctttctggaaagacgttagaagagattgttcaaaatgcagaaaatgcagctgatttggtagcttacattcgcaaaccagaggtagatttggactttaggttgaagtttatcgcagaacatgaggagttttttaatgtacaattaagtgatagaaattctagaataaggacgtgtcacaacttgagcgataaagggataagaggtgatactgttttcgtcttcgtgcctgggttggctggcaacttagaacaatttgaacccttactcgagcttgtggactctgatcaaaaggcatttttgacgttagatttgcccggctttggtcatagttctgaatggagcgactaccccatgttgaaagtggtggaacttattttcgttcttgtatgtgacgtcttaagaaaatggtctacagcggtgccgaataatgataacgtaaatccatttaacggtcataagatagtgcttgtagggcattctatgggttgttttttggcatgtcatctttacgagcagcacatggctgatacaaaagcggtacaaacgttagttttgttgacgccccccaaagcacatatcgagcagctttctaaggataaacatattatccagtgggctctctatggtgtgtttaaattgccatggttatttgacgtttatagaaacaaattcgatcaggtaaaaggtttacaaagttccggcatcaagcagtatttttatcaacaaggtgatgatgtcaagttgaaatacaggaagttctggcaatttaaaaacaacataagcaacaaaagtagaaccatcataggttatttattaggatgggaaactgttgattgggttaaattcaatggtgtattgacgcaaacggatatgaaacagaaaattataatatttggcgctgaaaaagatcctatagctcctattgaaaatttggaattttacaaacaaactataaataaagaatgtcttcgtaaagtgattattttacctgactgttctcataatttatgcttcgaccgtccagaattggtgtgtgaaaactttcaaagagaggtgattgataattccaaattgtga

SEQ ID NO: 809 - DNA, 1215 bp, Saccharomyces cerevisiae
atgtctgtgcaccacaaaaagaagctaatgcccaaatcggcattgctgattagaaaataccaaaagggaatcagatcatcattcattgggctcatcatagtgttatcctttttatttttcatgagtggctcaaggtccccagaggtaccaatagctcagggcaccagtgtcagtcgtgtagccagtaaggattatttgatgccgtttactgacaagtcacaaggagtaatccatcccgtggacgatggaaagaaggaaaagggtgttatggtcacattggccaggaattcagatttatggaacttggtaaaatctattagacatgttgaagacaggttcaataacagatatcactacgattgggtgttcttgaatgaccaaccatttagtgatgagtttaaacgtgttaccagtgcattggtttcaggcaaggcaaaatatgggacaatcccaaaggaccattggtccattccatcttggatcgatactgaaaaattcgatgagaaaaggcttgcaatgggaaaattggatattccatatggtagttccgtgccttaccgtcacatgtgccgtttccagtcagggttcatatggagacacccactactggaggagtacgaatggttttggagagtggataccgatatcactttattctgtgatattcagtatgacatattcaagtttttaaaagtaaataacaagaaatatggattcattctttcggtaagtgaatatgagcgcacaatcccaaccttgtgggaaacgacaaagaaattcatcaagaaaaatcctaaattcttacacaaaaataacctcatgaaattcatttcgaatgatgatggtgacacttataatatgtgtcatttctggaccaacttcgaaatcggctctttagacttcttcaggtccgatgcatacagagaatactttgattacttagacagttctggtggattcttctacgaaagatggggggatgcgccagtgcactccatcgctgcctctttgttcttggacaagtcagaaatccatttctttgacggtcttggattccatcatccagatttcacctcttgtcctatcgaacagaagattagactacaaaacaagtgtatctgcgaacctagcaaggacgtcacctggactcctgactacttctgtactagaaagtacttttcagcaggaaattacaagcttccaccaggaatttaa

SEQ ID NO: 810 - DNA, 1215 bp, Artificial Sequence
  Description of Artificial Sequence: Synthetic polynucleotide
atgtctgtgcaccacaaaaagaagttgatgcccaaatctgcattgttaattagaaaataccaaaagggaatcagaagttctttcattgggctcatcatagtgttatcctttttatttttcatgagtggctccaggtccccagaggtaccaatagctcagggcaccagtgtcagtcgtgtagccagtaaggattatttgatgccgtttactgacaagtctcaaggagtaatccatcccgtggacgatggaaagaaggaaaagggtgttatggtcacattggccaggaattctgatttatggaacttggtaaaatctattagacatgttgaagacaggttcaataacagatatcactacgattgggtgttcttgaatgaccaaccatttagtgatgagtttaaacgtgttaccagtgcattggtttctggcaaggcaaaatatgggacaatcccaaaggaccattggtccattccatcttggatcgatactgaaaaattcgatgagaaaaggcttgcaatgggaaaattggatattccatatggtagttccgtgccttaccgtcacatgtgccgtttccagagcgggttcatatggagacacccattattggaggagtacgaatggttttggagagtggataccgatatcactttattctgtgatattcagtatgacatattcaagtttttaaaagtaaataacaagaaatatggattcattctttctgtaagtgaatatgagcgcacaatcccaaccttgtgggaaacgacaaagaaattcatcaagaaaaatcctaaattcttacacaaaaataacctcatgaaattcatttctaatgatgatggtgacacttataatatgtgtcatttctggaccaacttcgaaatcggctctttagacttcttcaggtccgatgcatacagagaatactttgattacttagacagttctggtggattcttctacgaaagatggggggatgcgccagtgcactccatcgctgcctctttgttcttggacaagtctgaaatccatttctttgacggtcttggattccatcatccagatttcacctcttgtcctatcgaacagaagattagattacaaaacaagtgtatctgcgaacctagcaaggacgtcacctggactcctgactacttctgtactagaaagtacttttctgcaggaaattacaagcttccaccaggaatttga

SEQ ID NO: 811 - DNA, 1398 bp, Saccharomyces cerevisiae
atggcgtttgaggattatttttctttccagatattcttcattttcttaagggaatccttagaaattgttgtcattgtttctatcctgttgacgatcgtcaaacaaggtctgtctgttgaggacgacagcccgtttgaaggaagttcctcttctgctggtcttccaagtccaaatacgaacacaaacgcagattcgaccactgccttcttacaagcagggccttcagacggtaatgctattggaacgtccgctacggctgctaataataaatcgaggccgctaaatgtggaggaagaagaagaaatttacgagtactctaatgagcttagagaccaggaccgcgagtccgatgaacatacggctgacaacgttaagctatatcagaaattaaaaatacaaattctagcgggcggcgcatttggtttgttgctgtgtatgttaatcgggggtgcgtttgttagtatcttttatcatattggaaccgacttatggacactgagtgaacattattatgaaggtgtcttaagtcttgtcgcgtccgttattatttctgtcatggggttgttttttttaagaatggggaagttaagagagaagttcagagtgaaattagcttctatcatttattcaaaggacaataatttgctgggaaacaaaacccaaaaaggtgtgaaattcagtgaaaagtactccttcttcatattaccatttataacgactttgagagaagggttagaagctgttgtattcattggaggtatcggtattgaccaaccactatcctcgattcccctctctatggtccttgctactgcaatcagtacggtgttcggtatttttttcttcaggtactcaagttctctttcacttaagatatgccttgtagtcgccacctgcttcctctacttgatcgcggctggtttgttttccaaaggtgtatggcaacttgaattgcaagactacgtcaacaaatgtaacggtcaagacatgagtgaagtaggaaatggacccggttcgtacgacatatctcgttctgtttggcatgttaattgttgcaatggtgaaaaagatggaggttggatgatttttactgccatttttggttggacgaatagtgctaccgtcggctctgtaattagctacaacgcctactggttggtattaatatgcgctttgaaactgctaatgatagaagaaaaatacggatatatcccatatctacctattagctggcaaaagaaacgtattatgaaaagattaagcattgccaaggcatcgctcgatctcaaacatcatacttctgaactcaactctagcacatcagagccagacagtcaaagacggtccaaagatagttctgtgcccctaataattgatagcagtggttcagcaaattga

SEQ ID NO: 812 - DNA, 1398 bp, Artificial Sequence
  Description of Artificial Sequence: Synthetic polynucleotide
atggcgtttgaggattatttttctttccagatattcttcattttcttaagggaatccttagaaattgttgtcattgtttctatcttgttgacgatcgtcaaacaaggtctttctgttgaggacgacagcccgtttgaaggaagttcctcttctgctggtcttccaagtccaaatacgaacacaaacgcagattctaccactgccttcttacaagcagggccttctgacggtaatgctattggaacgtccgctacggctgctaataataaatctaggccgttaaatgtggaggaagaagaagaaatttacgagtactctaatgagcttagagaccaggaccgcgagtccgatgaacatacggctgacaacgttaagctttatcagaaattaaaaatacaaattttggcgggcggcgcatttggtttgttgttatgtatgttaatcgggggtgcgtttgttagtatcttttatcatattggaaccgacttatggacattgagtgaacattattatgaaggtgtcttaagtcttgtcgcgtccgttattatttctgtcatggggttgttttttttaagaatggggaagttaagagagaagttcagagtgaaattagcttctatcatttattccaaggacaataatttgttgggaaacaaaacccaaaaaggtgtgaaattcagtgaaaagtactccttcttcatattaccatttataacgactttgagagaagggttagaagctgttgtattcattggaggtatcggtattgaccaaccattgtccagtattcccctctctatggtccttgctactgcaatcagtacggtgttcggtatttttttcttcaggtactctagttctctttctcttaagatatgccttgtagtcgccacctgcttcctctacttgatcgcggctggtttgttttccaaaggtgtatggcaacttgaattgcaagactacgtcaacaaatgtaacggtcaagacatgagtgaagtaggaaatggacccggttcttacgacatatctcgttctgtttggcatgttaattgttgcaatggtgaaaaagatggaggttggatgatttttactgccatttttggttggacgaatagtgctaccgtcggctctgtaattagctacaacgcctactggttggtattaatatgcgctttgaaattattgatgatagaagaaaaatacggatatatcccatatttacctattagctggcaaaagaaacgtattatgaaaagattaagcattgccaaggcaagtctcgatctcaaacatcatacttctgaactcaactctagcacaagtgagccagacagtcaaagaagatccaaagatagttctgtgcccttgataattgatagcagtggttctgcaaattga

SEQ ID NO: 813 - DNA, 5508 bp, Saccharomyces cerevisiae
atgacagttagttccgatacaactgctgaaatatcgttaggttggtcaatccaagactggattgatttccacaagtcatcaagctcccaggcttcactaaggcttcttgaatcactactagactctcaaaatgttgcgccagtcgataatgcgtggatatcgctaatttcaaaggaaaatttactgcaccaattccaaattttaaagagcagagaaaataaagaaactctacctctctacggtgtccctattgctgttaaggacaacatcgacgttagaggtctacccaccaccgctgcatgtccatcctttgcatatgagccttccaaagactctaaagtagtagaactactaagaaatgcaggtgcgataatcgtgggtaagacaaacttggaccaatttgccacaggattagtcggcacacggtctccatatgggaaaacaccttgcgcttttagcaaagagcatgtatctggtggttcctccgctgggtcagcatcggtggtcgccagaggtatcgtaccaattgcattgggtactgatacagcaggttctggtagagtcccagccgccttgaacaacctgattggcctaaagccaacaaagggcgtcttttcctgtcaaggtgtagttcccgcttgtaaatctttagactgcgtctccatctttgcattaaacctaagtgatgctgaacgctgcttccgcatcatgtgccagccagatcctgataatgatgaatattctagaccctatgtttccaaccctttgaaaaaattttcaagcaatgtaacgattgctattcctaaaaatatcccatggtatggtgaaaccaagaatcctgtactgttttccaatgctgtcgaaaatctatcaagaacgggcgctaacgtcatagaaattgattttgagcctcttttagagttagctcgctgtttatacgaaggtacttgggtggccgagcgttatcaagctattcaatcgtttttggacagtaaaccaccaaaggaatctttggaccctactgttatttcaattatagaaggggccaagaaatacagtgcagtagactgcttcagttttgaatacaaaagacaaggcatcttgcaaaaagtgagacgacttctcgaatcagtcgatgtattgtgtgtgcccacatgtcctttaaatcctactatgcaacaagttgcggatgaaccagtcctagtcaattcaagacaaggcacatggactaattttgtcaacttggcagatttggcagcccttgctgttcccgcagggttccgagacgatggtttgccaaatggtattactttaatcggtaaaaaattcacagattacgcactattagagttggctaaccgctatttccaaaatatattccccaacggttccagaacatacggtacttttacctcttcttcagtaaagccagcaaacgatcaattagtgggaccagactatgacccatctacgtccataaaattggctgttgtcggtgcacatcttaagggtctgcctctacattggcaattggaaaaggtcaatgcaacatatttatgtacaacaaaaacatcaaaagcttaccagctttttgctttgcccaaaaatggaccagttttaaaacctggtttgagaagagttcaagatagcaatggctctcaaatcgaattagaagtgtacagtgttccaaaagaactgttcggtgcttttatttccatggttcctgaaccattaggaataggttcagtggagttagaatctggtgaatggatcaaatcctttatttgtgaagaatctggttacaaagccaaaggtacagttgatatcacaaagtatggtggatttagagcatattttgaaatgttgaagaaaaaagagtcccaaaagaagaagttatttgataccgtgttaattgccaatagaggtgaaattgccgttcgtattatcaagacattaaaaaaattgggtattagatcagttgcagtttattccgaccctgataaatattctcaacacgttactgatgcagatgtttctgtaccccttcatggcacaaccgcagcccaaacttatttagacatgaataagatcatagatgccgctaagcaaactaatgcacaggccattattcctggttatggtttcttgtcggaaaatgcggatttttctgatgcgtgcaccagtgctggcattacctttgttggtccttcgggagatattatcagaggtttagggttaaaacattctgctagacagattgcacagaaggctggcgttcctctagtgccaggctctttgcttatcacatcagttgaagaggctaagaaagtcgcagcggaattggaatacccagttatggtgaagtcaactgctggtggcggtggtattggtttgcagaaagtcgattctgaagaggacatcgagcatatttttgagactgtgaaacatcaaggtgaaacatttttcggtgacgctggtgtatttctggaacggtttatcgaaaatgccaggcatgttgaagtccaacttatgggagatggttttggtaaggccattgctttgggcgaacgtgattgttctttacagcgtcgtaaccaaaaagttatcgaagaaactcctgcaccaaatttgccagaaaagacgaggttggcgttaagaaaggcagctgaaagtttgggatctttattgaattacaagtgtgctggtacggttgaatttatttacgatgagaaaaaggacgagttttactttttagaagttaatacaagattacaagttgaacatccaataacagaaatggttacagggttagacttggtcgagtggatgatcaggattgccgctaatgatgcacctgattttgattctacaaaggtagaagtcaatggggtttcaatggaggcacgtttatatgctgaaaatccattgaaaaatttcagaccttctccaggtttacttgtcgatgtgaaatttcctgattgggcaagagtggatacttgggttaagaaaggtactaatatttctcccgaatatgatccaacattggccaaaattatcgttcatgggaaagaccgtgatgatgcaatttccaagttaaatcaagcgttagaagaaacaaaagtttacggatgtattactaacattgactacctgaagtctatcattaccagtgatttctttgctaaagcaaaagtttctacaaacattttgaactcttatcaatatgagcctaccgccatcgaaattactttgcccggtgcacacactagtattcaggattaccccggtagagttgggtactggagaattggtgttccgccctctggtccaatggacgcatattcgtttagattggcgaacagaattgttggtaatgactacaggactcctgccattgaagtaacgttgactggtccatccatcgttttccattgtgaaactgtcattgccattactggtggtaccgctctatgtacattagacggccaagaaattccccaacacaaaccggtcgaagttaagaggggatctactttatccattggcaagttgacaagcggctgtagagcatacttaggtatcaggggtggcattgatgtgcctaaatacttgggctcttattctactttcactctaggaaatgtcggtggatacaatggaagggtgctaaaacttggagacgtactattcttaccaagcaatgaagaaaataaatcagttgagtgccttccacagaatattcctcaatcattaattcctcaaatttccgaaactaaggaatggagaattggtgtaacatgtggtccccatgggtctccagatttttttaaacctgagtccatcgaagaatttttcagtgagaagtggaaggttcattacaactccaatagatttggtgtccgtttgattggacctaaacctaagtgggcaagaagtaatggtggtgaaggtggtatgcatccttcaaacactcacgattacgtttattctctgggtgcaattaatttcacgggtgatgagccagttattattacttgcgatggtccttccttaggtggttttgtgtgtcaagctgttgtcccagaagcagaactgtggaaggttggacaggttaaacccggtgattccattcagtttgtgccactttcttacgaaagctcgagatccttaaaggaatctcaggatgttgcaattaaatcattggatggtactaagttaaggcgcttagactctgtttcaattttaccatcattcgaaacgcctattcttgcacaaatggaaaaagtgaatgagctttcaccaaaggttgtatacagacaagcaggtgatcgttatgttttggtggaatacggtgataatgaaatgaattttaatatttcctatagaattgaatgcctgatctcccttgtgaaaaagaataagactattggtattgttgaaatgtcccaaggtgttagatctgtattgatagaatttgatggttacaaagtcactcaaaaagaattgcttaaagtattggtggcatatgaaacagaaatccagtttgatgaaaattggaagataacttctaatataataagattaccgatggctttcgaagactcgaagactttggcatgtgttcaaaggtatcaagaaacaattcgttcgtctgctccatggttgccaaataacgttgatttcattgccaatgtaaatggaatttcaaggaatgaagtttatgatatgttgtattctgccagatttatggttttaggtttaggtgatgtcttcctagggtcgccttgtgctgttccattagatcctcgtcacagatttttgggaagcaagtacaacccaagtagaacatatacagaaagaggtgcagtcggtattggcggtatgtatatgtgcatatatgctgctaacagtcctggtgggtaccaattagtgggtagaacaataccaatttgggacaaactatgtctggccgcatcttctgaggttccgtggttgatgaacccatttgaccaagtcgaattttacccagtttctgaagaagatttggataaaatgactgaagattgtgataatggtgtttataaagtcaatatcgaaaagagtgtttttgatcatcaagaatacttgagatggatcaacgcaaacaaagattccatcacagcattccaggagggccagcttggtgaaagagcagaggaatttgccaaattgattcaaaatgcaaactctgaactaaaagaaagtgtcacagtcaaacctgacgaggaagaagacttcccagaaggtgcagaaattgtatattctgagtattctgggcgtttttggaaatccatagcatctgttggagatgttattgaagcaggtcaagggctactaattattgaagccatgaaagcggaaatgattatatccgctcctaaatcgggtaagattatcaagatttgccatggcaatggtgatatggttgattctggtgacatagtggccgtcatagagacattggcatga

SEQ ID NO: 814 - DNA, 5508 bp, Artificial Sequence
  Description of Artificial Sequence: Synthetic polynucleotide
atgacagttagttccgatacaactgctgaaatatctttaggttggtctatccaagactggattgatttccacaagagtagtagctcccaggcttctttgaggcttcttgaatctttattagactctcaaaatgttgcgccagtcgataatgcgtggatatctttgatttccaaggaaaatttattacaccaattccaaattttaaagagcagagaaaataaagaaactttacctctctacggtgtccctattgctgttaaggacaacatcgacgttagaggtttgcccaccaccgctgcatgtccatcctttgcatatgagccttccaaagactctaaagtagtagaattattaagaaatgcaggtgcgataatcgtgggtaagacaaacttggaccaatttgccacaggattagtcggcacaagatctccatatgggaaaacaccttgcgcttttagcaaagagcatgtatctggtggttcctccgctgggtctgcatctgtggtcgccagaggtatcgtaccaattgcattgggtactgatacagcaggttctggtagagtcccagccgccttgaacaacttgattggcttgaagccaacaaagggcgtcttttcctgtcaaggtgtagttcccgcttgtaaatctttagactgcgtctccatctttgcattaaacttgagtgatgctgaacgctgcttccgcatcatgtgccagccagatcctgataatgatgaatattctagaccctatgtttccaaccctttgaaaaaattttctagcaatgtaacgattgctattcctaaaaatatcccatggtatggtgaaaccaagaatcctgtattattttccaatgctgtcgaaaatttatctagaacgggcgctaacgtcatagaaattgattttgagcctcttttagagttagctcgctgtttatacgaaggtacttgggtggccgagcgttatcaagctattcaaagttttttggacagtaaaccaccaaaggaatctttggaccctactgttatttccattatagaaggggccaagaaatacagtgcagtagactgcttcagttttgaatacaaaagacaaggcatcttgcaaaaagtgagaagacttctcgaatctgtcgatgtattgtgtgtgcccacatgtcctttaaatcctactatgcaacaagttgcggatgaaccagtcttggtcaattctagacaaggcacatggactaattttgtcaacttggcagatttggcagcccttgctgttcccgcagggttcagggacgatggtttgccaaatggtattactttaatcggtaaaaaattcacagattacgcattattagagttggctaaccgctatttccaaaatatattccccaacggttccagaacatacggtacttttacctcttcttctgtaaagccagcaaacgatcaattagtgggaccagactatgacccatctacgtccataaaattggctgttgtcggtgcacatcttaagggtttgcctttgcattggcaattggaaaaggtcaatgcaacatatttatgtacaacaaaaacaagtaaagcttaccagctttttgctttgcccaaaaatggaccagttttaaaacctggtttgagaagagttcaagatagcaatggctctcaaatcgaattagaagtgtacagtgttccaaaagaattattcggtgcttttatttccatggttcctgaaccattaggaataggttctgtggagttagaatctggtgaatggatcaaatcctttatttgtgaagaatctggttacaaagccaaaggtacagttgatatcacaaagtatggtggatttagagcatattttgaaatgttgaagaaaaaagagtcccaaaagaagaagttatttgataccgtgttaattgccaatagaggtgaaattgccgttcgtattatcaagacattaaaaaaattgggtattagatctgttgcagtttattccgaccctgataaatattctcaacacgttactgatgcagatgtttctgtaccccttcatggcacaaccgcagcccaaacttatttagacatgaataagatcatagatgccgctaagcaaactaatgcacaggccattattcctggttatggtttcttgagtgaaaatgcggatttttctgatgcgtgcaccagtgctggcattacctttgttggtccttctggagatattatcagaggtttagggttaaaacattctgctagacagattgcacagaaggctggcgttcctttagtgccaggctctttgcttatcacatctgttgaagaggctaagaaagtcgcagcggaattggaatacccagttatggtgaagtctactgctggtggcggtggtattggtttgcagaaagtcgattctgaagaggacatcgagcatatttttgagactgtgaaacatcaaggtgaaacatttttcggtgacgctggtgtatttttggaaagatttatcgaaaatgccaggcatgttgaagtccaacttatgggagatggttttggtaaggccattgctttgggcgaacgtgattgttctttacagcgtcgtaaccaaaaagttatcgaagaaactcctgcaccaaatttgccagaaaagacgaggttggcgttaagaaaggcagctgaaagtttgggatctttattgaattacaagtgtgctggtacggttgaatttatttacgatgagaaaaaggacgagttttactttttagaagttaatacaagattacaagttgaacatccaataacagaaatggttacagggttagacttggtcgagtggatgatcaggattgccgctaatgatgcacctgattttgattctacaaaggtagaagtcaatggggtttctatggaggcacgtttatatgctgaaaatccattgaaaaatttcagaccttctccaggtttacttgtcgatgtgaaatttcctgattgggcaagagtggatacttgggttaagaaaggtactaatatttctcccgaatatgatccaacattggccaaaattatcgttcatgggaaagaccgtgatgatgcaatttccaagttaaatcaagcgttagaagaaacaaaagtttacggatgtattactaacattgactacttgaagtctatcattaccagtgatttctttgctaaagcaaaagtttctacaaacattttgaactcttatcaatatgagcctaccgccatcgaaattactttgcccggtgcacacactagtattcaggattaccccggtagagttgggtactggagaattggtgttccgccctctggtccaatggacgcatattcttttagattggcgaacagaattgttggtaatgactacaggactcctgccattgaagtaacgttgactggtccatccatcgttttccattgtgaaactgtcattgccattactggtggtaccgctctttgtacattagacggccaagaaattccccaacacaaaccggtcgaagttaagaggggatctactttatccattggcaagttgacaagcggctgtagagcatacttaggtatcaggggtggcattgatgtgcctaaatacttgggctcttattctactttcactttgggaaatgtcggtggatacaatggaagggtgttgaaacttggagacgtattattcttaccaagcaatgaagaaaataaatctgttgagtgccttccacagaatattcctcaatctttaattcctcaaatttccgaaactaaggaatggagaattggtgtaacatgtggtccccatgggtctccagatttttttaaacctgagtccatcgaagaatttttcagtgagaagtggaaggttcattacaactccaatagatttggtgtccgtttgattggacctaaacctaagtgggcaagaagtaatggtggtgaaggtggtatgcatccttccaacactcacgattacgtttattctttgggtgcaattaatttcacgggtgatgagccagttattattacttgcgatggtccttccttaggtggttttgtgtgtcaagctgttgtcccagaagcagaattatggaaggttggacaggttaaacccggtgattccattcagtttgtgccactttcttacgaaagcagcagatccttaaaggaatctcaggatgttgcaattaaatctttggatggtactaagttaaggcgcttagactctgtttctattttaccatctttcgaaacgcctattcttgcacaaatggaaaaagtgaatgagctttctccaaaggttgtatacagacaagcaggtgatcgttatgttttggtggaatacggtgataatgaaatgaattttaatatttcctatagaattgaatgcttgatctcccttgtgaaaaagaataagactattggtattgttgaaatgtcccaaggtgttagatctgtattgatagaatttgatggttacaaagtcactcaaaaagaattgcttaaagtattggtggcatatgaaacagaaatccagtttgatgaaaattggaagataacttctaatataataagattaccgatggctttcgaagactccaagactttggcatgtgttcaaaggtatcaagaaacaattcgttcttctgctccatggttgccaaataacgttgatttcattgccaatgtaaatggaatttctaggaatgaagtttatgatatgttgtattctgccagatttatggttttaggtttaggtgatgtcttcttggggagcccttgtgctgttccattagatcctcgtcacagatttttgggaagcaagtacaacccaagtagaacatatacagaaagaggtgcagtcggtattggcggtatgtatatgtgcatatatgctgctaacagtcctggtgggtaccaattagtgggtagaacaataccaatttgggacaaattatgtttggccgcatcttctgaggttccgtggttgatgaacccatttgaccaagtcgaattttacccagtttctgaagaagatttggataaaatgactgaagattgtgataatggtgtttataaagtcaatatcgaaaagagtgtttttgatcatcaagaatacttgagatggatcaacgcaaacaaagattccatcacagcattccaggagggccagcttggtgaaagagcagaggaatttgccaaattgattcaaaatgcaaactctgaattgaaagaaagtgtcacagtcaaacctgacgaggaagaagacttcccagaaggtgcagaaattgtatattctgagtattctgggcgtttttggaaatccatagcatctgttggagatgttattgaagcaggtcaagggttgttaattattgaagccatgaaagcggaaatgattatatccgctcctaaatctggtaagattatcaagatttgccatggcaatggtgatatggttgattctggtgacatagtggccgtcatagagacattggcatga

SEQ ID NO: 815 - DNA, 318 bp, Saccharomyces cerevisiae
atgaacgcatattggtttcattatagagcgtcaatcaagaaagaggcaccaaactataaacgcacatttctcggtagggctaggaacgctttcctgcttatcttatctgaagcttatttattgttcgtttttttatcttatctgataaggggaaaaagcctggaaaagcgcgtaaatgatgaggcgaaatgcagccaaagatgcgtgccgttgcagttagctaacaacctggcgttcggcgatcgccataagagatctgccaattttaaaaagggtattgccaatacacatagtagccttatctgcagcaagccatag

SEQ ID NO: 816 - DNA, 318 bp, Artificial Sequence
  Description of Artificial Sequence: Synthetic polynucleotide
atgaacgcatattggtttcattatagagcgtctatcaagaaagaggcaccaaactataaacgcacatttctcggtagggctaggaacgctttcttgcttatcttatctgaagcttatttattgttcgtttttttatcttatttgataaggggaaaaagcttggaaaagcgcgtaaatgatgaggcgaaatgcagccaaagatgcgtgccgttgcagttagctaacaacttggcgttcggcgatcgccataagagatctgccaattttaaaaagggtattgccaatacacatagtagccttatctgcagcaagccatga

SEQ ID NO: 817 - DNA, 429 bp, Saccharomyces cerevisiae
atgtcaggaaccggattatcgctattcgtgacgggtcttatactgaattgtttgaattccatttgccagatatactttactatattatatggtgatcttgaagcagactatatcaactcaatcgaactgtgtaagagggtgaataggttgagtgtaccagaggcaattctacaagctttcatttctgcattgtttctttttaacgggtactggttcgtatttctcttgaatgtccctgttctagcatataacgcaagtaaagtctacaagaaaacacatctactggacgccacggatattttcagaaaattgggtagatgcaaaattgaatgctttttaaaattgggattttaccttctcatattctttttctacttctacagaatggtcacagcgttacttgaaaatgatgcaaatttgataagctaa

SEQ ID NO: 818 - DNA, 429 bp, Artificial Sequence
  Description of Artificial Sequence: Synthetic polynucleotide
atgtctggaaccggattaagtttattcgtgacgggtcttatattgaattgtttgaattccatttgccagatatactttactatattatatggtgatcttgaagcagactatatcaactctatcgaattatgtaagagggtgaataggttgagtgtaccagaggcaattttacaagctttcatttctgcattgtttctttttaacgggtactggttcgtatttctcttgaatgtccctgttttagcatataacgcaagtaaagtctacaagaaaacacatttattagacgccacggatattttcagaaaattgggtagatgcaaaattgaatgctttttaaaattgggattttaccttctcatattctttttctacttctacagaatggtcacagcgttacttgaaaatgatgcaaatttgataagctga

SEQ ID NO: 819 - DNA, 975 bp, Saccharomyces cerevisiae
atggatagagacactaaattagcttttaggctgaggggcagtcattcaagaaggacagacgatatagatgatgatgttattgtatttaagacgccaaatgctgtttatagagaggagaactcacctattcaatctcctgttcaacccattttgtcttcaccaaaacttgcgaattctttcgagtttcctattaccactaataacgtaaatgcgcaggaccgtcatgaacatgggtatcagcccttggatgcagaagactatcccatgatcgactctgaaaataaaagtcttataagcgaatcgccgcaaaatgttagaaatgatgaagaccttactactcgttacaatttcgatgatatacccattagacagctatcatcgtctatcacttctgtgaccacaattgatgttttatcttctttattcataaacttatttgaaaatgatttgattccgcaagctttgaaggatttcaataaaagtgatgatgatcaatttaggaaactattgtacaaattagatctgcgactctttcaaacgatatcagaccaaatgaccagagacttgaaagacatattagatatcaacgtgtcgaataatgagctctgctaccaactgaagcaggtacttgctcgaaaagaagatttgaaccagcagataatatcggtacgaaatgaaattcaagagttgaaagccggtaaagactggcatgacttacaaaatgaacaagccaaactgaacgacaaagtgaagctaaataagaggctaaatgatttgacttctactttgctaggcaaatacgagggagatcgcaaaattatgagccaagatagcgaggacgattcaatacgggatgactcaaatattctggatattgcacatttcgtagacttgatggatccatataacggacttctgaaaaagataaataaaattaatgaaaatctttctaacgaattacaaccaagtctatag

SEQ ID NO: 820 - DNA, 975 bp, Artificial Sequence
  Description of Artificial Sequence: Synthetic polynucleotide
atggatagagacactaaattagcttttaggttgaggggcagtcattccagaaggacagacgatatagatgatgatgttattgtatttaagacgccaaatgctgtttatagagaggagaactctcctattcaatctcctgttcaacccattttgtcttctccaaaacttgcgaattctttcgagtttcctattaccactaataacgtaaatgcgcaggaccgtcatgaacatgggtatcagcccttggatgcagaagactatcccatgatcgactctgaaaataaaagtcttataagcgaatctccgcaaaatgttagaaatgatgaagaccttactactcgttacaatttcgatgatatacccattagacagttatcttcttctatcacttctgtgaccacaattgatgttttatcttctttattcataaacttatttgaaaatgatttgattccgcaagctttgaaggatttcaataaaagtgatgatgatcaatttaggaaacttttgtacaaattagatttaagactctttcaaacgatatctgaccaaatgaccagagacttgaaagacatattagatatcaacgtgagtaataatgagctctgctaccaattgaagcaggtacttgctagaaaagaagatttgaaccagcagataatatctgtaagaaatgaaattcaagagttgaaagccggtaaagactggcatgacttacaaaatgaacaagccaaattgaacgacaaagtgaagttgaataagaggttgaatgatttgacttctactttgttgggcaaatacgagggagatcgcaaaattatgagccaagatagcgaggacgattctataagagatgactctaatattttagatattgcacatttcgtagacttgatggatccatataacggacttttgaaaaagataaataaaattaatgaaaatctttctaacgaattacaaccaagtttgtga

SEQ ID NO: 821 - DNA, 2019 bp, Saccharomyces cerevisiae
atgatgtctaacgttgctaacgcctcccaaagacaggaaaatccatatattattccattgcctccttcatccacagtggaaacttctactgaacccccaagaacgttatggatgggagatttggatccgtccttcgacgaggccacgattgaggagatatggtcaaaactggataaaaaagttatcgttaaactaattagagccaaaaaaaatttgttgattccttgtagctccacctcaagtagtaataacaacacaagtgaggagaatgctgaaaaccagcaatctgcatcaaacagcactgatcagttagataattcccaaatgattaatattaatggaatatccttcattgatccttccactactcaattacatcatgccggatactgttttgtcgaatttgaaactcaaaaggacgctaaatttgccctgtcattaaatgctacacctttacctaatttttattccccaacaactaactcccaaactaatccaacgttcaaaaggactttcagattgaattgggcgtctggagctactttacaaagttctataccatctaccccagaattttccttgtttgttggtgatctttctcccaccgccactgaagctgatttgttatctcttttccaaacgaggttcaaatctgttaaaaccgtccgcgtgatgactgaccctttaacaggatcatctcgttgttttggatttgtcagattcggtgatgaagatgagcgccgcagggcactgattgagatgagtgggaaatggtttcaaggaagggccttaagagtcgcttatgccacgccaagaaataatatgatgctgcagttacaggaacaacaacaacagcaacaacaattgcagcaacagcatcagcagctagatcaggaggataataatggccctctcttgattaagactgcaaataatctcattcaaaacaatagcaacatgcttcctctcaatgccttgcataacgcgcctccaatgcatttgaatgagggcggcatttcaaacatgcgtgtaaatgattcactaccttcaaacacctataatacagaccccactaatactactgtttttgtgggaggactggtaccaaaaactaccgaatttcaattacgttcactattcaaaccctttggacccattctaaatgtcaggattcccaatggtaaaaactgtgggtttgttaaattcgagaagaggattgatgctgaagcttcaatacaaggcctgcaaggctttattgtgggcggcagtccaataagattatcatggggacgcccatccagttcaaatgctaaaacaaattcgaccatcatgggggcaagccaatatatgtcctcaaatggcctgagagcgccatctgcggcttcttcagtcgataactccaaacaaattcttgaacaatatgcggaagataaaaggcgactctttttacatcagcagcagcagcagcagcagcagcagcaacaggatggtaacttttctatggagcaaatggcgcacaacaactattacaactacaataattacgattatcacaggaacaagaatggcagccatagcgacctcgttaatctgcagagatctaatgtcccgtatatgcaagaagacggtgcactgtacccacaccaatattcaagtccctcatactcgctccatccgacgggcaaccaattctccaatgctactaataacttacctcaatttgggaacgcgatgtcaatttctatgcaactgcccaatggcaacagcaataaaacggcctcaagcatgaacacaaaccctaacacaaacatgatcatgaattctaacatgaacatgaacatgaacgtaaatccagtaccatacggaatgggaaacggtgcaaatatgtatgacgtgtccaggatgatgactcctcccttaaatatagccccgaattccaataattcgaaatcgagcatcatgaacaagcatcctaataggaacaatgttccgccaattcatccttctcttctacattga

SEQ ID NO: 822 - DNA, 2019 bp, Artificial Sequence
  Description of Artificial Sequence: Synthetic polynucleotide
atgatgtctaacgttgctaacgcctcccaaagacaggaaaatccatatattattccattgcctccttcttccacagtggaaacttctactgaacccccaagaacgttatggatgggagatttggatccgtccttcgacgaggccacgattgaggagatatggtccaaattggataaaaaagttatcgttaaattgattagagccaaaaaaaatttgttgattccttgtagctccacctctagtagtaataacaacacaagtgaggagaatgctgaaaaccagcaatctgcatctaacagcactgatcagttagataattcccaaatgattaatattaatggaatatccttcattgatccttccactactcaattacatcatgccggatactgttttgtcgaatttgaaactcaaaaggacgctaaatttgccttgtctttaaatgctacacctttacctaatttttattccccaacaactaactcccaaactaatccaacgttcaaaaggactttcagattgaattgggcgtctggagctactttacaaagttctataccatctaccccagaattttccttgtttgttggtgatctttctcccaccgccactgaagctgatttgttatctcttttccaaacgaggttcaaatctgttaaaaccgtccgcgtgatgactgaccctttaacaggatcttctcgttgttttggatttgtcagattcggtgatgaagatgagcgccgcagggcattgattgagatgagtgggaaatggtttcaaggaagggccttaagagtcgcttatgccacgccaagaaataatatgatgttacagttacaggaacaacaacaacagcaacaacaattgcagcaacagcatcagcagttagatcaggaggataataatggccctctcttgattaagactgcaaataatctcattcaaaacaatagcaacatgcttcctctcaatgccttgcataacgcgcctccaatgcatttgaatgagggcggcatttccaacatgcgtgtaaatgattctttgccttccaacacctataatacagaccccactaatactactgtttttgtgggaggattagtaccaaaaactaccgaatttcaattacgttctttattcaaaccctttggacccattttgaatgtcaggattcccaatggtaaaaactgtgggtttgttaaattcgagaagaggattgatgctgaagcttctatacaaggcttacaaggctttattgtgggcggcagtccaataagattatcttggggacgcccatccagtagtaatgctaaaacaaattctaccatcatgggggcaagccaatatatgtcctctaatggcttaagagcgccatctgcggcttcttctgtcgataactccaaacaaattcttgaacaatatgcggaagataaaaggaggctctttttacatcagcagcagcagcagcagcagcagcagcaacaggatggtaacttttctatggagcaaatggcgcacaacaactattacaactacaataattacgattatcacaggaacaagaatggcagccatagcgacctcgttaatttacagagatctaatgtcccgtatatgcaagaagacggtgcattgtacccacaccaatattctagtccctcttactccctccatccgacgggcaaccaattctccaatgctactaataacttacctcaatttgggaacgcgatgtctatttctatgcaattgcccaatggcaacagcaataaaacggcctccagcatgaacacaaaccctaacacaaacatgatcatgaattctaacatgaacatgaacatgaacgtaaatccagtaccatacggaatgggaaacggtgcaaatatgtatgacgtgtccaggatgatgactcctcccttaaatatagccccgaattccaataattctaaaagtagcatcatgaacaagcatcctaataggaacaatgttccgccaattcatccttctcttttacattga

SEQ ID NO: 823 - DNA, 825 bp, Saccharomyces cerevisiae
atggtcaaatcgctacagctagcccatcaattaaaagacaagaaaatactactaatcggaggcggagaagtcggcttgacaaggttatataagctgatacctacaggttgcaagctgactttagtatctcctgacctacacaaatccattattccgaagtttggaaaattcatccagaacgaggatcagcccgactacagagaagacgctaaacgctttatcaatccgaactgggaccccacgaagaatgaaatttacgagtacatccgcagtgacttcaaagacgaatacctcgacctagaagacgagaacgacgcgtggtacataataatgacctgtatacccgaccaccctgaaagcgcaagaatatatcacctttgtaaggaaagattcggtaagcagcagctggtcaatgtggcggacaaacctgatctctgtgacttttatttcggcgccaacctggagataggagaccgtctacagattctgatctctaccaacggcctttctccgcgctttggcgctctagtaagagatgagatccgtaacttattcacacaaatgggggatctggcgctggaggacgctgtcgtcaaactaggtgagctgagaagaggaattaggctgctggcaccagacgacaaggatgtcaagtaccgcatggattgggccagacgctgcacagacctcttcggcattcagcactgccacaacatcgacgtaaaacgtctgctggatcttttcaaggtcatgtttcaagaacagaactgttccttgcagttccctcccagagaacggttgcttagcgagtactgctcgtcttga

SEQ ID NO: 824 - DNA, 825 bp, Artificial Sequence
  Description of Artificial Sequence: Synthetic polynucleotide
atggtcaaatctttgcagttggcccatcaattaaaagacaagaaaatattattgatcggaggcggagaagtcggcttgacaaggttatataagttaatacctacaggttgcaagttgactttagtatctcctgacttgcacaaatccattattccgaagtttggaaaattcatccagaacgaggatcagcccgactacagagaagacgctaaacgctttatcaatccgaactgggaccccacgaagaatgaaatttacgagtacatccgcagtgacttcaaagacgaatacctcgacttggaagacgagaacgacgcgtggtacataataatgacctgtatacccgaccaccctgaaagcgcaagaatatatcacctttgtaaggaaagattcggtaagcagcagttggtcaatgtggcggacaaacctgatctctgtgacttttatttcggcgccaacttggagataggagaccgtttgcagattttgatctctaccaacggcctttctccgcgctttggcgctttggtaagagatgagatccgtaacttattcacacaaatgggggatttggcgctcgaggacgctgtcgtcaaattgggtgagttaagaagaggaattaggttattggcaccagacgacaaggatgtcaagtaccgcatggattgggccagacgctgcacagacctcttcggcattcagcactgccacaacatcgacgtaaaacgtttattagatcttttcaaggtcatgtttcaagaacagaactgttccttgcagttccctcccagagaaagattgcttagcgagtactgctcttcttga

SEQ ID NO: 825 - DNA, 1584 bp, Saccharomyces cerevisiae
atggcttctacttcgaacacgttccctccaagccaaagcaattcttccaacaaccttccaacttctagacatgcatccattgtggagatgctgtctactccgccattgctgccccacgttcaagtgaacgatacagacgacaaggaacaaccagaagagtccacgccgccaacagcaacagcggcagcgcctggtccaggttgtgctgctacacccgcccccttgcgcgatgaaaagcctcaattcaaactatcagctgttcctatgacccagacgccatcgcagtgtctgtcatgtgtgcacgcccaaaaatggcaacacataccgttgtcgcaattgatcgaacagaataagcttatttttgttccaggttccatatcggtagaggaggcattcaacactttgatcaagtatcatctaaactctattcccgtggaatctttccccggcgacatgaactgttttactttcgactacaatgaccttaattcgtaccttttgctggttttgaataaaatcaccgtcagcaacaaacagcttactgcagattgccagaatggaaaacccgtaccagtgggcgaaatggtgaaactaactcctaagaatccgttctataagctgccggagaatgagagtttgtccacggtgatggggattctcggttcgggtgtccatcgtgtagcgataacaaacgaagagatgaccaaagttaaaggtattttgtcccaacgtcgtttgataaagtatctttgggacaacgctagatcttttacaagcttagaacctctattaaactcctcattacaagatttgcacatcggtgttctcaatattcaatctaagccaacttcaagacaatcccgtgtcatctctattcaaggcgaggagcccttaatcatgggcctttataaaatgcatgtggaaagaatttcttccattgcagtcatcgacaaacaaggtaatttgctaggtaacatatcggtaacggacgtaaaacatgtcacaagaacctcccaataccccttactacataagacatgtcgccatttcatttctgtcattttaaactccagaggattagaaacgggtaaagattctttccccatttttcacgtataccccagtagttcactagcaaggactcttgccaagttagttgctacaaagtctcatagactatggatcgtacaaccgccggagtcgtcaacctcggcgtcatccacaaatttaacagctgctaatactgcagccaatgcagtttctgccaccgctcaatcgtctgctaatggtgcgactccaatgtcaaagtcatcctcttcaacatccctcaactcccactctccgttgatgacagcaatggaagacccaccatccccacgttcttcggccatcgcgatcccaccaccaagtcccgcttcctcaacaaacacaccaaacctattcgaaaaggaatatagaacgggtaagttgatcggtgtggtctcattgacagacatcatcaacttattagcaaggaaacaaacagggaataaagaagtggatccgcaatccgcaagaagacagagaggcagtatcgccatgtga

SEQ ID NO: 826 - DNA, 1584 bp, Artificial Sequence
  Description of Artificial Sequence: Synthetic polynucleotide
atggcttctacttctaacacgttccctccaagccaaagcaattcttccaacaaccttccaacttctagacatgcatccattgtggagatgctttctactccgccattgttgccccacgttcaagtgaacgatacagacgacaaggaacaaccagaagagtccacgccgccaacagcaacagcggcagcgcctggtccaggttgtgctgctacacccgcccccttgcgcgatgaaaagcctcaattcaaattatctgctgttcctatgacccagacgccatctcagtgtttaagttgtgtgcacgcccaaaaatggcaacacataccgttgtctcaattgatcgaacagaataagcttatttttgttccaggttccatatctgtagaggaggcattcaacactttgatcaagtatcatttgaactctattcccgtggaatctttccccggcgacatgaactgttttactttcgactacaatgaccttaattcttaccttttgttggttttgaataaaatcaccgtcagcaacaaacagcttactgcagattgccagaatggaaaacccgtaccagtgggcgaaatggtgaaattaactcctaagaatccgttctataagttaccggagaatgagagtttgtccacggtgatggggattctcggttctggtgtccatcgtgtagcgataacaaacgaagagatgaccaaagttaaaggtattttgtcccaacgtcgtttgataaagtatctttgggacaacgctagatcttttacaagcttagaacctttattaaactcctctttacaagatttgcacatcggtgttctcaatattcaatctaagccaacttccagacaatcccgtgtcatctctattcaaggcgaggagcccttaatcatgggcctttataaaatgcatgtggaaagaatttcttccattgcagtcatcgacaaacaaggtaatttgttgggtaacatatctgtaacggacgtaaaacatgtcacaagaacctcccaataccccttattacataagacatgtcgccatttcatttctgtcattttaaactccagaggattagaaacgggtaaagattctttccccatttttcacgtataccccagtagttctttggcaaggactcttgccaagttagttgctacaaagtctcatagattatggatcgtacaaccgccggagtcttccacctctgcgtcttccacaaatttaacagctgctaatactgcagccaatgcagtttctgccaccgctcaatcttctgctaatggtgcgactccaatgtccaagtcttcctcttctacatccctcaactcccactctccgttgatgacagcaatggaagacccaccatccccacgttcttctgccatcgcgatcccaccaccaagtcccgcttcctctacaaacacaccaaacttgttcgaaaaggaatatagaacgggtaagttgatcggtgtggtctctttgacagacatcatcaacttattagcaaggaaacaaacagggaataaagaagtggatccgcaatccgcaagaagacagagaggcagtatcgccatgtga

SEQ ID NO: 827 - DNA, 1878 bp, Saccharomyces cerevisiae
atggaccaaaaagcaattgtccttgataactctaaaagtggtagtaaacagacaaaatcgagtggcaaaatgcaaacgcaaacagatactaatgctgaagttctaaacaccgataacagtatcaaaaaagaaacaggaagtgattctgaggatcttttcaataaattttcaaacaaaaaaacgaacaggaaaatacccaacatcgctgaagaattagcgaaaaacagaaactacgtaaaaggtgcgtctccgtctcccattataatttctggttcctcttcaacttctccatcaggaccctcttcctccagtacaaacccgatggggataccaacgaatcgatttaataaaaatactgtagaactatatcagcattcaccatcccccgtgatgactactaacaagactgatacagaggaaaagagacaaaacaatagaaatatggataataaaaacaccccagaaagaggatcttcttcctttgctgctaagcaactaaaaatatcatccttgttaactatatcctccaatgaagatagtaaaactttgcatataaacgatactaatggcaacaaaaatagtaatgccgccagtaataatattccatcggcttatgcagaactccatacagagggaaatagcattgaatcactaataaaacccccaagctctcccagaaataaatctctaacgcccaaagttatcttgccaacacagaatatggatggtacaattgcaaaggatcctcatttaggtgataatacaccaggaatactcatagcaaaaactagttctcccgtaaatttggatgttgaaagcactgcacaatctctgggaaaatttaacaagtccactaattctttgaaagctgccctaacaaaagctcctgcagaaaaggtctctttaaaacgtagcattagttcagttacaaacagtgattctaatattagctccagcaaaaagcctacgtctgaaaaagctaaaaaatcaagttcagcatcagcaatactaccaaagccaacaacgaccaagacatcaaaaaaagctgctagcaatagtagcgattctaccagaaaaaaaaacgcctcgaacaagactacatcagccataaagaaagagtcaaatgccggctccaaattgaacactgttaagaaggaaaatagctctttatcttctatcaaagccactgagaaagaaaaagataaaggtggaaatagcacggaagcaaaaaactctaccagcaacgttagaaaggaaccaactgcaaaatccccaaaaaggttagtagccgcaccgacagtcagtccaccaaaaattctacaaacggcagaaaccaaagcaaaggaaccctcgatattgattgacgttccattgtatcaagctgatacaaacgactacctagacgaaaacggtcaggttatttttaatttatcaactttaataaaagagaagtatcacccgaaaagtaaagaactagcacaacttaaagactctaaaagaaatttattaatgcaattatccgatcattctaacggctcactagaaaaggaaaaagatgaagaaggagatgtaatagaacttgatgatgatgaggatatggaagaagatgaaggggaaatagatacagaaactaatactgtaactaccaccatctctccgaagaagaagtcgcatcctatgaaaggtaaaaatttgattggtaaatatgacgttgaagatccgttcattgatgattcggagttattgtgggaggaacagcgtgctgccaccaaggacggtttttttgtttactttggtccattaatcgaaaaaggtcactatgcaagtttggagcgtgcaaatggtaccatgaaaagaggtggtgttaaaaataaataa

SEQ ID NO: 828 - DNA, 1878 bp, Artificial Sequence
  Description of Artificial Sequence: Synthetic polynucleotide
atggaccaaaaagcaattgtccttgataactctaaaagtggtagtaaacagacaaaatctagtggcaaaatgcaaacgcaaacagatactaatgctgaagttttgaacaccgataacagtatcaaaaaagaaacaggaagtgattctgaggatcttttcaataaattttccaacaaaaaaacgaacaggaaaatacccaacatcgctgaagaattagcgaaaaacagaaactacgtaaaaggtgcgtctccgtctcccattataatttctggttcctcttctacttctccatctggaccctcttcctccagtacaaacccgatggggataccaacgaatagatttaataaaaatactgtagaattgtatcagcattctccatcccccgtgatgactactaacaagactgatacagaggaaaagagacaaaacaatagaaatatggataataaaaacaccccagaaagaggatcttcttcctttgctgctaagcaattgaaaatatcttccttgttaactatatcctccaatgaagatagtaaaactttgcatataaacgatactaatggcaacaaaaatagtaatgccgccagtaataatattccatctgcttatgcagaactccatacagagggaaatagcattgaatctttgataaaacccccaagctctcccagaaataaatctttgacgcccaaagttatcttgccaacacagaatatggatggtacaattgcaaaggatcctcatttaggtgataatacaccaggaatactcatagcaaaaactagttctcccgtaaatttggatgttgaaagcactgcacaatctttgggaaaatttaacaagtccactaattctttgaaagctgccttaacaaaagctcctgcagaaaaggtctctttaaaacgtagcattagttctgttacaaacagtgattctaatattagctccagcaaaaagcctacgtctgaaaaagctaaaaaatctagttctgcatctgcaatattgccaaagccaacaacgaccaagacaagtaaaaaagctgctagcaatagtagcgattctaccagaaaaaaaaacgcctccaacaagactacatctgccataaagaaagagagcaatgccggctccaaattgaacactgttaagaaggaaaatagctctttatcttctatcaaagccactgagaaagaaaaagataaaggtggaaatagcacggaagcaaaaaactctaccagcaacgttagaaaggaaccaactgcaaaatccccaaaaaggttagtagccgcaccgacagtcagtccaccaaaaattttacaaacggcagaaaccaaagcaaaggaaccctccatattgattgacgttccattgtatcaagctgatacaaacgactacttggacgaaaacggtcaggttatttttaatttatctactttaataaaagagaagtatcacccgaaaagtaaagaattggcacaacttaaagactctaaaagaaatttattaatgcaattatccgatcattctaacggctccttagaaaaggaaaaagatgaagaaggagatgtaatagaacttgatgatgatgaggatatggaagaagatgaaggggaaatagatacagaaactaatactgtaactaccaccatctctccgaagaagaagagtcatcctatgaaaggtaaaaatttgattggtaaatatgacgttgaagatccgttcattgatgattctgagttattgtgggaggaacagcgtgctgccaccaaggacggtttttttgtttactttggtccattaatcgaaaaaggtcactatgcaagtttggagcgtgcaaatggtaccatgaaaagaggtggtgttaaaaataaatga

SEQ ID NO: 829 - DNA, 2025 bp, Saccharomyces cerevisiae
atggaaccaattgatgacatactttttgaggttactgatgcgttcaaaactcagaaggaggatcttcttgagttggtaacattgattgatatatatggcgagcaagttaaccaagaggggagctatgaagaaaagacgagattcattgaaactttgaatacattgttagaggataatccgagtactactggtgaaatcggttgggatctgcctaagggattattgaagttcttgtcaaaggataatgtcgatgtaaatggaagactaggtacgaatatgattgtccaaggtgtaatgaagtgtttctatgccatctcaatccaaggcgagcccaaaaaatgtttaattactgggttggagttgctttcatccctttgttcaaaagatttttccaagagtgatcaacagaataaggaagactttgttgataaaaaggccaatacgttacctcctgaaggagtaatcgaaaattcctctaatcgaaaagattttccatcctacggtgaaagcaagagttcaaatgaatttttcttgaagttgaaatcctacattttatttgaattcataggggcgagtctgaaaaggatttctactctgtttccttcgaaatatctgggagctgctgtgtcaacaattgagaaatttgtgtatagtcatgcggacacttttgaagatgcccttttccttcttcgtagggtgtacacattctgcaggaactatattccccctgatccaccaaaagatatacaattgaacgaagattttactcgagagatgtttgataaagttgtggaggaagaaagtgaattacaggttagactattgcgtaggctttgtacttttggtatttcgacacccataaaaactgtcaccaccaatgccgacgtgaaatactattgtgcactaaatcaacagaagtttgaattatctgcatattacaccgaatatcttgagctattttgcaggtattaccaaatggcgttctcgcttgatgttgatatagagggagaatttcagaatgtgataaaagaatgtaggattatttataagtctgtaccccaggagatttccgctgttaatgatgaagcaaagttggttttggaaagaatggtatataaattggcttatacattcgaagtacaaaaggccgctaaagaaaaaaatgttggtttggactataatggtgtaatattattttctggtatccactatttggaaaccaatcaacatttagtaaaggaaatgaatataacggatgccatttatctctacttgagatttacaactccatcattatattctaaagtttactataatgtagcagttgaatcagttagtcgctactggctatggtatgctattacaaccgagcccttggaggatgtaaaaaaagaattgaagaatctttcagtgtttgttacaaaaacattattgcatgttctacttcaaaagaactgtattcaggtcaatcagcagttaagaatgataactttcactcttctcaccagattactatgtttaatacctgaaaaagttgcatttgagtttatcttagatgtgcttaagacatctccccttccattggctaagacgtccgtattatgtgtttttaaagacctttcaaggcgacgcatctccaccaaggataacgattctgagacggatttgattgtcgaaaaattatccaaactgaaggtcaatgatagtaacaaagctcagcaaagtaacatcagacattatatccaactagattcttccaaaatgaaagctgttcatgactgttgtctgcagactatccaagattcatttacggcagatgccaagaagagtgatatattattactgctaacttacttgaatattttcattgtgctaaaaaaaacatgggatgaagatctactgaagattgtttgttcgaagattgattctaatttgaagtcagtcgaacctgataaacttccgaagtataaggaaattgtggataaaaacgaatctctaaatgactattttactggtataaaatga

SEQ ID NO: 830 - DNA, 2025 bp, Artificial Sequence
  Description of Artificial Sequence: Synthetic polynucleotide
atggaaccaattgatgacatactttttgaggttactgatgcgttcaaaactcagaaggaggatcttcttgagttggtaacattgattgatatatatggcgagcaagttaaccaagaggggagctatgaagaaaagacgagattcattgaaactttgaatacattgttagaggataatccgagtactactggtgaaatcggttgggatttacctaagggattattgaagttcttgtccaaggataatgtcgatgtaaatggaagattaggtacgaatatgattgtccaaggtgtaatgaagtgtttctatgccatctccatccaaggcgagcccaaaaaatgtttaattactgggttggagttgctttcctccctttgttctaaagatttttccaagagtgatcaacagaataaggaagactttgttgataaaaaggccaatacgttacctcctgaaggagtaatcgaaaattcctctaatagaaaagattttccatcctacggtgaaagcaagagtagtaatgaatttttcttgaagttgaaatcctacattttatttgaattcataggggcgagtttgaaaaggatttctactttatttccttccaaatatttgggagctgctgtgtctacaattgagaaatttgtgtatagtcatgcggacacttttgaagatgcccttttccttcttcgtagggtgtacacattctgcaggaactatattccccctgatccaccaaaagatatacaattgaacgaagattttactagggagatgtttgataaagttgtggaggaagaaagtgaattacaggttagattattgcgtaggctttgtacttttggtatttctacacccataaaaactgtcaccaccaatgccgacgtgaaatactattgtgcattgaatcaacagaagtttgaattatctgcatattacaccgaatatcttgagttattttgcaggtattaccaaatggcgttctctcttgatgttgatatagagggagaatttcagaatgtgataaaagaatgtaggattatttataagtctgtaccccaggagatttccgctgttaatgatgaagcaaagttggttttggaaagaatggtatataaattggcttatacattcgaagtacaaaaggccgctaaagaaaaaaatgttggtttggactataatggtgtaatattattttctggtatccactatttggaaaccaatcaacatttagtaaaggaaatgaatataacggatgccatttatctctacttgagatttacaactccatctttatattctaaagtttactataatgtagcagttgaatctgttagtcgctactggttatggtatgctattacaaccgagcccttggaggatgtaaaaaaagaattgaagaatctttctgtgtttgttacaaaaacattattgcatgttttacttcaaaagaactgtattcaggtcaatcagcagttaagaatgataactttcactcttctcaccagattattatgtttaatacctgaaaaagttgcatttgagtttatcttagatgtgcttaagacatctccccttccattggctaagacgtccgtattatgtgtttttaaagacctttctaggagacgcatctccaccaaggataacgattctgagacggatttgattgtcgaaaaattatccaaattgaaggtcaatgatagtaacaaagctcagcaaagtaacatcagacattatatccaattggattcttccaaaatgaaagctgttcatgactgttgtttacagactatccaagattcttttacggcagatgccaagaagagtgatatattattattattaacttacttgaatattttcattgtgttgaaaaaaacatgggatgaagatttattgaagattgtttgttccaagattgattctaatttgaagtctgtcgaacctgataaacttccgaagtataaggaaattgtggataaaaacgaatctttgaatgactattttactggtataaaatga

SEQ ID NO: 831 - DNA, 561 bp, Saccharomyces cerevisiae
atgagtaggatcctagagagcgaaaatgaaacagaaagtgacgaaagctccatcatatccacaaataatggaacggcaatggaaagatccagaaataatcaagaattaagatcatctcctcataccgttcaaaatagattggaactttttagcaggagattgtctcagcttggtttggcgagtgacatttctgtcgaccagcaagttgaagattcctctagtggcacttatgaacaggaagagacaatcaaaacgaatgcacaaacaagcaaacaaaaaagccataaagacgaaaaaaacatacaaaagatacagataaaatttcagcccattggttctattgggcagttaaaaccatctgtttgtaaaatatcaatgtcacagtcttttgcaatggttattttatttcttaagagacggctgaaaatggaccatgtttattgttatataaataattcgtttgcgccaagtccgcagcaaaatattggtgaactttggatgcaattcaagactaatgatgagcttattgtaagttattgtgcatccgtagcgtttggttaa

SEQ ID NO: 832 - DNA, 561 bp, Artificial Sequence
  Description of Artificial Sequence: Synthetic polynucleotide
atgagtaggatcttggagagcgaaaatgaaacagaaagtgacgaaagctccatcatatccacaaataatggaacggcaatggaaagatccagaaataatcaagaattaagatcttctcctcataccgttcaaaatagattggaactttttagcaggagattgtctcagcttggtttggcgagtgacatttctgtcgaccagcaagttgaagattcctctagtggcacttatgaacaggaagagacaatcaaaacgaatgcacaaacaagcaaacaaaaaagccataaagacgaaaaaaacatacaaaagatacagataaaatttcagcccattggttctattgggcagttaaaaccatctgtttgtaaaatatccatgtctcagtcttttgcaatggttattttatttcttaagagaagattgaaaatggaccatgtttattgttatataaataattcttttgcgccaagtccgcagcaaaatattggtgaactttggatgcaattcaagactaatgatgagcttattgtaagttattgtgcatccgtagcgtttggttga

SEQ ID NO: 833 - DNA, 3543 bp, Saccharomyces cerevisiae
atgagcagtagcaagaaattggccggtcttagggacaatttcagtttgctcggcgaaaagaataagatcttggtcgccaatagaggtgaaattccgattagaatttttagatctgctcatgagctgtctatgagaaccatcgccatatactcccatgaggaccgtctttcaatgcacaggttgaaggcggacgaagcgtatgttatcggggaggagggccagtatacacctgtgggtgcttacttggcaatggacgagatcatcgaaattgcaaagaagcataaggtggatttcatccatccaggttatgggttcttgtctgaaaattcggaatttgccgacaaagtagtgaaggccggtatcacttggatcggccctccagctgaagttattgactctgtgggtgacaaagtctctgccagacacttggcagcaagagctaacgttcctaccgttcccggtactccaggacctatcgaaactgtgcaagaggcacttgacttcgttaatgaatacggctacccggtgatcattaaggccgcctttggtggtggtggtagaggtatgagagtcgttagagaaggtgacgacgtggcagatgcctttcaacgtgctacctccgaagcccgtactgccttcggtaatggtacctgctttgtggaaagattcttggacaagccaaagcatattgaagttcaattgttggctgataaccacggaaacgtggttcatcttttcgaaagagactgttctgtgcaaagaagacaccaaaaagttgtcgaagtcgctccagcaaagactttgccccgtgaagttcgtgacgctattttgacagatgctgttaaattagctaaggtatgtggttacagaaacgcaggtaccgccgaattcttggttgacaaccaaaacagacactatttcattgaaattaatccaagaattcaagtggagcataccatcactgaagaaatcaccggtattgacattgtttctgcccaaatccagattgccgcaggtgccactttgactcaactaggtctattacaggataaaatcaccacccgtgggttttccatccaatgtcgtattaccactgaagatccctctaagaatttccaaccggataccggtcgcctggaggtctatcgttctgccggtggtaatggtgtgagattggacggtggtaacgcttatgcaggtgctactatctcgcctcactacgactcaatgctggtcaaatgttcatgctctggttctacttatgaaatcgtccgtaggaagatgattcgtgccctgatcgaattcagaatcagaggtgttaagaccaacattcccttcctattgactcttttgaccaatccagtttttattgagggtacatactggacgacttttattgacgacaccccacaactgttccaaatggtatcgtcacaaaacagagcgcaaaaactgttacactatttggcagacttggcagttaacggttcttctattaagggtcaaattggcttgccaaaactaaaatcaaatccaagtgtcccccatttgcacgatgctcagggcaatgtcatcaacgttacaaagtctgcaccaccatccggatggagacaagtgctactggaaaagggaccatctgaatttgccaagcaagtcagacagttcaatggtactctactgatggacaccacctggagagacgctcatcaatctctacttgcaacaagagtcagaacccacgatttggctacaatcgctccaacaaccgcacatgcccttgcaggtgctttcgctttagaatgttggggtggtgctacattcgacgttgcaatgagattcttgcatgaggatccatgggaacgtctgagaaaattaagatctctggtgcctaatattccattccaaatgttattacgtggtgccaacggtgtggcttactcttcattacctgacaatgctattgaccattttgtcaagcaagccaaggataatggtgttgatatatttagagtttttgatgccttgaatgatttagaacaattaaaagttggtgtgaatgctgtcaagaaggccggtggtgttgtcgaagctactgtttgttactctggtgacatgcttcagccaggtaagaaatacaacttagactactacctagaagttgttgaaaaaatagttcaaatgggtacacatatcttgggtattaaggatatggcaggtactatgaaaccggccgctgccaaattattaattggctccctaagaaccagatatccggatttaccaattcatgttcacagtcatgactccgcaggtactgctgttgcgtctatgactgcatgtgccctagcaggtgctgatgttgtcgatgtagctatcaattcaatgtcgggcttaacttcccaaccatcaattaatgcactgttggcttcattagaaggtaacattgatactgggattaacgttgagcatgttcgtgaattagatgcatactgggccgaaatgagactgttgtattcttgtttcgaggccgacttgaagggaccagatccagaagtttaccaacatgaaatcccaggtggtcaattgactaacttgttattccaagctcaacaactgggtcttggtgaacaatgggctgaaactaaaagagcttacagagaagccaattacctactgggagatattgttaaagttaccccaacttctaaggttgtcggtgatttagctcaattcatggtttctaacaaactgacttccgacgatattagacgtttagctaattctttggactttcctgactctgttatggacttttttgaaggtttaattggtcaaccatacggtgggttcccagaaccattaagatctgatgtattgagaaacaagagaagaaagttgacgtgccgtccaggtttagaattagaaccatttgatctcgaaaaaattagagaagacttgcagaacagattcggtgatattgatgaatgcgatgttgcttcttacaatatgtatccaagggtctatgaagatttccaaaagatcagagaaacatacggtgatttatcagttctaccaaccaaaaatttcctagcaccagcagaacctgatgaagaaatcgaagtcaccatcgaacaaggtaagactttgattatcaaattgcaagctgttggtgacttaaataagaaaactgggcaaagagaagtgtattttgaattgaacggtgaattaagaaagatcagagttgcagacaagtcacaaaacatacaatctgttgctaaaccaaaggctgatgtccacgatactcaccaaatcggtgcaccaatggctggtgttatcatagaagttaaagtacataaagggtctttggtgaaaaagggcgaatcgattgctgttttgagtgccatgaaaatggaaatggttgtctcttcaccagcagatggtcaagttaaagacgttttcattaaggatggtgaaagtgttgacgcatcagatttgttggttgtcctagaagaagaaaccctacccccatcccaaaaaaagtaa

SEQ ID NO: 834 - DNA, 3543 bp, Artificial Sequence
  Description of Artificial Sequence: Synthetic polynucleotide
atgagcagtagcaagaaattggccggtcttagggacaatttcagtttgctcggcgaaaagaataagatcttggtcgccaatagaggtgaaattccgattagaatttttagatctgctcatgagctttctatgagaaccatcgccatatactcccatgaggaccgtctttctatgcacaggttgaaggcggacgaagcgtatgttatcggggaggagggccagtatacacctgtgggtgcttacttggcaatggacgagatcatcgaaattgcaaagaagcataaggtggatttcatccatccaggttatgggttcttgtctgaaaattctgaatttgccgacaaagtagtgaaggccggtatcacttggatcggccctccagctgaagttattgactctgtgggtgacaaagtctctgccagacacttggcagcaagagctaacgttcctaccgttcccggtactccaggacctatcgaaactgtgcaagaggcacttgacttcgttaatgaatacggctacccggtgatcattaaggccgcctttggtggtggtggtagaggtatgagagtcgttagagaaggtgacgacgtggcagatgcctttcaacgtgctacctccgaagcccgtactgccttcggtaatggtacctgctttgtggaaagattcttggacaagccaaagcatattgaagttcaattgttggctgataaccacggaaacgtggttcatcttttcgaaagagactgttctgtgcaaagaagacaccaaaaagttgtcgaagtcgctccagcaaagactttgccccgtgaagttcgtgacgctattttgacagatgctgttaaattagctaaggtatgtggttacagaaacgcaggtaccgccgaattcttggttgacaaccaaaacagacactatttcattgaaattaatccaagaattcaagtggagcataccatcactgaagaaatcaccggtattgacattgtttctgcccaaatccagattgccgcaggtgccactttgactcaattgggtttattacaggataaaatcaccacccgtgggttttccatccaatgtcgtattaccactgaagatccctctaagaatttccaaccggataccggtcgcttggaggtctatcgttctgccggtggtaatggtgtgagattggacggtggtaacgcttatgcaggtgctactatctctcctcactacgactccatgcttgtcaaatgtagttgctctggttctacttatgaaatcgtccgtaggaagatgattcgtgccttgatcgaattcagaatcagaggtgttaagaccaacattcccttcttgttgactcttttgaccaatccagtttttattgagggtacatactggacgacttttattgacgacaccccacaattattccaaatggtatcttctcaaaacagagcgcaaaaattattacactatttggcagacttggcagttaacggttcttctattaagggtcaaattggcttgccaaaattgaaatctaatccaagtgtcccccatttgcacgatgctcagggcaatgtcatcaacgttacaaagtctgcaccaccatccggatggagacaagtgttgttggaaaagggaccatctgaatttgccaagcaagtcagacagttcaatggtactttattgatggacaccacctggagagacgctcatcaatctttacttgcaacaagagtcagaacccacgatttggctacaatcgctccaacaaccgcacatgcccttgcaggtgctttcgctttagaatgttggggtggtgctacattcgacgttgcaatgagattcttgcatgaggatccatgggaacgtttaagaaaattaagatctttggtgcctaatattccattccaaatgttattacgtggtgccaacggtgtggcttactcttctttacctgacaatgctattgaccattttgtcaagcaagccaaggataatggtgttgatatatttagagtttttgatgccttgaatgatttagaacaattaaaagttggtgtgaatgctgtcaagaaggccggtggtgttgtcgaagctactgtttgttactctggtgacatgcttcagccaggtaagaaatacaacttagactactacttggaagttgttgaaaaaatagttcaaatgggtacacatatcttgggtattaaggatatggcaggtactatgaaaccggccgctgccaaattattaattggctccttgagaaccagatatccggatttaccaattcatgttcacagtcatgactccgcaggtactgctgttgcgtctatgactgcatgtgccttggcaggtgctgatgttgtcgatgtagctatcaattctatgagtggcttaacttcccaaccatctattaatgcattattggcttctttagaaggtaacattgatactgggattaacgttgagcatgttcgtgaattagatgcatactgggccgaaatgagattattgtattcttgtttcgaggccgacttgaagggaccagatccagaagtttaccaacatgaaatcccaggtggtcaattgactaacttgttattccaagctcaacaattgggtcttggtgaacaatgggctgaaactaaaagagcttacagagaagccaattacttgttgggagatattgttaaagttaccccaacttctaaggttgtcggtgatttagctcaattcatggtttctaacaaattaacttccgacgatattagacgtttagctaattctttggactttcctgactctgttatggacttttttgaaggtttaattggtcaaccatacggtgggttcccagaaccattaagatctgatgtattgagaaacaagagaagaaagttgacgtgccgtccaggtttagaattagaaccatttgatctcgaaaaaattagagaagacttgcagaacagattcggtgatattgatgaatgcgatgttgcttcttacaatatgtatccaagggtctatgaagatttccaaaagatcagagaaacatacggtgatttaagtgttttgccaaccaaaaatttcttggcaccagcagaacctgatgaagaaatcgaagtcaccatcgaacaaggtaagactttgattatcaaattgcaagctgttggtgacttaaataagaaaactgggcaaagagaagtgtattttgaattgaacggtgaattaagaaagatcagagttgcagacaagtctcaaaacatacaatctgttgctaaaccaaaggctgatgtccacgatactcaccaaatcggtgcaccaatggctggtgttatcatagaagttaaagtacataaagggtctttggtgaaaaagggcgaaagtattgctgttttgagtgccatgaaaatggaaatggttgtctcttctccagcagatggtcaagttaaagacgttttcattaaggatggtgaaagtgttgacgcatctgatttgttggttgtcttggaagaagaaaccttgcccccatcccaaaaaaagtga

SEQ ID NO: 835 - DNA, 384 bp, Saccharomyces cerevisiae
atgacattgttaaataccctcagcaacttcggtgggacatggccgcggttaatcattatgtccatgatcaactacttcaccgtgtatcagtgcactattcctggcacaaataaagtatacgtaactcacggcggcagcatgcaagcgtgcaccgagcttttgaatggcaccgtgaccatcctgcgtgacggctattacatcaccaatctcatatgtattgtagtcggacttttcctatattttggatatttgaaaaggaaaatcctccatttacaaagtctgccaatcagttcctggagattttttcattttttttttacaattttggcagttacgtctcgagctatttattataagagtcagaattggcgcagggagtgttaa

SEQ ID NO: 836 - DNA, 384 bp, Artificial Sequence
  Description of Artificial Sequence: Synthetic polynucleotide
atgacattgttaaataccctcagcaacttcggtgggacatggccgagattaatcattatgtccatgatcaactacttcaccgtgtatcagtgcactattcctggcacaaataaagtatacgtaactcacggcggcagcatgcaagcgtgcaccgagcttttgaatggcaccgtgaccatcttacgtgacggctattacatcaccaatctcatatgtattgtagtcggacttttcctctattttggatatttgaaaaggaaaatcctccatttacaaagtttaccaatcagttcctggagattttttcattttttttttacaattttggcagttacgtctagagctatttattataagagtcagaattggcgcagggagtgttga

SEQ ID NO: 837 - DNA, 1683 bp, Saccharomyces cerevisiae
atggaacctaagcgaaagagcgggtcactagccaagcatgatttgccgcaattttatcttttaattatgttatatttggctcaaggcatacctgtaggattggccttcggtaccgtaccgtttctactgaaatctttagcaaaggagacctcgtttacatcactgggaattttctctatggctacatatccatattctttaaagatcatatggtcaccaatagtagactcactgtacaacaagcgcatcggtagaagaagatcatggatcattccagtacaatttgttagtggatttgtgctatgggcattagggtggtgcatatcacaaggcataatcttcgatggtgtcgacgatgcgttccataatcgcggtaatggcactttacacagtgtcagtataaaaaatttgacgtggtggtttggcctgttagtttttctgtgtgccactcaagacatcgcagttgatggttgggcgttgacgattttgtccaaagaatccctatcatatgcatctaccgcgcaaacaataggtttgaatattggttattttatgtcatttaccattttcctgtcgttgaattcctctgatttcgccaataagtatttcagaaacatcccactggatcacgggttcattagtcttggtgggtacatgaaattctcgggcatgctttacattgtaataaccatatatatcatcttttgcaccaaggaaaaaccctacgtagagtatttgcccaaagtggagcccataaatacaagtgacggagggtcaaagccgataagtattgagtatgacgacggtgatgtggtgtcaactcagaatacaagcagtataaagtacatttaccgctgctttataaaagtgttgaaattgaagtccgtaagaagcctagccttcattcacatgatttcgaaatttgcctttcaatgcaacgaagccgccacaaacctgaaactactagagcaaggcttcaaaagagaagacttggctgtgacagtactcatagacctgccgttcgaaatcatatttgggtactatgttgttaaatggagctccgacaaggaccccatgattcgtgacaatagaagattaagaaacagcacgggcaccaacaaggtcatcaagttcttagttggggatgccggcgttttaacaccatggttgtggggctttttgggccgtctggcagccgcggtcttgggaagttacgtggtgaagcaattccccaaggatggtgaaatatccacgggttatttttgtctcgtgatattccagcacctcttaggttccttcatgaatactgtccagttcattggaatatcggccttccatacaagagttgcagaccccgtgctgggtggcacatatatgacattgttaaataccctcagcaacttcggtgggacatggccgcggttaatcattatgtccatgatcaactacttcaccgtgtatcagtgcactattcctggcacaaataaagtatacgtaactcacggcggcagcatgcaagcgtgcaccgagcttttgaatggcaccgtgaccatcctgcgtgacggctattacatcaccaatctcatatgtattgtagtcggacttttcctatattttggatatttgaaaaggaaaatcctccatttacaaagtctgccaatcagttcctggagatgtacgtaa

SEQ ID NO: 838 - DNA, 1683 bp, Artificial Sequence
  Description of Artificial Sequence: Synthetic polynucleotide
atggaacctaagagaaagagcgggtctttggccaagcatgatttgccgcaattttatcttttaattatgttatatttggctcaaggcatacctgtaggattggccttcggtaccgtaccgtttttattgaaatctttagcaaaggagacctcttttacatctttgggaattttctctatggctacatatccatattctttaaagatcatatggtctccaatagtagactctttgtacaacaagcgcatcggtagaagaagaagttggatcattccagtacaatttgttagtggatttgtgttgtgggcattagggtggtgcatatctcaaggcataatcttcgatggtgtcgacgatgcgttccataatcgcggtaatggcactttacacagtgtcagtataaaaaatttgacgtggtggtttggcttattagtttttttatgtgccactcaagacatcgcagttgatggttgggcgttgacgattttgtccaaagaatccttatcttatgcatctaccgcgcaaacaataggtttgaatattggttattttatgagttttaccattttcttgtctttgaattcctctgatttcgccaataagtatttcagaaacatcccattagatcacgggttcattagtcttggtgggtacatgaaattcagtggcatgctttacattgtaataaccatatatatcatcttttgcaccaaggaaaaaccctacgtagagtatttgcccaaagtggagcccataaatacaagtgacggagggtccaagccgataagtattgagtatgacgacggtgatgtggtgtccactcagaatacaagcagtataaagtacatttaccgctgctttataaaagtgttgaaattgaagtccgtaagaagcttagccttcattcacatgatttccaaatttgcctttcaatgcaacgaagccgccacaaacttgaaattattggagcaaggcttcaaaagagaagacttggctgtgacagtactcatagacttgccgttcgaaatcatatttgggtactatgttgttaaatggagctccgacaaggaccccatgattcgtgacaatagaagattaagaaacagcacgggcaccaacaaggtcatcaagttcttagttggggatgccggcgttttaacaccatggttgtggggctttttgggccgtttagcagccgcggtcttgggaagttacgtggtgaagcaattccccaaggatggtgaaatatccacgggttatttttgtctcgtgatattccagcacctcttaggttccttcatgaatactgtccagttcattggaatatctgccttccatacaagagttgcagaccccgtgttgggtggcacatatatgacattgttaaataccctcagcaacttcggtgggacatggccgagattaatcattatgtccatgatcaactacttcaccgtgtatcagtgcactattcctggcacaaataaagtatacgtaactcacggcggcagcatgcaagcgtgcaccgagcttttgaatggcaccgtgaccatcttacgtgacggctattacatcaccaatctcatatgtattgtagtcggacttttcctctattttggatatttgaaaaggaaaatcctccatttacaaagtttaccaatcagttcctggagatgtacgtga

SEQ ID NO: 839 - DNA, 1101 bp, Saccharomyces cerevisiae
atgttttccagactgccaacatcattggccagaaatgttgcacgtcgtgccccaacttcttttgtaagaccctctgcagcagcagcagcattgagattctcatcaacaaagacgatgaccgtcagagaggccttgaatagtgccatggcggaagaattggaccgtgatgatgatgtcttccttattggtgaagaagttgcacaatataacggggcttataaggtgtcaaagggtttattggacaggttcggtgaacgtcgtgtggttgacacacctattaccgaatacgggttcacaggtttggccgttggtgccgctttgaagggtttgaagccaattgtagagtttatgtcgttcaatttctctatgcaagctatcgatcatgttgtcaattccgctgcaaagactcactacatgtctggtggtactcaaaaatgtcaaatggtcttcagaggtcctaatggtgctgcagtgggtgttggtgctcaacattcacaggacttttctccttggtacggttccattccagggttaaaggtccttgtcccttattctgctgaagatgctaggggtttgttaaaggccgccatcagagatccaaaccctgttgtatttttagagaacgaattgttgtacggtgaatcttttgaaatctcagaagaagctttatcccctgagttcaccttgccatacaaggctaagatcgaaagagaaggtaccgatatttccattgttacgtacacaagaaacgttcagttttctttggaagccgctgaaattctacaaaagaaatatggtgtctctgcagaagttatcaacttgcgttctattagacctttagatactgaagctatcatcaaaactgtcaagaagacaaaccacttgattactgttgaatccactttcccatcatttggtgttggtgctgaaattgtcgcccaagttatggagtctgaagcctttgattacttggatgctccaatccaaagagttactggtgccgatgttccaacaccttacgctaaagaattagaagatttcgctttccctgatactccaaccatcgttaaagctgtcaaagaagtcttgtcaattgaataa

SEQ ID NO: 840 - DNA, 1101 bp, Artificial Sequence
  Description of Artificial Sequence: Synthetic polynucleotide
atgttttccagattaccaacatctttggccagaaatgttgcacgtcgtgccccaacttcttttgtaagaccctctgcagcagcagcagcattgagattctcttctacaaagacgatgaccgtcagagaggccttgaatagtgccatggcggaagaattggaccgtgatgatgatgtcttccttattggtgaagaagttgcacaatataacggggcttataaggtgagcaagggtttattggacaggttcggtgaacgtcgtgtggttgacacacctattaccgaatacgggttcacaggtttggccgttggtgccgctttgaagggtttgaagccaattgtagagtttatgagtttcaatttctctatgcaagctatcgatcatgttgtcaattccgctgcaaagactcactacatgtctggtggtactcaaaaatgtcaaatggtcttcagaggtcctaatggtgctgcagtgggtgttggtgctcaacattctcaggacttttctccttggtacggttccattccagggttaaaggtccttgtcccttattctgctgaagatgctaggggtttgttaaaggccgccatcagagatccaaaccctgttgtatttttagagaacgaattgttgtacggtgaatcttttgaaatcagtgaagaagctttatcccctgagttcaccttgccatacaaggctaagatcgaaagagaaggtaccgatatttccattgttacgtacacaagaaacgttcagttttctttggaagccgctgaaattttacaaaagaaatatggtgtctctgcagaagttatcaacttgcgttctattagacctttagatactgaagctatcatcaaaactgtcaagaagacaaaccacttgattactgttgaatccactttcccatcttttggtgttggtgctgaaattgtcgcccaagttatggagtctgaagcctttgattacttggatgctccaatccaaagagttactggtgccgatgttccaacaccttacgctaaagaattagaagatttcgctttccctgatactccaaccatcgttaaagctgtcaaagaagtcttgtctattgaatga

SEQ ID NO: 841 - DNA, 105 bp, Saccharomyces cerevisiae
atgttctcccacttcgaagtctcggaaaacagaccccggaaacagccgcgacgaaaaagaatcagcttaggcatgataaatactgtggtttcattagatagataa

SEQ ID NO: 842 - DNA, 105 bp, Artificial Sequence
  Description of Artificial Sequence: Synthetic polynucleotide
atgttctcccacttcgaagtcagtgaaaacagacccagaaaacagccgcgtcgtaaaagaatcagcttaggcatgataaatactgtggtttctttagatagatga

SEQ ID NO: 843 - DNA, 1632 bp, Saccharomyces cerevisiae
atgacaagtgccgctactgttactgcttcgttcaacgatacttttagcgtatccgataatgtcgccgttattgttcctgaaacggacactcaggtgacctacagggatctatcccacatggtgggtcacttccagaccatgttcacaaatcctaattctccattgtacggagctgttttcagacaagatacagtggcgatatccatgcgtaatgggctggaatttatcgtcgctttcctcggtgctactatggacgctaaaattggcgcgcccttgaatcccaattataaggaaaaggagttcaatttttatttgaatgacctgaaatctaaggcgatttgcgtcccaaagggtaccacaaagttacagagttctgaaattctaaaatctgcctccacgtttggatgttttatcgtagagctggccttcgatgcgaccaggtttagggtagagtatgatatatactctccagaggacaactacaaaagggttatttaccggtctttgaacaacgccaaatttgtcaacacaaatcccgttaaattccctgggtttgcccgttccagtgacgttgccctgattttgcataccagtggtaccacctccactccaaaaacggtgcctttgttacatttgaacattgtgagaagcacgttgaacattgctaacacttacaagctaacgcccttggacagatcttatgtcgtgatgcctcttttccacgtccatgggttaattggtgttttactttccacttttagaactcagggttctgttgtggttcccgatggattccatccaaagttattctgggaccaatttgttaagtacaactgtaattggttcagttgcgttcccacaataagcatgattatgctgaacatgcccaaaccaaaccctttcccacacattagattcatcagatcgtgttcttctgctttggctccagcaacgttccataagctggagaaggaattcaatgcacctgtcttggaggcctatgcgatgaccgaagcatcacatcaaatgacctcaaacaatctgcctccaggaaagagaaagcctggtactgtgggccagccacaaggagtcaccgtcgtcattctagatgacaatgacaatgtcttgcccccgggcaaagtcggcgaagtttccatcagaggcgaaaacgtcactttggggtatgctaataatccaaaagctaacaaggagaacttcaccaagagagagaactatttcagaaccggtgaccaaggttatttcgaccctgaggggtttttggtccttacaggcagaatcaaagagcttatcaacaggggtggtgaaaagatttcacccattgagctcgacggcattatgctatcgcatccaaagatcgatgaagccgttgcatttggtgttcccgacgatatgtacggccaagtagttcaagccgccattgttttgaagaagggagaaaaaatgacctacgaagaactggtgaacttcttaaagaagcacctagcctctttcaaaattccaaccaaggtgtactttgttgataagctaccaaaaaccgctacaggtaaaatccagagaagagttatcgcagaaacttttgctaagagcagcagaaataagagtaagttgtag

SEQ ID NO: 844 - DNA, 1632 bp, Artificial Sequence
  Description of Artificial Sequence: Synthetic polynucleotide
atgacaagtgccgctactgttactgcttctttcaacgatacttttagcgtatccgataatgtcgccgttattgttcctgaaacggacactcaggtgacctacagggatttatcccacatggtgggtcacttccagaccatgttcacaaatcctaattctccattgtacggagctgttttcagacaagatacagtggcgatatccatgcgtaatgggttggaatttatcgtcgctttcctcggtgctactatggacgctaaaattggcgcgcccttgaatcccaattataaggaaaaggagttcaatttttatttgaatgacttgaaatctaaggcgatttgcgtcccaaagggtaccacaaagttacagagttctgaaattttgaaatctgcctccacgtttggatgttttatcgtagagttggccttcgatgcgaccaggtttagggtagagtatgatatatactctccagaggacaactacaaaagggttatttacagatctttgaacaacgccaaatttgtcaacacaaatcccgttaaattccctgggtttgcccgttccagtgacgttgccttaattttgcataccagtggtaccacctccactccaaaaacggtgcctttgttacatttgaacattgtgagaagcacgttgaacattgctaacacttacaagttgacgcccttggacagatcttatgtcgtgatgcctcttttccacgtccatgggttaattggtgttttactttccacttttagaactcagggttctgttgtggttcccgatggattccatccaaagttattctgggaccaatttgttaagtacaactgtaattggttcagttgcgttcccacaataagcatgattatgttgaacatgcccaaaccaaaccctttcccacacattagattcatcagatcttgttcttctgctttggctccagcaacgttccataagttggagaaggaattcaatgcacctgtcttggaggcctatgcgatgaccgaagcatctcatcaaatgaccagtaacaatttacctccaggaaagagaaagcctggtactgtgggccagccacaaggagtcaccgtcgtcattttagatgacaatgacaatgtcttgcccccgggcaaagtcggcgaagtttccatcagaggcgaaaacgtcactttggggtatgctaataatccaaaagctaacaaggagaacttcaccaagagagagaactatttcagaaccggtgaccaaggttatttcgaccctgaggggtttttggtccttacaggcagaatcaaagagcttatcaacaggggtggtgaaaagatttctcccattgagctcgacggcattatgctttctcatccaaagatcgatgaagccgttgcatttggtgttcccgacgatatgtacggccaagtagttcaagccgccattgttttgaagaagggagaaaaaatgacctacgaagaattagtgaacttcttaaagaagcacttggcctctttcaaaattccaaccaaggtgtactttgttgataagttaccaaaaaccgctacaggtaaaatccagagaagagttatcgcagaaacttttgctaagagcagcagaaataagagtaagttgtga

SEQ ID NO: 845 - DNA, 1635 bp, Saccharomyces cerevisiae
atgtcacgagaaacaaatttcaatggaactaagaggaagaggtcggatgttgccgagaaagtagcacaacggtggaagagcgtcaggtatagtgctgaaatggagaatatggctccggtcaacagtaacaatgatagcgacgactgcgtcatagtcagtgaatcgaaaatcattgatttgactaatcaggaacaagatttgagtgagagaatagaaacaaacgatacggcaaaaggtgccgtttttaaactaatgaaatcggacttctatgaaagagaggattttatgggagaagtagaggatatgattacattgaaagatatctttggcactgagacactaaaaagaagcatactcttcagtttccaatacgaacttgatttcttgttgagacaattccaccagaacgtagagaacataaccatcgtcggccaaaagggtactattatgcctatcgaagcccgtgctatggacgcgacactggcagtaatattaaaaaaggtcaaacttattgaaataacgatgcccccattcgcttcccaccatacgaagctgatcataaacttttacgataatggcgaatgcaaaatattcttgccatctaacaattttacgtcaatggagactaacctgcctcaacaggtgtgttggtgcagtccccttttgaaaataggtaaagaagggctaccagtaccgtttaagagaagcttgatagaatacctcaattcgtaccacctgaaagacattgacgaattgattacaaaaagcgtagaggaagttaactttgctcctttgagcgaattagaatttgtatattctacgccctccaaatttcagtcgtcgggtttactgtcgttttacaataaactagaaaaactttctgctggcacaagtgctagtgatactgcaaaacattatctatgtcaaacttcatccatagggacatctctatcaagagcgcgagacgaaaacttatggacacatctaatgattcctctgtttaccggaatcatgtcccctccagcaaaggacaccgctgggaggaagaaagcagaaatactgccaacgaattcattgattaatgaatattcgcagagaaaaatcaagccgtacattattttccccaccgaacaagagtttgtcaccagtcccttaaagtggtccagttccgggtggtttcattttcaatatcttcagaaaaagagctactacgaaatgctgcgaaacaagttcaaagtattttacaagcaagaccctgctatggttactagaagacgagggacgacgcccgcgcactctaagttttacatgcattgtgcaacaaactccgcagggccctgtgatgcatcgcaggtatttaaagaactagaatggtgcctttatacttcggcaaacctcagccaaacagcatggggcaccgtttcaagaaaaccacgcaattatgaagcaggagtgctttaccatagtcgcaggttagcaaataccaggaaggtcacgtgccgtacttttacacgtgaccgtagaggctgcgcgggtaatcccacccatgtggccgtgccattcacgctgccagtcataccatacgacttagctgaggacgagtgcttttgccttgctcgtcatgagaacgactaa

SEQ ID NO: 846 - DNA, 1635 bp, Artificial Sequence
  Description of Artificial Sequence: Synthetic polynucleotide
atgtctagagaaacaaatttcaatggaactaagaggaagaggtctgatgttgccgagaaagtagcacaaagatggaagagcgtcaggtatagtgctgaaatggagaatatggctccggtcaacagtaacaatgatagcgacgactgcgtcatagtcagtgaaagtaaaatcattgatttgactaatcaggaacaagatttgagtgagagaatagaaacaaacgatacggcaaaaggtgccgtttttaaattaatgaaaagtgacttctatgaaagagaggattttatgggagaagtagaggatatgattacattgaaagatatctttggcactgagacattaaaaagaagcatactcttcagtttccaatacgaacttgatttcttgttgagacaattccaccagaacgtagagaacataaccatcgtcggccaaaagggtactattatgcctatcgaagcccgtgctatggacgcgacattagcagtaatattaaaaaaggtcaaacttattgaaataacgatgcccccattcgcttcccaccatacgaagttaatcataaacttttacgataatggcgaatgcaaaatattcttgccatctaacaattttacgtctatggagactaacttgcctcaacaggtgtgttggtgcagtccccttttgaaaataggtaaagaagggttaccagtaccgtttaagagaagcttgatagaatacctcaattcttaccacttgaaagacattgacgaattgattacaaaaagcgtagaggaagttaactttgctcctttgagcgaattagaatttgtatattctacgccctccaaatttcagtcttctggtttattatctttttacaataaattagaaaaactttctgctggcacaagtgctagtgatactgcaaaacattatttatgtcaaacttcttccatagggacatctttatctagagcgcgcgacgaaaacttatggacacatttaatgattcctttatttaccggaatcatgtcccctccagcaaaggacaccgctgggaggaagaaagcagaaatattgccaacgaattctttgattaatgaatattctcagagaaaaatcaagccgtacattattttccccaccgaacaagagtttgtcaccagtcccttaaagtggtccagttccgggtggtttcattttcaatatcttcagaaaaagagctactacgaaatgttaagaaacaagttcaaagtattttacaagcaagaccctgctatggttactagaagaagagggacgacgcccgcgcactctaagttttacatgcattgtgcaacaaactccgcagggccctgtgatgcatcccaggtatttaaagaattggaatggtgcctttatacttctgcaaacctcagccaaacagcatggggcaccgtttctagaaaaccacgcaattatgaagcaggagtgctttaccatagtcgcaggttagcaaataccaggaaggtcacgtgccgtacttttacacgtgaccgtagaggctgcgcgggtaatcccacccatgtggccgtgccattcacgttaccagtcataccatacgacttagctgaggacgagtgcttttgccttgctcgtcatgagaacgactga

SEQ ID NO: 847 - DNA, 2703 bp, Saccharomyces cerevisiae
atgggctccaataaggaagcaaaaaacattgatagtaagaatgatagggggttaaccagtataaccagtaacaaaatttccaacttaaaagcacatgataaccatacaagttcaatgattactgaacataaaaatgctgacaaagaaaaggggaaacaagaaaaagagagtagaaatggaaccacgcaatcaagtagttcagtagaatcacactcaccacaagtaagccatcattcagataagctctcgtcctttgattcgcccttacatttgccaaactttagactggcggatgacttgttctcaaactcgtcaagacgatcatctgactccgctgcctcatcctcagtatccaaactgaagtccgctcagctttccaaaataggtctacatcatcatcatacaagtaataataaacatagtcatagaagcggaactccgacttccgaagtgaaagctaattactcaccagacccttctgcaccgcgattcattgtatccaatatggtcggcaatggccggggaggtggtggtctacacggtgcaacttcgaacgttgtcaagaaactccattctagaaaaaaatgggactggaacactttaccggcatcagattcttctcttctaatcaaaaccgtttcaggaaatcataatttaatcaacatttgcatagacggtgaattcaaacaaataatgtacgacccgaatcataatgagctctttaatagaatggacttgtttctatcttttaacatggactcctcgccagaagactctttaatatttgccaagaaaagattacggtcgtacattgatttcctaacaaaatatttggaatctaggaaatatgcatttgaatgttatccatttaacattgaaaacatcataaatatagagactgaggttaaatgctttccatcgtttgacccgttaaaagattattctgaaattgaatccttgattcaattatggttggctcaatctcaaaaatttttactgcaatcaaattcattcttcttttcatctgaagtagtggaggaactaataaaaagaaaaccaaccacaagacaacattctaatccaacaatcagcaccaccagcaacaagatcagtgaccctacattatatattcagcagttagatatagaagcaaactctccaaggccagtaatatcggatccattagacgaaattgacatcttattaataagaccgctgcataaaaccctgggcggttggcagctggcgtatgatgaaccaagcttgaacatcgcagatttcgcattagatttatctccctggatgattgacagcagtgacaatgacgctcagaataagaatgctagtgaaattgctcctgagtatttaacaaacttacaaaattatttgccacgaaagggttcaagagcgaaaatagtttctgacgaacaagaagttatcgaattgaattcttccaatgcttcagagtatatgtatgattgcatgaatagaaagttctttacagatgatgcaaaagaacgtatttctagaaacaacttcaatcagggagttgaggaagaccctctaaacgaccaattcgcttcaagtagatctttatcattgccgtcctcgggagcagatgctgtcaaaaggaagaagagccctaccaaggctactaaaaaatctggtttcgtcaactttttcaagagaaagcattctcaacttgcatcaacttcacatactacaagcccttcagtttcacctagcatatcttcttcttcttctccaaaaattcaaccacagtcacatatctctagtccccctcggacagagaaagctccccatgtcaaatcagccaaccaagcacatcaaaatgaatggttggagaattttttttgccggactttgaacaactacaaagaaatcgatttaccgacccaatttattttgccaaaggaagtgaagaggtcctctaatgcacaacttcagcctgaagatgaaccacctttgtcatcaccaatatcctctaattcggataactcctttccaaatgaaggacttgacagggcaaaaagcgcagctatttatggtaaagaatatttaaaattaagactgccgtttgcatcagacactatacctgctgtaatatgcccgtgggtctggacaagtttaagttattataaatggaaagctctacttagggaaatatacagatcaataattcctggcgggtacgcgctggcaattgttccagatttaaggatttcaaacacatactatactggaattcttggcaacgccgatgccgaaaaagcaaataattcatcagaagagtttttgactacaaaagaacgggacaagacatttgatgctatggctattgatgcgataaataaaggcttacatatccatcctacaaaacacttaacgaggacattcaaggatgtagggtttacaggcatcaagtcctcggtcctaagtttgaaaactggtgacttcaaaacagatatgggctttttgaatgaatttaattctttagatatgtgggactacatgttaaggaggcaactaccagatagtagttgtcctccaaaggataccgaccccaccactcttttcaaaagatatgtggaagaacacataggaaaaatcgatgacaacgctggctgctttagaactttgtatgtggtggcgcaaaagccaaagctgccatataccaaataa

SEQ ID NO: 848 - DNA, 2703 bp, Artificial Sequence
  Description of Artificial Sequence: Synthetic polynucleotide
atgggctccaataaggaagcaaaaaacattgatagtaagaatgatagggggttaaccagtataaccagtaacaaaatttccaacttaaaagcacatgataaccatacaagttctatgattactgaacataaaaatgctgacaaagaaaaggggaaacaagaaaaagagagtagaaatggaaccacgcaaagtagtagttctgtagaatctcactctccacaagtaagccatcattctgataagctctcttcctttgattctcccttacatttgccaaactttagattagcggatgacttgttcagtaactcttctagaagatcttctgactccgctgcctcttcctctgtatccaaattgaagtccgctcagctttccaaaataggtttgcatcatcatcatacaagtaataataaacatagtcatagaagcggaactccgacttccgaagtgaaagctaattactctccagacccttctgcaccgcgcttcattgtatccaatatggtcggcaatggcagaggaggtggtggtttacacggtgcaacttctaacgttgtcaagaaactccattctagaaaaaaatgggactggaacactttaccggcatctgattcttctcttttgatcaaaaccgtttctggaaatcataatttaatcaacatttgcatagacggtgaattcaaacaaataatgtacgacccgaatcataatgagctctttaatagaatggacttgtttttatcttttaacatggactcctctccagaagactctttaatatttgccaagaaaagattaagatcttacattgatttcttaacaaaatatttggaatctaggaaatatgcatttgaatgttatccatttaacattgaaaacatcataaatatagagactgaggttaaatgctttccatcttttgacccgttaaaagattattctgaaattgaatccttgattcaattatggttggctcaatctcaaaaatttttattacaaagcaattctttcttcttttcttctgaagtagtggaggaattgataaaaagaaaaccaaccacaagacaacattctaatccaacaatcagcaccaccagcaacaagatcagtgaccctacattatatattcagcagttagatatagaagcaaactctccaaggccagtaatatctgatccattagacgaaattgacatcttattaataagaccgcttcataaaaccttaggcggttggcagcttgcgtatgatgaaccaagcttgaacatcgcagatttcgcattagatttatctccctggatgattgacagcagtgacaatgacgctcagaataagaatgctagtgaaattgctcctgagtatttaacaaacttacaaaattatttgccaagaaagggttccagagcgaaaatagtttctgacgaacaagaagttatcgaattgaattcttccaatgcttctgagtatatgtatgattgcatgaatagaaagttctttacagatgatgcaaaagaacgtatttctagaaacaacttcaatcagggagttgaggaagaccctttgaacgaccaattcgcttccagtagatctttatctttgccgtccagtggagcagatgctgtcaaaaggaagaagagccctaccaaggctactaaaaaatctggtttcgtcaactttttcaagagaaagcattctcaacttgcatctacttctcatactacaagcccttctgtttctcctagcatatcttcttcttcttctccaaaaattcaaccacagtctcatatctctagtccccctagaacagagaaagctccccatgtcaaaagtgccaaccaagcacatcaaaatgaatggttggagaattttttttgcagaactttgaacaactacaaagaaatcgatttaccgacccaatttattttgccaaaggaagtgaagaggtcctctaatgcacaacttcagcctgaagatgaaccacctttgagttctccaatatcctctaattctgataactcctttccaaatgaaggacttgacagggcaaaaagcgcagctatttatggtaaagaatatttaaaattaagattaccgtttgcaagtgacactatacctgctgtaatatgcccgtgggtctggacaagtttaagttattataaatggaaagctttacttagggaaatatacagaagtataattcctggcgggtacgcgttggcaattgttccagatttaaggatttccaacacatactatactggaattcttggcaacgccgatgccgaaaaagcaaataattcttctgaagagtttttgactacaaaagaaagagacaagacatttgatgctatggctattgatgcgataaataaaggcttacatatccatcctacaaaacacttaacgaggacattcaaggatgtagggtttacaggcatcaagtcctctgtcttaagtttgaaaactggtgacttcaaaacagatatgggctttttgaatgaatttaattctttagatatgtgggactacatgttaaggaggcaattaccagatagtagttgtcctccaaaggataccgaccccaccactcttttcaaaagatatgtggaagaacacataggaaaaatcgatgacaacgctggctgctttagaactttgtatgtggtggcgcaaaagccaaagttaccatataccaaatga

SEQ ID NO: 849 - DNA, 1563 bp, Saccharomyces cerevisiae
atgttgaaatctgcaagccaaaacttttttagagcttattctagtagaattggtcgatatgctgctacagcatcagggaaactggcacagtctcgtttatcgaatatacccactccaaaagcattgaagaaattcctcgatgagtacattgttggtcaagagattggtaagaaggttttaagcgtggcagtttataatcactatttaagaatcaatgacaagcaaaagaaaggggaattacaaaggcagagagaattgatggaacgagagaaaatcgcggatgatagggatgaaccaattttcagtggaaacagcgaatcaaaggctggttggaggaatcttcaaagacagtttaatttagcaggtagagaggttgacgaagatttagagttaagcaaaagtaatgtccttgtcgttggtccctcaggttctggtaagactttgttggcaacaacattggcgaaaatattaaacgttccaattgcaattacagattgtacacaattgactcaagcaggttacataggtgaagatgttgaagtatgcattgaaagattgctcgtaaatgctgaatttgatgttgcgagagcagaaaaaggtattattgttcttgatgagattgataaactagccaagcctgccgcaagcattggcactaaagacgtgtccggagaaggggttcaacagtcattattgaaaatcattgagggccataaagtggaaattaccgttaaaaggcctgttaagcatgatattgacggacaaaaaaatcaaactacaacaaagaaggacgaagtatttgttgtagacacttcaaatattcttttcatgattatgggagcttttgttggtttagataagcatattgttaaaaggatagaagatatgaagaaaatacagaaggcaggagagtctgttgaatcatcgaatagtaaagaagttgaaaaagaaagagcgaagaagttcagatttagcaatacgcttgagcaggttgaattagataacggaaaaaaagtgtgtgctttagacttgaccacccccacagatttagttagctttggtctaattcctgaattaattggcagagtcccaattataactgctctgcagcctctacaaagagacgatttatttcatatattaaaagaacctaaaaatgccttattggatcaatatgaatatatttttaagcaatttggggtaagattgtgtgttacacaaaaggcgctaaagaaagttgctcaatttgctctcaaggaaggaactggcgccagagggttgagagggataatggaaagacttctgctaaacgttaattatgattgcccgggttctaacatagcatacgttttaatcgacgaagctactgtcgactcgttacaggaaacagagcactctttggcttcccaagtggacgtaaaatactattctggtgatgaaaaggacagtttaattcgtgacgtttctgaagaagataaaaaattaggagttatgctagaaaaagagttgggtcattctgctaacattcataccccaacaattcccaagagaagcttaacataa

SEQ ID NO: 850 - DNA, 1563 bp, Artificial Sequence
  Description of Artificial Sequence: Synthetic polynucleotide
atgttgaaatctgcaagccaaaacttttttagagcttattctagtagaattggtagatatgctgctacagcatctgggaaattggcacagtctcgtttatccaatatacccactccaaaagcattgaagaaattcctcgatgagtacattgttggtcaagagattggtaagaaggttttaagcgtggcagtttataatcactatttaagaatcaatgacaagcaaaagaaaggggaattacaaaggcagagagaattgatggaaagagagaaaatcgcggatgatagggatgaaccaattttcagtggaaacagcgaatccaaggctggttggaggaatcttcaaagacagtttaatttagcaggtagagaggttgacgaagatttagagttaagcaaaagtaatgtccttgtcgttggtccctctggttctggtaagactttgttggcaacaacattggcgaaaatattaaacgttccaattgcaattacagattgtacacaattgactcaagcaggttacataggtgaagatgttgaagtatgcattgaaagattgctcgtaaatgctgaatttgatgttgcgagagcagaaaaaggtattattgttcttgatgagattgataaattggccaagcctgccgcaagcattggcactaaagacgtgtccggagaaggggttcaacagtctttattgaaaatcattgagggccataaagtggaaattaccgttaaaaggcctgttaagcatgatattgacggacaaaaaaatcaaactacaacaaagaaggacgaagtatttgttgtagacacttccaatattcttttcatgattatgggagcttttgttggtttagataagcatattgttaaaaggatagaagatatgaagaaaatacagaaggcaggagagtctgttgaaagtagtaatagtaaagaagttgaaaaagaaagagcgaagaagttcagatttagcaatacgcttgagcaggttgaattagataacggaaaaaaagtgtgtgctttagacttgaccacccccacagatttagttagctttggtttgattcctgaattaattggcagagtcccaattataactgctttacagcctttacaaagagacgatttatttcatatattaaaagaacctaaaaatgccttattggatcaatatgaatatatttttaagcaatttggggtaagattgtgtgttacacaaaaggcgttaaagaaagttgctcaatttgctctcaaggaaggaactggcgccagagggttgagagggataatggaaagacttttattaaacgttaattatgattgcccgggttctaacatagcatacgttttaatcgacgaagctactgtcgactctttacaggaaacagagcactctttggcttcccaagtggacgtaaaatactattctggtgatgaaaaggacagtttaattcgtgacgtttctgaagaagataaaaaattaggagttatgttggaaaaagagttgggtcattctgctaacattcataccccaacaattcccaagagaagcttaacatga

SEQ ID NO: 851 - DNA, 915 bp, Saccharomyces cerevisiae
atgtcgcagaaaatacagcagcatcagtttcctgatttttattgttgttatctactacaatcgattaacaagaggcaatcattttacgttggatcaactcctaacccagtacgacgtttgaggcagcataatgggaaattggctgttggaggggcatatcgaaccaaacgtgacggttcaaggccctgggaaatgataatgattgtgcggggcttcccaagtaagatagcagctttacagtttgaacatgcatggcaacatgggtaccaaacgcattatattgccgaaaaagatcgtgttgtaaagcataaagcaggtggaagaactttacatcacaaagttgcattaatgaagttacttttaaagcatgaattttttcaaaggatgaacttgatagtcgaggtttttaatataaaggcttgggaggtttggaaacaggacaaattttttattgaaagagacagatttccgattaatatacaaataaatgaaaatgcgcttgaagaaccaaaggagaaaactgtggatgttctcatggatcatagtgatgagaatttaaaagtggtggaagctgtatacactaaagtcattgaaaatgaaagaaacatattcgaaactttcgaaaagaaactaactacaggggtagtgcgatgtgaaatttgtgagaaagaaattgactacacgtctgaagagcaaaatctgaagccgtttgtagcgctttgcaataataaagactgtgggtgtgttaaccacttgaaatgtcttcacaggtactttctagatgatgaacagttgatggtagggagaagaaatttgatacctcgaggtgggaaatgtccgaaatgtgatatgttttgcgactggacgaccctagtcaagttttcgacaagaatgaagttagctcacgggaagtag

SEQ ID NO: 852 - DNA, 915 bp, Artificial Sequence
  Description of Artificial Sequence: Synthetic polynucleotide
atgtctcagaaaatacagcagcatcagtttcctgatttttattgttgttatttattacaatctattaacaagaggcaaagtttttacgttggatctactcctaacccagtaaggcgtttgaggcagcataatgggaaattggctgttggaggggcatatagaaccaaacgtgacggttctaggccctgggaaatgataatgattgtgagaggcttcccaagtaagatagcagctttacagtttgaacatgcatggcaacatgggtaccaaacgcattatattgccgaaaaagatcgtgttgtaaagcataaagcaggtggaagaactttacatcacaaagttgcattaatgaagttacttttaaagcatgaattttttcaaaggatgaacttgatagtcgaggtttttaatataaaggcttgggaggtttggaaacaggacaaattttttattgaaagagacagatttccgattaatatacaaataaatgaaaatgcgcttgaagaaccaaaggagaaaactgtggatgttctcatggatcatagtgatgagaatttaaaagtggtggaagctgtatacactaaagtcattgaaaatgaaagaaacatattcgaaactttcgaaaagaaattaactacaggggtagtgaggtgtgaaatttgtgagaaagaaattgactacacgtctgaagagcaaaatttgaagccgtttgtagcgctttgcaataataaagactgtgggtgtgttaaccacttgaaatgtcttcacaggtactttttggatgatgaacagttgatggtagggagaagaaatttgatacctcgtggtgggaaatgtccgaaatgtgatatgttttgcgactggacgaccttggtcaagttttctacaagaatgaagttagctcacgggaagtga

SEQ ID NO: 853 - DNA, 2865 bp, Saccharomyces cerevisiae
atggtccttttgaaatggctcgtatgccaattggtcttctttaccgctttttcgcatgcgtttaccgactatctattaaagaagtgtgcgcaatctgggttttgccatagaaacagggtttatgcagaaaatattgccaaatctcatcactgctattacaaagtggacgccgagtctattgcacacgatcctttagagaatgtgcttcatgctaccataattaaaactataccaagattggagggcgatgatatagccgttcagttcccattctctctctcttttttacaggatcactcagtaaggttcactataaatgagaaagagagaatgccaaccaacagcagcggtttgttgatctcttcacaacggttcaatgagacctggaagtacgcattcgacaagaaatttcaagaggaggcgaacaggaccagtattccacaattccacttccttaagcaaaaacaaactgtgaactcattctggtcgaaaatatcttcatttttgtcactttcaaactccactgcagacacatttcatcttcgaaacggtgatgtatccgtagaaatctttgctgaaccttttcaattgaaagtttactggcaaaatgcgctgaaacttattgtaaacgagcaaaatttcctgaacattgaacatcatagaactaagcaggaaaacttcgcacacgtgctgccagaagaaacaactttcaacatgtttaaggacaatttcttgtattcaaagcatgactctatgcctttggggcctgaatcggttgcgctagatttctctttcatgggttctactaatgtctacggtataccggaacatgcgacgtcgctaaggctgatggacacttcaggtggaaaggaaccctacaggcttttcaacgttgatgtctttgagtacaacatcggtaccagccaaccaatgtacggttcgatcccattcatgttttcatcttcgtccacatctatcttttgggtcaatgcagctgacacttgggtagacataaagtatgacaccagtaaaaataaaacgatgactcattggatctccgaaaatggtgtcatagatgtagtcatgtccctggggccagatattccaactatcattgacaaatttaccgatttgactggtagaccctttttaccgcccatttcctctatagggtaccatcaatgtagatggaattataatgatgagatggacgttctcacagtggactctcagatggatgctcatatgattccttacgattttatttggttggacttggagtatacgaacgacaaaaaatattttacttggaagcagcactcctttcccaatccaaaaaggctgttatccaaattaaaaaagttgggtagaaatcttgtcgtactaatcgatcctcatttaaagaaagattatgaaatcagtgacagggtaattaatgaaaatgtagcagtcaaggatcacaatggaaatgactatgtaggtcattgctggccaggtaattctatatggattgataccataagcaaatatggccaaaagatttggaagtcctttttcgaacggtttatggatctgccggctgatttaactaatttattcatttggaatgatatgaacgagccttcgattttcgatggcccagagaccacagctccaaaagatttgattcacgacaattacattgaggaaagatccgtccataacatatatggtctatcagtgcatgaagctacttacgacgcaataaaatcgatttattcaccatccgataagcgtcctttccttctaacaagggctttttttgccggctctcaacgtactgctgccacatggactggtgacaatgtggccaattgggattacttaaagatttccattcctatggttctgtcaaacaacattgctggtatgccatttataggagccgacatagctggctttgctgaggatcctacacctgaattgattgcacgttggtaccaagcgggcttatggtacccattttttagagcacacgcccatatagacaccaagagaagagaaccatacttattcaatgaacctttgaagtcgatagtacgtgatattatccaattgagatatttcctgctacctaccttatacaccatgtttcataaatcaagtgtcactggatttccgataatgaatccaatgtttattgaacaccctgaatttgctgaattgtatcatatcgataaccaattttactggagtaattcaggtctattagtcaaacctgtcacggagcctggtcaatcagaaacggaaatggttttcccacccggtatattctatgaattcgcatctttacactcttttataaacaatggtactgatttgatagaaaagaatatttctgcaccattggataaaattccattatttattgaaggcggtcacattatcactatgaaagataagtatagaagatcttcaatgttaatgaaaaacgatccatatgtaatagttatagcccctgataccgagggacgagccgttggagatctttatgttgatgatggagaaacttttggctaccaaagaggtgagtacgtagaaactcagttcattttcgaaaacaataccttaaaaaatgttcgaagtcatattcccgagaatttgacaggcattcaccacaatactttgaggaataccaatattgaaaaaatcattatcgcaaagaataatttacaacacaacataacgttgaaagacagtattaaagtcaaaaaaaatggcgaagaaagttcattgccgactagatcgtcatatgagaatgataataagatcaccattcttaacctatcgcttgacataactgaagattgggaagttattttttga

SEQ ID NO: 854 - DNA, 2865 bp, Artificial Sequence
  Description of Artificial Sequence: Synthetic polynucleotide
atggtccttttgaaatggctcgtatgccaattggtcttctttaccgctttttctcatgcgtttaccgactatcttttaaagaagtgtgcgcaatctgggttttgccatagaaacagggtttatgcagaaaatattgccaaatctcatcactgctattacaaagtggacgccgagtctattgcacacgatcctttagagaatgtgcttcatgctaccataattaaaactataccaagattggagggcgatgatatagccgttcagttcccattctctctctcttttttacaggatcactctgtaaggttcactataaatgagaaagagagaatgccaaccaacagcagcggtttgttgatctcttctcaaagattcaatgagacctggaagtacgcattcgacaagaaatttcaagaggaggcgaacaggaccagtattccacaattccacttccttaagcaaaaacaaactgtgaactctttctggtccaaaatatcttcttttttgtctctttccaactccactgcagacacatttcatcttagaaacggtgatgtatccgtagaaatctttgctgaaccttttcaattgaaagtttactggcaaaatgcgttgaaacttattgtaaacgagcaaaatttcttgaacattgaacatcatagaactaagcaggaaaacttcgcacacgtgttaccagaagaaacaactttcaacatgtttaaggacaatttcttgtattccaagcatgactctatgcctttggggcctgaatctgttgcgttggatttctctttcatgggttctactaatgtctacggtataccggaacatgcgacgtctttgaggttgatggacacttctggtggaaaggaaccctacaggcttttcaacgttgatgtctttgagtacaacatcggtaccagccaaccaatgtacggttctatcccattcatgttttcttcttcttccacatctatcttttgggtcaatgcagctgacacttgggtagacataaagtatgacaccagtaaaaataaaacgatgactcattggatctccgaaaatggtgtcatagatgtagtcatgtccttagggccagatattccaactatcattgacaaatttaccgatttgactggtagaccctttttaccgcccatttcctctatagggtaccatcaatgtagatggaattataatgatgagatggacgttctcacagtggactctcagatggatgctcatatgattccttacgattttatttggttggacttggagtatacgaacgacaaaaaatattttacttggaagcagcactcctttcccaatccaaaaaggttattatccaaattaaaaaagttgggtagaaatcttgtcgtattgatcgatcctcatttaaagaaagattatgaaatcagtgacagggtaattaatgaaaatgtagcagtcaaggatcacaatggaaatgactatgtaggtcattgctggccaggtaattctatatggattgataccataagcaaatatggccaaaagatttggaagtcctttttcgaaagatttatggatttaccggctgatttaactaatttattcatttggaatgatatgaacgagccttctattttcgatggcccagagaccacagctccaaaagatttgattcacgacaattacattgaggaaagatccgtccataacatatatggtttatctgtgcatgaagctacttacgacgcaataaaatccatttattctccatccgataagcgtcctttccttttaacaagggctttttttgccggctctcaacgtactgctgccacatggactggtgacaatgtggccaattgggattacttaaagatttccattcctatggttttatctaacaacattgctggtatgccatttataggagccgacatagctggctttgctgaggatcctacacctgaattgattgcacgttggtaccaagcgggcttatggtacccattttttagagcacacgcccatatagacaccaagagaagagaaccatacttattcaatgaacctttgaagagtatagtacgtgatattatccaattgagatatttcttattgcctaccttatacaccatgtttcataaatctagtgtcactggatttccgataatgaatccaatgtttattgaacaccctgaatttgctgaattgtatcatatcgataaccaattttactggagtaattctggtttattagtcaaacctgtcacggagcctggtcaaagtgaaacggaaatggttttcccacccggtatattctatgaattcgcatctttacactcttttataaacaatggtactgatttgatagaaaagaatatttctgcaccattggataaaattccattatttattgaaggcggtcacattatcactatgaaagataagtatagaagatcttctatgttaatgaaaaacgatccatatgtaatagttatagcccctgataccgagggaagagccgttggagatctttatgttgatgatggagaaacttttggctaccaaagaggtgagtacgtagaaactcagttcattttcgaaaacaataccttaaaaaatgttagaagtcatattcccgagaatttgacaggcattcaccacaatactttgaggaataccaatattgaaaaaatcattatcgcaaagaataatttacaacacaacataacgttgaaagacagtattaaagtcaaaaaaaatggcgaagaaagttctttgccgactagaagttcttatgagaatgataataagatcaccattcttaacttatctcttgacataactgaagattgggaagttattttttga

SEQ ID NO: 855 - DNA, 405 bp, Saccharomyces cerevisiae
atgtctgcaactgctaaacacgacagtaacgctagcccaaattctgactctgaagacggtcaccaccacaacaataagaaggaatgcgctatcgaatatctgaaggcacggttaaatagtgcatcagcagtcgcttgcggctacctccaagcttttgtcagtaagacgcaagactttgccaaagtatgctttttagaacttcagaatcccgttgtcttggtcaacttgttgctgcattcttcagtggtatgttatttatgtaacgggtatgcgaaccacaacgccagattcttgaaggggaaacctaactctacagtcttagcaacaaccgccggcgctctgggtcttttgacgctggacggtataatttcaaagaaatactactccagatacgacaagaaataa

SEQ ID NO: 856 - DNA, 405 bp, Artificial Sequence
  Description of Artificial Sequence: Synthetic polynucleotide
atgtctgcaactgctaaacacgacagtaacgctagcccaaattctgactctgaagacggtcaccaccacaacaataagaaggaatgcgctatcgaatatttgaaggcaagattaaatagtgcatctgcagtcgcttgcggctacctccaagcttttgtcagtaagacgcaagactttgccaaagtatgctttttagaacttcagaatcccgttgtcttggtcaacttgttgttgcattcttctgtggtatgttatttatgtaacgggtatgcgaaccacaacgccagattcttgaaggggaaacctaactctacagtcttagcaacaaccgccggcgctttgggtcttttgacgcttgacggtataatttccaagaaatactactccagatacgacaagaaatga

SEQ ID NO: 857 - DNA, 201 bp, Saccharomyces cerevisiae
atgagaaacgaattataccagttatggtgtgtggcgagtgcagcaagaggggtagccaagagctcattcgtaagggccaattcggccatgtgtgagtacgtgcgcacgtccaacgtcttgagtcgctggactcgggacaggcaatgggaagcagctaaggccctatcacaacgggtcaagaaagagtatgccgccaattag

SEQ ID NO: 858 - DNA, 201 bp, Artificial Sequence
  Description of Artificial Sequence: Synthetic polynucleotide
atgagaaacgaattataccagttatggtgtgtggcgagtgcagcaagaggggtagccaagagctctttcgtaagggccaattctgccatgtgtgagtacgtgcgcacgtccaacgtcttgagtcgctggactagagacaggcaatgggaagcagctaaggccttgtctcaaagagtcaagaaagagtatgccgccaattga

SEQ ID NO: 859 - DNA, 912 bp, Saccharomyces cerevisiae
atgccagaagtagagacaaagattataccaaacgaaaaggaggacgaggacgaggacggctacatagaagaggaggacgaggacttccagcctgaaaaagataaattaggtggtggtagcgacgatagtgatgccagcgatggcggtgacgactatgatgacggtgtgaacagagataagggtagaaataaagtggactattcgcgtatagagagcgagagcggcggactgatcaagactagaagagctcggcaagctgaggaagaatatgcgaaaacacataagtatgaatcgttaactgttgaatcgatccctgcaaaagtaaacagcatctgggaggagctacaggaagctagtaagaaccgtcttttgagcagttcagggaaagtcggctctgttctcgacggttccaaggaggctaggtcgacaacggccgcgcaacaggaggacaaaatcctcatcgaaagaaactacaagtttgctggtgaaactgtccatgagaaaaaatgggtttcacgcagcagtgcggagggtcaagaatatctaaacagtttgaaatttaagcagcaggcgcctgctgctcctgttcaactggaaaaagcagttaggaccaagtccaatgaaagccggcaacacttgcgacggccactgaaaaggcctccattgttggagcagatcatttctggcgggctacgacccaagctaacgacattagaaaaatctcagctggactgggctagttatgtagaccgtgctggacttaacgacgaattggtgctgcacaacaaggatgggttcttggcccggcaagaatttctgcagcgggtcgggtctgcagaggacgagagatacaaagaattgcgccggcaacaacttgctcagcagttgcagcaggatagcgaagcttcatag

SEQ ID NO: 860 - DNA, 912 bp, Artificial Sequence
  Description of Artificial Sequence: Synthetic polynucleotide
atgccagaagtagagacaaagattataccaaacgaaaaggaggacgaggacgaggacggctacatagaagaggaggacgaggacttccagcctgaaaaagataaattaggtggtggtagcgacgatagtgatgccagcgatggcggtgacgactatgatgacggtgtgaacagagataagggtagaaataaagtggactattctcgtatagagagcgagagcggcggattgatcaagactagaagagctagacaagctgaggaagaatatgcgaaaacacataagtatgaatctttaactgttgaaagtatccctgcaaaagtaaacagcatctgggaggagttacaggaagctagtaagaaccgtcttttgagcagttccgggaaagtcggctctgttctcgacggttccaaggaggctaggtctacaacggccgcgcaacaggaggacaaaatcctcatcgaaagaaactacaagtttgctggtgaaactgtccatgagaaaaaatgggtttctcgcagcagtgcggagggtcaagaatatttgaacagtttgaaatttaagcagcaggcgcctgctgctcctgttcaattggaaaaagcagttaggaccaagtccaatgaaagcagacaacacttgaggagaccattgaaaaggcctccattgttggagcagatcatttctggcgggttaagacccaagttgacgacattagaaaaatctcagttagactgggctagttatgtagaccgtgctggacttaacgacgaattggtgttacacaacaaggatgggttcttggccagacaagaatttttgcagagagtcgggtctgcagaggacgagagatacaaagaattgcgccgtcaacaacttgctcagcagttgcagcaggatagcgaagctagttga

SEQ ID NO: 861 - DNA, 1242 bp, Saccharomyces cerevisiae
atgtccacagagactacaaaaccatcaatcactactacaccaactactgtactcgtttctcccaacacgctcaaaaggaaaaagggtgaagacaccagcgaggaacaactggaagcagaaatcaaacgcgtggccctgaaggatgcagacagccactctgacaacgaccacgattcccccgacaatgttccctctgatgtacatttacgaatgctgtgcttagtcaaacacgcttcactgatagtaggacacaagggcgccactatatctagaataaaatccgaaacctctgctagaataaacatatcaaataatatcagaggtgttcctgaaagaattgtttacgtgaggggtacttgcgatgatgtagccaaggcatacggcatgatagtaagagcgctgcttgaagaacatggtaacgaagataacggggaagacattgagatttctatcaacctattgatccctcatcatcttatgggatgtataattggcaaacgtgggtctcggttaagagaaattgaggatttgagtgcagcaaaattattcgcgtccccgaatcaattgctgctttctaacgatagaattttaaccattaacggggttccggatgctatccatattgctactttctacattagtcaaacattgctaaactttcagatggaatctccgcagaaaaatgtgaaaaggtccatatactatcagccaactcagtttaactcagtattaatagaccatagccaaccgaacaccattttccatcaaagaaaccaccaatatcatccaagcgataaactactttcatacaaacccaacaaaaatttaccaatatcatctactttgttgagtatggccacaccgcagtatactactgctagcgttgcaaacgcaacggcctttcaaccgaacttcgttatccctaatgtgacagtcttagacggccctgttatcagtccggcacccggcaaccatttattaatgaactttgtacaacaagagatattcatagatgagaaatttgtcggaaatgtcattggcaaagatggcaagcacataaattcggtcaaggaatccacaggttgttcaattattatacaagatcctgtagaaggctcttcggagagaagacttaccataagaggtacgttcatggcgtcccaagctgctattatgttgattagcaataaaattgaaattgatagatcaaatgctgaacgtaaaagaaggtcgcccctctaa

SEQ ID NO: 862 - DNA, 1242 bp, Artificial Sequence
  Description of Artificial Sequence: Synthetic polynucleotide
atgtccacagagactacaaaaccatccatcactactacaccaactactgtactcgtttctcccaacacgctcaaaaggaaaaagggtgaagacaccagcgaggaacaattggaagcagaaatcaaacgcgtggccttgaaggatgcagacagccactctgacaacgaccacgattcccccgacaatgttccctctgatgtacatttaagaatgttgtgcttagtcaaacacgcttctttgatagtaggacacaagggcgccactatatctagaataaaatccgaaacctctgctagaataaacatatccaataatatcagaggtgttcctgaaagaattgtttacgtgaggggtacttgcgatgatgtagccaaggcatacggcatgatagtaagagcgttacttgaagaacatggtaacgaagataacggggaagacattgagatttctatcaaccttttgatccctcatcatcttatgggatgtataattggcaaacgtgggtctagattaagagaaattgaggatttgagtgcagcaaaattattcgcgtccccgaatcaattgttactttctaacgatagaattttaaccattaacggggttccggatgctatccatattgctactttctacattagtcaaacattgttgaactttcagatggaatctccgcagaaaaatgtgaaaaggtccatatactatcagccaactcagtttaactctgtattaatagaccatagccaaccgaacaccattttccatcaaagaaaccaccaatatcatccaagcgataaattactttcttacaaacccaacaaaaatttaccaatatcttctactttgttgagtatggccacaccgcagtatactactgctagcgttgcaaacgcaacggcctttcaaccgaacttcgttatccctaatgtgacagtcttagacggccctgttatcagtccggcacccggcaaccatttattaatgaactttgtacaacaagagatattcatagatgagaaatttgtcggaaatgtcattggcaaagatggcaagcacataaattctgtcaaggaatccacaggttgttctattattatacaagatcctgtagaaggctcttctgagagaagacttaccataagaggtacgttcatggcgtcccaagctgctattatgttgattagcaataaaattgaaattgatagatctaatgctgaacgtaaaagaaggtctcccctctga

SEQ ID NO: 863 - DNA, 285 bp, Saccharomyces cerevisiae
atggaacacaatctttcacctttacagcaagaagtattggacaaatacaaacagctttctttagatctaaaagctctggatgaaactataaaagaactaaactattcgcaacacaggcaacagcattcacagcaagaaactgtatcgccagatgagatactacaggagatgagggacatagaggtcaaaattggtttagttgggacactgctaaaaggtagcgtgtactcgcttatcttgcaaagaaagcaagaacaggagtctttgggtagcaattctaaataa

SEQ ID NO: 864 - DNA, 285 bp, Artificial Sequence
  Description of Artificial Sequence: Synthetic polynucleotide
atggaacacaatctttctcctttacagcaagaagtattggacaaatacaaacagctttctttagatttgaaagctttagatgaaactataaaagaattgaactattctcaacacaggcaacagcattctcagcaagaaactgtatctccagatgagatattacaggagatgagggacatagaggtcaaaattggtttagttgggacattgttgaaaggtagcgtgtactctcttatcttgcaaagaaagcaagaacaggagtctttgggtagcaattctaaatga

SEQ ID NO: 865 - DNA, 1155 bp, Saccharomyces cerevisiae
atgtcattttccaattctaaagacaagtccgttgttgccgtctacaagctggtcaaagcgccaatctactctcattgcttttctcaagataaatctattttagccgttacatgcgaaacagattgtcttgtctatagagtttcaaacaacacacctcccgttttattcgcaacgttgaaagatcatgataaaaccattactgctgtggacatttccatacatggtcgtattgtgacttgctcccaagaccgtaatgcttacgtttgggagccattgagtgatgggacatacaagcccacgttagtacttcttcgtattaacagagcagctacttcagttacatgggcaccaaatggttataagtttgctgttgggtccagtgctagaatcatcgctgtttgttattacgaacacgagaataattggtgggtatccaagcacatcaagaaacccatcaaatctaccatcaattgcctgtcttggcatgcaaatggagtcctattagctgctggtggtactgatgggtttatgcgtgtgttcagcgggtttatcaagggtttggattccaaggaatccgtcgccggatcaccctggggccagaaattcccttttggttgtttaatcagggagtggtatcagggttcttatatccatgatgtggaatggagaagtcagatggaaagaattgcttatgtagcgcatgatggtactttgaatgttgtcgattaccaatctccagtgcaatctgtcaatgctccggaaggtttaccttacaggtccttagtatggataaacgaccacgagattgtttgtggaggatactcttgtcatccggtattgttcagcgaagcctctgaaggctggaaatttgcgaagaatctagacaaatcagacaataacaagtcttctgccttaactgcatctggtaatacagacgagctgagtggtaataatgatgaaagttcaactttcggtatttccgcattgagaaagtttaaagaattagacttgaaaggtaaagttagcacagatgtccaagaaagtgcacatgaaaacgccattgtggaattaagaccttttgcggaatccaacggccaaatcacacaagtctcttcctgtgggttagacggtaagatcgtcatttatacaatttaa

SEQ ID NO: 866 - DNA, 1155 bp, Artificial Sequence
  Description of Artificial Sequence: Synthetic polynucleotide
atgagtttttccaattctaaagacaagtccgttgttgccgtctacaagttggtcaaagcgccaatctactctcattgcttttctcaagataaatctattttagccgttacatgcgaaacagattgtcttgtctatagagtttctaacaacacacctcccgttttattcgcaacgttgaaagatcatgataaaaccattactgctgtggacatttccatacatggtcgtattgtgacttgctcccaagaccgtaatgcttacgtttgggagccattgagtgatgggacatacaagcccacgttagtacttcttcgtattaacagagcagctacttctgttacatgggcaccaaatggttataagtttgctgttgggtccagtgctagaatcatcgctgtttgttattacgaacacgagaataattggtgggtatccaagcacatcaagaaacccatcaaatctaccatcaattgcttatcttggcatgcaaatggagtccttttagctgctggtggtactgatgggtttatgcgtgtgttcagcgggtttatcaagggtttggattccaaggaatccgtcgccggaagtccctggggccagaaattcccttttggttgtttaatcagggagtggtatcagggttcttatatccatgatgtggaatggagaagtcagatggaaagaattgcttatgtagcgcatgatggtactttgaatgttgtcgattaccaatctccagtgcaatctgtcaatgctccggaaggtttaccttacaggtccttagtatggataaacgaccacgagattgtttgtggaggatactcttgtcatccggtattgttcagcgaagcctctgaaggctggaaatttgcgaagaatttggacaaaagtgacaataacaagtcttctgccttaactgcatctggtaatacagacgagttgagtggtaataatgatgaaagttctactttcggtatttccgcattgagaaagtttaaagaattagacttgaaaggtaaagttagcacagatgtccaagaaagtgcacatgaaaacgccattgtggaattaagaccttttgcggaatccaacggccaaatcacacaagtctcttcctgtgggttagacggtaagatcgtcatttatacaatttga

SEQ ID NO: 867 - DNA, 3363 bp, Saccharomyces cerevisiae
atggttagtaggttttatcagattccaggtacgcatcggccatcgtcggcaatatcttcttcaaatgaatcttcttcactgttgtctgcaaggagaataagtcaaacatatttcaattatcaggcgacccctgaatgccaaaaagtttcctctaagtatgatcctgataacccaaacaaagataagttgggaacatacgatggggtatttgtgcctactgctttaaacgtattgtctatccttatgtttcttcgttttggcttcattttgggtcagttaggtattatatgcaccatcggtcttctgctattgagttacactattaatcttctcaccacgttaagtatatctgctatatctacaaacgggactgttaggggcgggggtgcttattatatgatttcaagaagtttaggacctgaatttggtggatccattgggcttgtctttttcttagggcaggtgttcaatgcaggtatgaacgcagtgggtattatcgaacctttactctataacttgggttattctgctcaaggcgagccacctgcagctttgggagagctactaccaagagggcattggcacgaatttacatatgccacggtcattcttttcttatgtttttctgtggcttttgttggctcgcaaacagtgtcaagagcagggaatattctttttttggtactggcagcttctatattttccattccactttctgcattgataagatcgccattcactgaaggcggtatcagttatacaggtccttcatggcaaacttttcatgataacctgctccctcacttaacaaaaggtgcagcaggttcgttactcaaaggtaaggaaacattcaatgatttatttggcgttttttttcctgctacagctggtatattcgcgggcgcaggaatgtcaagtgaattgagaaagccctctaaatcaattcctaagggtaccttatggggtttacttttcacttttatctgttatgccgttgttgtcttctccatgggttgttccattcccagaagatcgttatatgatgaagtacaaattatacagacgatcagttccgttcagtgggttatattcatgggtgaaatggctacttctcttttctccatcatagtggggatgctcggtgctgcttatgtattagaagcaattgcaaaggataacattattcctggtttggagatttttgctcattcaccgttatattcattgatttttacttggattctaacacagctatgtttgttttcagacgtcaataaaatcgccacatttatcacaatgacattcttaatgacgtttgtggtcatgaatttggcgtgcttcctattaggtatttcctctgctcccaatttcaggccctctttcaaatactttaacaggtatactacagcaattggcgcattactttctgttgttgcgatgttaatagttgatggcatctcagcgtctgtcttgtttttggctatgattttgctatttttattcattcattatttttcaccaccgaagtcttggggtgatgtgtctcaaagtttaatatatcatcaagtgagaaagtatttgcttcgcctacgtcaagacaatattaaatactggaggcctcaaatattgctgtttgtagataatccaaggacgagctggaacttaataaggttttgcaatcatttgaaaaaaggtggtttgtatattttaggccatgttgcagtaactgcggattttccgaagcaactaaatgaattaaaaactcagcagaaagcttggatgaagatcagagacatggcagcaataaaggcttttgtccaagttgggactggtccctcccttatatggggaattaggaatgtttttattggttccgggcttggaggtatgaaaccaaacattactgttgtcggtttttttgacctcgaaagttatagaaagcacatcccacaaagtcgcagccaaaataaccttcagaaacaggtggaaataaaagctacagtgccacgtagtacatgctctgatgtcaaaatcaatgttccattgcctacggatgagtgtaaaaatgaaaccaaagttaatgtacaacaatgggttcaaattgtagaagatctatcactgatgcaatccaatattgccatagcgcatggattcaaaaatttagagataccgaacaaaagggacagctgctttccaaaaaaaactatagatctttatcccatccaaatgtgcggaaaagttgaggcaaagggtgaccagcctgcggctatcactactaactttgatacgtatacactgattctacaattagctgccattttggttactgttcctgaatggaagcgcacacattcgcttcgagttattttatttgtggaacaagaatatcatagaacgaacgaaactcaacgaatgaaaaagctattacaggttctaagaattgacgcagaggttttggtagtatctttagatcaattcagagtatacaacacaattgtcaagggagacccaatcgtgtttgattatgtcaactcgaaattggccgataatgaatggtggaaagatttggttgaagctcgtgatacattaaaaccgaagcggaggttttccactattgaacctcaaacgatagcaaagcaatttacacaatcaagaaaatatacgtctggggttcagaaattgggtgtctcatttacaatgaatacgagaatgccaactaaccgcattgataccccatgcgagagtgaggactccgatttggatacagatcttacgtcaattcgtgatgccttctcggcatcgactaatatttcagtaggtaaggacttaacgaccaaatcgaagaccggttccgacagaacaaatttactcgtaaagaatttacaaagcgatgtgtcaacacagtcgttaagacccgttttctcgagtaatactttgccgaggacgagagtcgtggaagatggcacgggtgaacagccgacactgatcccaattgccgaacctgacctttcgaatgggaacggtactgggagcggtattggcaacggcaacaaattaaagaaaccggttcttcccgaattatcaccttgttgttcaaaagatagtttagtcacagcgatgcaaaatttaggtttcaatgatcttcccagcactgctcaacatttggttctgaatgatgtgatgacacaaatgtcaaagagttcggatttaattttttcaaccttgccagttccagctcttggaacacatgaagatcacgatgcaagtttacaatatgtcgaggacttggatatttggttggagggcttacctccatgcatgttaatcaattcgcaaaccatgacagtaactactgcattatag

SEQ ID NO: 868 - DNA, 3363 bp, Artificial Sequence
  Description of Artificial Sequence: Synthetic polynucleotide
atggttagtaggttttatcagattccaggtacgcatagaccatcttctgcaatatcttcttccaatgaatcttcttctttgttgtctgcaaggagaataagtcaaacatatttcaattatcaggcgacccctgaatgccaaaaagtttcctctaagtatgatcctgataacccaaacaaagataagttgggaacatacgatggggtatttgtgcctactgctttaaacgtattgtctatccttatgtttcttcgttttggcttcattttgggtcagttaggtattatatgcaccatcggtcttttattattgagttacactattaatcttctcaccacgttaagtatatctgctatatctacaaacgggactgttaggggcgggggtgcttattatatgatttctagaagtttaggacctgaatttggtggatccattgggcttgtctttttcttagggcaggtgttcaatgcaggtatgaacgcagtgggtattatcgaacctttactctataacttgggttattctgctcaaggcgagccacctgcagctttgggagagttattaccaagagggcattggcacgaatttacatatgccacggtcattcttttcttatgtttttctgtggcttttgttggctctcaaacagtgtccagagcagggaatattctttttttggtattggcagcttctatattttccattccactttctgcattgataagatctccattcactgaaggcggtatcagttatacaggtccttcctggcaaacttttcatgataacttactccctcacttaacaaaaggtgcagcaggttctttactcaaaggtaaggaaacattcaatgatttatttggcgttttttttcctgctacagctggtatattcgcgggcgcaggaatgagcagtgaattgagaaagccctctaaatccattcctaagggtaccttatggggtttacttttcacttttatctgttatgccgttgttgtcttctccatgggttgttccattcccagaagatctttatatgatgaagtacaaattatacagacgatcagttccgttcagtgggttatattcatgggtgaaatggctacttctcttttctccatcatagtggggatgctcggtgctgcttatgtattagaagcaattgcaaaggataacattattcctggtttggagatttttgctcattctccgttatattctttgatttttacttggattttaacacagttgtgtttgttttctgacgtcaataaaatcgccacatttatcacaatgacattcttaatgacgtttgtggtcatgaatttggcgtgcttcttattaggtatttcctctgctcccaatttcaggccctctttcaaatactttaacaggtatactacagcaattggcgcattactttctgttgttgcgatgttaatagttgatggcatcagtgcgtctgtcttgtttttggctatgattttgttatttttattcattcattatttttctccaccgaagtcttggggtgatgtgtctcaaagtttaatatatcatcaagtgagaaagtatttgcttcgccttcgtcaagacaatattaaatactggaggcctcaaatattgttatttgtagataatccaaggacgagctggaacttaataaggttttgcaatcatttgaaaaaaggtggtttgtatattttaggccatgttgcagtaactgcggattttccgaagcaattgaatgaattaaaaactcagcagaaagcttggatgaagatcagagacatggcagcaataaaggcttttgtccaagttgggactggtccctcccttatatggggaattaggaatgtttttattggttccgggcttggaggtatgaaaccaaacattactgttgtcggtttttttgacctcgaaagttatagaaagcacatcccacaaagtcgcagccaaaataaccttcagaaacaggtggaaataaaagctacagtgccacgtagtacatgctctgatgtcaaaatcaatgttccattgcctacggatgagtgtaaaaatgaaaccaaagttaatgtacaacaatgggttcaaattgtagaagatttatctttgatgcaatccaatattgccatagcgcatggattcaaaaatttagagataccgaacaaaagggacagctgctttccaaaaaaaactatagatctttatcccatccaaatgtgcggaaaagttgaggcaaagggtgaccagcctgcggctatcactactaactttgatacgtatacattaattttacaattagctgccattttggttactgttcctgaatggaagcgcacacattctcttcgtgttattttatttgtggaacaagaatatcatagaacgaacgaaactcaaagaatgaaaaagcttttacaggttttgagaattgacgcagaggttttggtagtatctttagatcaattcagagtatacaacacaattgtcaagggagacccaatcgtgtttgattatgtcaactccaaattggccgataatgaatggtggaaagatttggttgaagctcgtgatacattaaaaccgaagagaaggttttccactattgaacctcaaacgatagcaaagcaatttacacaatctagaaaatatacgtctggggttcagaaattgggtgtcagttttacaatgaatacgagaatgccaactaaccgcattgataccccatgcgagagtgaggactccgatttggatacagatcttacgtccattcgtgatgccttcagtgcatctactaatattagtgtaggtaaggacttaacgaccaaatccaagaccggttccgacagaacaaatttactcgtaaagaatttacaaagcgatgtgtctacacagtctttaagacccgttttctctagtaatactttgccgaggacgagagtcgtggaagatggcacgggtgaacagccgacattgatcccaattgccgaacctgacctttctaatgggaacggtactgggagcggtattggcaacggcaacaaattaaagaaaccggttcttcccgaattatctccttgttgttctaaagatagtttagtcacagcgatgcaaaatttaggtttcaatgatcttcccagcactgctcaacatttggttttgaatgatgtgatgacacaaatgtccaagagttctgatttaattttttccaccttgccagttccagctcttggaacacatgaagatcacgatgcaagtttacaatatgtcgaggacttggatatttggttggagggcttacctccatgcatgttaatcaattctcaaaccatgacagtaactactgcattatga

SEQ ID NO: 869 - DNA, 1311 bp, Saccharomyces cerevisiae
atgtcaaccaaaccagagaagccaatatggatgtcacaagaagactatgaccgtcagtacggctcaattactggtgatgaatcgtccacagtctcaaaaaaagactccaaagttactgccaatgcgcctggtgatggtaatggatcattaccagttttgcaaagcagctctatccttacttctaaggtgtctgatctacccattgaggcagaatccgggtttaaaatccaaaagagaagacatgaaaggtatgatcaagaggaaagattacgcaaacagcgtgctcaaaaattgagagaagagcaactaaagagacatgaaatagagatgactgcaaatagatccataaatgttgaccagattgtccgagagcactataatgaacgtacaataatcgccaatcgcgctaagaggaatctatcgcctattattaagcttcgtaattttaacaatgcgattaagtatatgttaattgacaaatatacaaaacctggagatgtcgttttagaactcggatgtggcaaaggtggtgatttaagaaaatatggtgctgcaggtatttcacagtttattggtattgacatttccaatgcctctatccaagaagctcataagagataccggtccatgagaaatttggactaccaagttgtgctaattactggggattgctttggcgaatcattaggtgttgcagtagagcccttcccagactgtagatttccgtgtgatatcgtttcgacgcaattttgcttgcattatgcttttgagaccgaagaaaaagcaaggagagctttactgaatgtcgccaaatcactcaaaattggtggtcacttttttggcacgataccagattcagaattcattcgttataaactgaataaatttcccaaagaagtggaaaagccatcttggggaaactccatttataaagtgacatttgagaataattcataccaaaagaatgattatgagttcacatcgccttatggtcaaatgtatacttattggctagaagatgctatagataatgttcctgaatatgttgtgccattcgaaaccttaagaagtttggctgatgaatacggtttggaactagtatcgcaaatgccttttaataaattttttgtccaagaaattcccaaatggattgagaggttttcgcctaaaatgagggaaggtttacaaagatctgatggtagatatggtgttgaaggggatgaaaaggaagcggcatcatatttctataccatgtttgcattccgtaaggtaaaacagtatatcgaaccggaaagcgtaaagcccaactga

SEQ ID NO: 870 - DNA, 1311 bp, Artificial Sequence
  Description of Artificial Sequence: Synthetic polynucleotide
atgtctaccaaaccagagaagccaatatggatgtctcaagaagactatgaccgtcagtacggctccattactggtgatgaatcttccacagtctccaaaaaagactccaaagttactgccaatgcgcctggtgatggtaatggatctttaccagttttgcaaagcagctctatccttacttctaaggtgtctgatttgcccattgaggcagaatccgggtttaaaatccaaaagagaagacatgaaaggtatgatcaagaggaaagattacgcaaacagcgtgctcaaaaattgagagaagagcaattgaagagacatgaaatagagatgactgcaaatagatccataaatgttgaccagattgtcagagagcactataatgaacgtacaataatcgccaatcgcgctaagaggaatttatctcctattattaagcttcgtaattttaacaatgcgattaagtatatgttaattgacaaatatacaaaacctggagatgtcgttttagaactcggatgtggcaaaggtggtgatttaagaaaatatggtgctgcaggtatttctcagtttattggtattgacatttccaatgcctctatccaagaagctcataagagataccgttccatgagaaatttggactaccaagttgtgttgattactggggattgctttggcgaatctttaggtgttgcagtagagcccttcccagactgtagatttccgtgtgatatcgtttccacgcaattttgcttgcattatgcttttgagaccgaagaaaaagcaaggagagctttattgaatgtcgccaaatctctcaaaattggtggtcacttttttggcacgataccagattctgaattcattcgttataaattgaataaatttcccaaagaagtggaaaagccatcttggggaaactccatttataaagtgacatttgagaataattcttaccaaaagaatgattatgagttcacatctccttatggtcaaatgtatacttattggttagaagatgctatagataatgttcctgaatatgttgtgccattcgaaaccttaagaagtttggctgatgaatacggtttggaattggtatctcaaatgccttttaataaattttttgtccaagaaattcccaaatggattgagaggttttctcctaaaatgagggaaggtttacaaagatctgatggtagatatggtgttgaaggggatgaaaaggaagcggcaagttatttctataccatgtttgcattccgtaaggtaaaacagtatatcgaaccggaaagcgtaaagcccaactga

SEQ ID NO: 871 - DNA, 2550 bp, Saccharomyces cerevisiae
atggaaactattgattcgaagcaaaatattaatagggagtctttattggaggaaaggaggaaaaaactagcaaaatggaaacaaaaaaaagcacaatttgatgctcagaaagagcatcaaacttcacgcaatgacattgttactaacagtttagaaggtaagcagactactgaaaagtttacggaaagacaggaacgtgtaaaagaagagcttcggaagagaaaaaatgaatttaggaaatctgacgaacctgtatcggttaagccttcgaagaaaaagtcgaagagaagtaaggtaaagaagaaaatatccttcgacttcagtgatgacgatgattctgaaataggagtttcttttagatcgaaggagcacattcaaaaagctccagagcatgataatgaaaaagatccactggatgagtttatgacgtcattgaaggaggagaaaatgagtaatagtaaaggcatgtacgacagaggcgacattcttgatgtagaggatcaattgtttgaacttggaggaaccgacgatgaggatgttgaagataatacggataattctaatatagcgaaaattgctaaactcaaagcaaaaaaacgtgtaaagcaaatttattactctccagaagagcttgagccgttccaaaaaaatttttatatagaatctgaaacagtttcctcgatgtcagagatggaagttgaggagcttagacttagtctggataatatcaaaataaagggaacaggttgccccaaaccagtcacaaagtggtctcaactgggactatcaacggacaccatggttttaattacagaaaagttgcactttggctccttaacgcctattcaatcccaggctcttcccgctattatgtcaggtcgtgatgttataggaatatcaaaaactggctccggcaagaccatctcctatcttttaccattgctaagacaagtaaaagctcaacggccattatcaaaacatgaaacagggcccatgggtttaattctggctccaactagagagctagctttacaaatacatgaagaagttactaaattcacagaagcagatacatccattagatcagtatgctgtacaggaggttctgaaatgaaaaagcagattactgatcttaaaagaggcactgagattgttgttgccacaccgggacgatttattgatatattaacactaaatgatgggaaattacttagtactaaaagaataacgttcgtagtaatggatgaggcagacaggctgttcgatttaggttttgaacctcaaataacgcaaatcatgaaaactgttcgaccggataaacagtgtgttctatttagtgcaacttttccgaacaaactacgcagttttgccgtaagagttttgcattccccaatatctattacgattaattcaaagggaatggttaatgaaaacgtaaaacaaaagtttagaatatgccattcagaagatgaaaaatttgacaatctggtgcagcttatccatgagcgcagtgaattttttgacgaggttcaaagtgaaaatgacggacagtcaagcgatgttgaagaagttgatgctaaagccattatatttgtatcaagtcagaatatttgcgacttcatttcaaaaaagctgttaaatgctggaattgtgacctgtgctattcatgcaggtaagccatatcaagaaaggcttatgaacttagaaaagttcaaacgagaaaagaacagtattcttctctgtacagaggttctctcaagaggtttaaatgttcccgaagtgtcgttggttattatctataacgccgtcaaaactttcgcgcaatatgttcatactactggaagaactgccagaggtagtcgctccggtactgctattactcttctattgcatgatgaactgtcaggtgcttatatcttgagcaaggcaatgcgcgatgaagaaataaaagctttagaccctctgcaagcaaaagaacttcaggaaatgagtgccaagtttgaatccggtatgaaaaagggtaagtttaggttgtcgaaagggttcggcggcaaaggactggaaaatatcaaaagtaaaagagaggaagctcaaaataaagatttggagctcaaaaagaatgataagaggagcgatgacttggaaaagaaaatcagcaatccacgcgaagggcatgacagtgtgtctgagtcttctgcgcttattccgagactcaattatgaactattcaaagagtctacagacgggtcgatcatcttttacgccaaggtttatattaatgatttaccccagattgtaagatgggaggctacaaagaatacaaccttattatttatcaagcatgaaaccggatgtagtattactaacaagggtaaattttaccctgaagggaaggaaccaaagaatgaaaacgatgagcctaaactatacttattgatcgaaggccaagatgagaaagacatacaattaagtatagaattgctggagcaaaaagttaaagagggggtcgtaaaggctgcaagcttgtctttgaagagtactaaatactag

SEQ ID NO: 872 - DNA, 2550 bp, Artificial Sequence
  Description of Artificial Sequence: Synthetic polynucleotide
atggaaactattgattctaagcaaaatattaatagggagtctttattggaggaaaggaggaaaaaattggcaaaatggaaacaaaaaaaagcacaatttgatgctcagaaagagcatcaaactagccgcaatgacattgttactaacagtttagaaggtaagcagactactgaaaagtttacggaaagacaggaacgtgtaaaagaagagcttagaaagagaaaaaatgaatttaggaaatctgacgaacctgtatctgttaagccttctaagaaaaagtccaagagaagtaaggtaaagaagaaaatatccttcgacttcagtgatgacgatgattctgaaataggagtttcttttagatccaaggagcacattcaaaaagctccagagcatgataatgaaaaagatccattagatgagtttatgacgtctttgaaggaggagaaaatgagtaatagtaaaggcatgtacgacagaggcgacattcttgatgtagaggatcaattgtttgaacttggaggaaccgacgatgaggatgttgaagataatacggataattctaatatagcgaaaattgctaaactcaaagcaaaaaaacgtgtaaagcaaatttattactctccagaagagcttgagccgttccaaaaaaatttttatatagaatctgaaacagtttcctctatgtctgagatggaagttgaggagcttagacttagtttggataatatcaaaataaagggaacaggttgccccaaaccagtcacaaagtggtctcaattaggattatctacggacaccatggttttaattacagaaaagttgcactttggctccttaacgcctattcaatcccaggctcttcccgctattatgagtggtcgtgatgttataggaatatccaaaactggctccggcaagaccatctcctatcttttaccattgttaagacaagtaaaagctcaaagaccattatccaaacatgaaacagggcccatgggtttaattttggctccaactagagagttggctttacaaatacatgaagaagttactaaattcacagaagcagatacatccattagatctgtatgctgtacaggaggttctgaaatgaaaaagcagattactgatcttaaaagaggcactgagattgttgttgccacaccgggaagatttattgatatattaacattaaatgatgggaaattacttagtactaaaagaataacgttcgtagtaatggatgaggcagacaggttgttcgatttaggttttgaacctcaaataacgcaaatcatgaaaactgttaggccggataaacagtgtgttttatttagtgcaacttttccgaacaaattgcgcagttttgccgtaagagttttgcattccccaatatctattacgattaattctaagggaatggttaatgaaaacgtaaaacaaaagtttagaatatgccattctgaagatgaaaaatttgacaatttggtgcagcttatccatgagcgcagtgaattttttgacgaggttcaaagtgaaaatgacggacagagtagcgatgttgaagaagttgatgctaaagccattatatttgtatctagtcagaatatttgcgacttcatttccaaaaagcttttaaatgctggaattgtgacctgtgctattcatgcaggtaagccatatcaagaaaggcttatgaacttagaaaagttcaaaagagaaaagaacagtattcttctctgtacagaggttctcagcagaggtttaaatgttcccgaagtgtctttggttattatctataacgccgtcaaaactttcgcgcaatatgttcatactactggaagaactgccagaggtagtcgctccggtactgctattactcttttattgcatgatgaattatctggtgcttatatcttgagcaaggcaatgcgcgatgaagaaataaaagctttagaccctttacaagcaaaagaacttcaggaaatgagtgccaagtttgaatccggtatgaaaaagggtaagtttaggttgagtaaagggttcggcggcaaaggattagaaaatatcaaaagtaaaagagaggaagctcaaaataaagatttggagctcaaaaagaatgataagaggagcgatgacttggaaaagaaaatcagcaatccacgcgaagggcatgacagtgtgtctgagtcttctgcgcttattccgagactcaattatgaattattcaaagagtctacagacgggtctatcatcttttacgccaaggtttatattaatgatttaccccagattgtaagatgggaggctacaaagaatacaaccttattatttatcaagcatgaaaccggatgtagtattactaacaagggtaaattttaccctgaagggaaggaaccaaagaatgaaaacgatgagcctaaactttacttattgatcgaaggccaagatgagaaagacatacaattaagtatagaattgttggagcaaaaagttaaagagggggtcgtaaaggctgcaagcttgtctttgaagagtactaaatactga

SEQ ID NO: 873 - DNA, 2196 bp, Saccharomyces cerevisiae
atgatccgtttagctcagcaaacacaagtactgaagggcaaacccccaaaccagtttgttccacatccgacaaagaattcgctgactcatccaatgaaatttaacggtacaatcgctatggagcaccatgaacacaactatgccattccttacacgcctgctacttttaacaatccagccctcgctacttatcaggtaagcccagccaaccattttgttcctcactttggtggcaacattggagccaacaacaacaatcatctagctcagaataacagcaataatagtaacaaccatcataacaataaccgtaatcatcaccacaataacaatcgtaaccatcatcaaaataaccataatcatagcaagtataataactccaatcaaggtaattcaattagcccagactccccatggtttcataaggtttgtgccttcgaagattgcgtttcacagactctttatatgtcacaaactccaaggcgtcaaaacatgaaacaccattcagaacatccaaattctaacgctaatccattattttgggattctataggtagagcaatggggctgtatcatgatctactcactacaccggaattaaattctgatcgtgtctccaagcttgtacatttacttcacaatgggttgagagctaatagaaatcagttgacgagaatgaacaagaaacctgattacgactctcaatcctttcacaaagaaatgacaaactatctttgcaaatctttgagagagatctccgaagacgttctaaacggcaaggtcgaactgaacgaatacggtgctatgcatttgataactgcgtttaaggagcttttgttgtttgaggaagctgtcgacatatggaaagctgcaatcaatgggcaaaatacctacacatctaatatttttctgaatccaagagttgtcggtgttatattacccatcttatacgacaatggtgtctcttatccagaaattcaagctctatatgaaaagtcttcatcgatgattaattacttccatccaaatctttcagttgggatgatcagagcctctttatctgctagtgaaaatgacatggctctcaaattattccaaaaattatgccaagaatcaaccgaaatgaaatacggttatttgatagaaacccatctttccttcattggtgaatgtaaagacttgaatgtggctcaaaccttttttgacaaggctttaaatgatgaaatgccatacaagatagacttgcaagtttcctacgtgaaatcctttttaagaaacatatggagccaaacccgtgatttcaaccacatctatcaaatctggtacaagtcttctttacattatggtagaaacgtcaaccacggtatttcttcatctttgaatgacacttttttcgacattttttttgaaaattatgctgtggacaagatgcaaggttttcaaactttacaaaatattattcaaacttacaacaacatcaagcatatagatgaacctttctttaacattatcttggctaaatgcactgtctggcatgaccgcagtattttagaatacatcgataagagttacgaggcgtaccacattccaaaaacaatagtcgcttatagaatcttattaaagtctatgggatctgtcgatgatgcttcgaatgcagaaattctccaaagatggatggatttaatccgcaaatcagatgaaattggtcaaagatttattgccaacgcagattgggcggccttaagagatgctactgtaacatggacccaaaatgatagagattccaagaaaagtaacatgaacagcactcaaataagcagaaccgcaactccttcgccatccttaactccaatggatactccagcaccagagcatttgttcaacaatcctcaaaatccaatggacttctactctcatccagcattgcaagcagcaactgcttctggtgcatttgatgaatttgctgcggaggctgcttcttcttccataccagttgacggcagaatggttttgtatttgaaaattgttaaacgttactctccatattgccgtgattccagacaactagccagattaacaacagggaccgctgtcaaatattccgttttgcaagaagttttgaaccaattccaaactttaatcgttaacgatattcctattcctgaattacataatttgaagccaacgtgtgtttaa

SEQ ID NO: 874 - DNA, 2196 bp, Artificial Sequence
  Description of Artificial Sequence: Synthetic polynucleotide
atgatccgtttagctcagcaaacacaagtattgaagggcaaacccccaaaccagtttgttccacatccgacaaagaattctttgactcatccaatgaaatttaacggtacaatcgctatggagcaccatgaacacaactatgccattccttacacgcctgctacttttaacaatccagccctcgctacttatcaggtaagcccagccaaccattttgttcctcactttggtggcaacattggagccaacaacaacaatcatttggctcagaataacagcaataatagtaacaaccatcataacaataaccgtaatcatcaccacaataacaatcgtaaccatcatcaaaataaccataatcatagcaagtataataactccaatcaaggtaattctattagcccagactccccatggtttcataaggtttgtgccttcgaagattgcgtttctcagactctttatatgtctcaaactccaaggcgtcaaaacatgaaacaccattctgaacatccaaattctaacgctaatccattattttgggattctataggtagagcaatggggttatatcatgatttactcactacaccggaattaaattctgatcgtgtctccaagcttgtacatttacttcacaatgggttgagagctaatagaaatcagttgacgagaatgaacaagaaacctgattacgactctcaatcctttcacaaagaaatgacaaactatctttgcaaatctttgagagagatctccgaagacgttttgaacggcaaggtcgaattgaacgaatacggtgctatgcatttgataactgcgtttaaggagcttttgttgtttgaggaagctgtcgacatatggaaagctgcaatcaatgggcaaaatacctacacatctaatatttttttgaatccaagagttgtcggtgttatattacccatcttatacgacaatggtgtctcttatccagaaattcaagctttgtatgaaaagtcttcttctatgattaattacttccatccaaatctttctgttgggatgatcagagcctctttatctgctagtgaaaatgacatggctctcaaattattccaaaaattatgccaagaaagtaccgaaatgaaatacggttatttgatagaaacccatctttccttcattggtgaatgtaaagacttgaatgtggctcaaaccttttttgacaaggctttaaatgatgaaatgccatacaagatagacttgcaagtttcctacgtgaaatcctttttaagaaacatatggagccaaacccgtgatttcaaccacatctatcaaatctggtacaagtcttctttacattatggtagaaacgtcaaccacggtatttcttcttctttgaatgacacttttttcgacattttttttgaaaattatgctgtggacaagatgcaaggttttcaaactttacaaaatattattcaaacttacaacaacatcaagcatatagatgaacctttctttaacattatcttggctaaatgcactgtctggcatgaccgcagtattttagaatacatcgataagagttacgaggcgtaccacattccaaaaacaatagtcgcttatagaatcttattaaagtctatgggatctgtcgatgatgcttctaatgcagaaattctccaaagatggatggatttaatccgcaaatctgatgaaattggtcaaagatttattgccaacgcagattgggcggccttaagagatgctactgtaacatggacccaaaatgatagagattccaagaaaagtaacatgaacagcactcaaataagcagaaccgcaactccttctccatccttaactccaatggatactccagcaccagagcatttgttcaacaatcctcaaaatccaatggacttctactctcatccagcattgcaagcagcaactgcttctggtgcatttgatgaatttgctgcggaggctgcttcttcttccataccagttgacggcagaatggttttgtatttgaaaattgttaaacgttactctccatattgccgtgattccagacaattggccagattaacaacagggaccgctgtcaaatattccgttttgcaagaagttttgaaccaattccaaactttaatcgttaacgatattcctattcctgaattacataatttgaagccaacgtgtgtttga

SEQ ID NO: 875 - DNA, 1590 bp, Saccharomyces cerevisiae
atgtgcactccagatgaaaacgattacaaaacatcaactgacccagatacatctgcaaatacaaatcatactctcgaaaaaaagaagagaaaaaagagaaaaaacacaaacgtggcatgcgtgaactgttcgagattgcatgtgtcatgtgaggccaaaaggccatgcttacgatgtatcagcaagggcctcacggctacatgcgttgacgctccaagaaagaaaagcaagtacttggctggaataccgaatagagagctcccaatgaacatacaaccggaccttccaccccgcaagatcatgatacccatttataacaactccagcaatagtagcctcaacgtaaataacatgggagaacagcaaaaattcaccagcccacaacatatagttcacaaagctaaattcctatcgaatgctgcagattccgagtactctattctgtcgaatatcatctatcaagacacattgtctaacaagatccctattgacatcctgtactccaacaccaattccacatccaactccacaataggcaatagcagtaacaatagccctacgggcacaaatacaagccctgaagaaacagaaatggagaaaattcgccagttgtacagcgaacagcgagcaaacatacccccacatccgtatccatcttccaatcaaaacgtttattctattctactgggaccaaattcagccaagattgtagcttcgcaagttaatcttttcgcgaaccatttccccttagtgcccgttgattcagctgataattccttaaactttaaaagattattgccacgggacccatctgaaaagagctcccaaattaattgggactcaagcataaaccaatattacttgaacagcgaaacggtaacatttcccgagttggctatccccttaaagcggaggaaaaaccatttggtctctgtatccctggaaagctgttcaccagacgctgccaacatcaagagcaatgtagaatgggaacattcattacgttattctactccaatggaaatatacacctccataaatgcccccttttcgcatacacctggattccaccatcttttggtgtacctaaagcatcgattcaaccagcaggatctggtgaagatgtgtcggtccattgccgaattccggcccattttcattgcgtgttctgtaactttaaccgaggaggacatgatttttatggagcaatgctaccaaagaactctattagaatatgtaaaatttattgcacaaatcggtaccccgacatgtatttggcgaagaaatggtcaaatttcttatgtcaacgaggaatttgaaattctatgcggatggacaagagaggagctactaaacaagatgacttttatcgtagagatcatggacgatgaaagtgtacgcgattacttcaaaacgctctctaaagttgcatatagggacttcagaggatctgagaagatgaaagtttgcaggctcttaagccccatcaagggcaagataattcattgttgctgtatgtggacattaaaaagagatgtctctggtttgcccctcatgatcttgggtaacttcatgcccatactcaattga

SEQ ID NO: 876 - DNA, 1590 bp, Artificial Sequence
  Description of Artificial Sequence: Synthetic polynucleotide
atgtgcactccagatgaaaacgattacaaaacatctactgacccagatacatctgcaaatacaaatcatactctcgaaaaaaagaagagaaaaaagagaaaaaacacaaacgtggcatgcgtgaactgttccagattgcatgtgagctgtgaggccaaaaggccatgcttaagatgtatcagcaagggcctcacggctacatgcgttgacgctccaagaaagaaaagcaagtacttggctggaataccgaatagagagctcccaatgaacatacaaccggaccttccaccccgcaagatcatgatacccatttataacaactccagcaatagtagcctcaacgtaaataacatgggagaacagcaaaaattcaccagcccacaacatatagttcacaaagctaaattcttgagcaatgctgcagattccgagtactctattttatccaatatcatctatcaagacacattgtctaacaagatccctattgacatcttgtactccaacaccaattccacatccaactccacaataggcaatagcagtaacaatagccctacgggcacaaatacaagccctgaagaaacagaaatggagaaaattcgccagttgtacagcgaacagagagcaaacatacccccacatccgtatccatcttccaatcaaaacgtttattctattttattaggaccaaattctgccaagattgtagcttctcaagttaatcttttcgcgaaccatttccccttagtgcccgttgattctgctgataattccttaaactttaaaagattattgccaagagacccatctgaaaagagctcccaaattaattgggactccagcataaaccaatattacttgaacagcgaaacggtaacatttcccgagttggctatccccttaaagagaaggaaaaaccatttggtctctgtatccttagaaagctgttctccagacgctgccaacatcaagagcaatgtagaatgggaacattctttacgttattctactccaatggaaatatacacctccataaatgcccccttttctcatacacctggattccaccatcttttggtgtacttgaagcatagattcaaccagcaggatttggtgaagatgtgtagatccattgccgaattcaggcccattttcattgcgtgttctgtaactttaaccgaggaggacatgatttttatggagcaatgctaccaaagaactttattagaatatgtaaaatttattgcacaaatcggtaccccgacatgtatttggagaagaaatggtcaaatttcttatgtcaacgaggaatttgaaattttgtgcggatggacaagagaggagttattaaacaagatgacttttatcgtagagatcatggacgatgaaagtgtacgcgattacttcaaaacgctctctaaagttgcatatagggacttcagaggatctgagaagatgaaagtttgcaggctcttaagccccatcaagggcaagataattcattgttgctgtatgtggacattaaaaagagatgtctctggtttgcccctcatgatcttgggtaacttcatgcccatactcaattga

SEQ ID NO: 877 - DNA, 1353 bp, Saccharomyces cerevisiae
atggtcaatagtaagaggcagcagagaagcaagaaagtagcgtcatcctccaaagtgccccccaccaaggggaggacatttactgggtgctgggcatgcagattcaagaaacgcagatgcgacgagaatagaccaatctgttcactgtgtgccaaacatggagataattgtagttacgatatcagacttatgtggttagaggagaacatctacaaagtacgcaagcattcactgatcagttcattacaggctcgcaaatcgaaatcgaaaccattgtgccagaaaatctcaaaatcaaggtttaaacaaatgacccattttagacaactatcacccccgacaagtgactgcgaagacagcgtgcacgaggcaagtaaggaaactacgcttcctaacgataatacattcaccataagcgtacggagattgaagatatacaataacgctgtggcctctgtctttggtagcatgacaaatagagattatactcaaaagcgcatagacaagaagttggacgaattgcttaatatggtggaaaacgacatatctgtggtcaacctcaattgctccaaacacgggccttactcagttttcagggccaatccggctgcagttacctctgctcttacagatcagctgccgtcgccgggtcattcgatgtcgtcagcagaggaaaccactactgcagcgctgtcatcgccgccagaagacagcacctctttgatcgatattatccaaggcaaaattttcgggatcctatggtttaattgctacgggaacatgatattgaaccgacaagaatacacgacgtggttcatcaataagatgaggaactcgttgaccacggaattcatacgcttccttgggaaaataattgacgacccggacatcaatatggcctcgtgcctgttcaaagagtgcatcgctcgttggagttgtgtcgattggcaatccatagctataacaatgctggtcatcattcatggatatacctgccccaacttgacaaagcttctaagagtgtggtttctccagcaaaagctattgagattttcgatgtatccgctggtcaactttatcataaacaatacacaagatttagacgtcctgtaccattgtaatggattgctagggaatgccgacttattcgaggatccctaccaggacgagcttacgtcggagttacatgtcttggtcacggagcgcctagtgaatagttggaaagatacaatattgcaacaactttgctcatgtcaagataccacactttcatgttcccaactgcggtactggcagctacaactgaagtgtaatcaacaattttacaaggatgtatatgccatgcaggactag

SEQ ID NO: 878 - DNA, 1353 bp, Artificial Sequence
  Description of Artificial Sequence: Synthetic polynucleotide
atggtcaatagtaagaggcagcagagaagcaagaaagtagcgtcttcctccaaagtgccccccaccaaggggaggacatttactgggtgctgggcatgcagattcaagaaacgcagatgcgacgagaatagaccaatctgttctttatgtgccaaacatggagataattgtagttacgatatcagacttatgtggttagaggagaacatctacaaagtacgcaagcattctttgatcagttctttacaggctcgcaaatctaaatctaaaccattgtgccagaaaatctccaaatctaggtttaaacaaatgacccattttagacaattatctcccccgacaagtgactgcgaagacagcgtgcacgaggcaagtaaggaaactacgcttcctaacgataatacattcaccataagcgtaagaagattgaagatatacaataacgctgtggcctctgtctttggtagcatgacaaatagagattatactcaaaagcgcatagacaagaagttggacgaattgcttaatatggtggaaaacgacatatctgtggtcaacctcaattgctccaaacacgggccttactctgttttcagggccaatccggctgcagttacctctgctcttacagatcagttaccgtctccgggtcattctatgtcttctgcagaggaaaccactactgcagcgttatcttctccgccagaagacagcacctctttgatcgatattatccaaggcaaaattttcgggatcttatggtttaattgctacgggaacatgatattgaacagacaagaatacacgacgtggttcatcaataagatgaggaactctttgaccacggaattcatacgcttccttgggaaaataattgacgacccggacatcaatatggccagttgccttttcaaagagtgcatcgctcgttggagttgtgtcgattggcaatccatagctataacaatgcttgtcatcattcatggatatacctgccccaacttgacaaagcttttgagagtgtggtttctccagcaaaagttgttgagattttccatgtatccgttagtcaactttatcataaacaatacacaagatttagacgtcttgtaccattgtaatggattgttggggaatgccgacttattcgaggatccctaccaggacgagcttacgagtgagttacatgtcttggtcacggagcgcttagtgaatagttggaaagatacaatattgcaacaactttgctcttgtcaagataccacactttcctgttcccaattaagatactggcagttacaattgaagtgtaatcaacaattttacaaggatgtatatgccatgcaggactga

SEQ ID NO: 879 - DNA, 1467 bp, Saccharomyces cerevisiae
atggctgaaactgaaagactaatgcctaacggtggttcccgcgaaacaaaaccgttaattacgggccatttaatcttgggcacgatagttgcttgtttggggtcgatccagtacggataccacatcgcagagttgaatgcgcctcaagaattcttatcgtgctccagatttgaggcaccagacgaaaacatctcatacgatgacacttgggttgggcaacacggactcaagcaatgcattgcgttaaccgattctcaatacggcgcaattacgtctatattcagcataggcggactgtttgggtcgtactacgccggtaactgggccaaccgatacggaagaaagtacgtgagcatgggcgcctcggccatgtgcatggtttcttctctgctgcttttcttttccaactcctacttgcagttgctatttggcaggttcctggtaggcatgtcctgcggcaccgccattgtgatcacacccttatttatcaacgagattgcccccgtggagtggagaggcgctatgggatctatgaatcaggtttctatcaatctaggtatcctgctgacccaaaccttggcactcaagtacgcagactcctataactggaggtggcttctcttttccggatccgtgattgcggtagcgaatattttagcttggctcaaagtggacgaatctccaaggtggctggtgagccacggattcgtctcggaagctgaaactgctctgttcaagttgcgtccaggaacgtaccaacaagcgaagcaagaaattcaggattggcagcgtagccatgggcacaaccgcgacccggagtcaagcgaagagactcattcaggacccacactatggcaatatgttaccgatccctcatacaagaaaccgcgcacagttatactcgccatcttgtcgtgccagcaattttgcggcatcaactctattatcttctacggtgtaaaagtgatcggcaagattctaccggactactcgattcaggtaaattttgccatttccatcctcaatgtcgttgtcactctagcagcatctgcgatcatcgaccacgtcgggcgccgtccattattgcttgcctcgactacggtgatgaccgccatgtcgctgctgatcagtgtaggtctcaccttgagcgtatcctttttactggtcacggccacttttgtctatattgccgcattcgccatcggtctgggacccatccccttcttgatcattggtgagctatcctacccgcaggatgccgctacagctcaaagttttggtactgtgtgcaactggcttgccaccttcatcgtcggatacctcttcccgataggccacggcctcatgggcggctacgtatttgcgatcttcgccgccatcgctgccatgtttgctacatatgtgtacaagcgtgtacccgagacaaagggcaagactacatacagcgaggtttgggctggctactga

SEQ ID NO: 880 - DNA, 1467 bp, Artificial Sequence
  Description of Artificial Sequence: Synthetic polynucleotide
atggctgaaactgaaagattaatgcctaacggtggttcccgcgaaacaaaaccgttaattacgggccatttaatcttgggcacgatagttgcttgtttggggtctatccagtacggataccacatcgcagagttgaatgcgcctcaagaattcttaagttgctccagatttgaggcaccagacgaaaacatctcctacgatgacacttgggttgggcaacacggactcaagcaatgcattgcgttaaccgattctcaatacggcgcaattacgtctatattcagcataggcggattatttgggtcttactacgccggtaactgggccaacagatacggaagaaagtacgtgagcatgggcgcctctgccatgtgcatggtttcttctttattacttttcttttccaactcctacttgcagttgttatttggcaggttcttagtaggcatgtcctgcggcaccgccattgtgatcacacccttatttatcaacgagattgcccccgtggagtggagaggcgctatgggatctatgaatcaggtttctatcaatttgggtatcttattaacccaaaccttggcactcaagtacgcagactcctataactggaggtggcttctcttttccggatccgtgattgcggtagcgaatattttagcttggctcaaagtggacgaatctccaaggtggttggtgagccacggattcgtcagtgaagctgaaactgctttattcaagttgcgtccaggaacgtaccaacaagcgaagcaagaaattcaggattggcagcgtagccatgggcacaaccgcgacccggagagcagcgaagagactcattctggacccacattatggcaatatgttaccgatccctcttacaagaaaccgcgcacagttatactcgccatcttgtcttgccagcaattttgcggcatcaactctattatcttctacggtgtaaaagtgatcggcaagattttaccggactactctattcaggtaaattttgccatttccatcctcaatgtcgttgtcactttggcagcatctgcgatcatcgaccacgtcgggcgccgtccattattgcttgcctctactacggtgatgaccgccatgtctttattgatcagtgtaggtctcaccttgagcgtatcctttttattggtcacggccacttttgtctatattgccgcattcgccatcggtttgggacccatccccttcttgatcattggtgagctttcctacccgcaggatgccgctacagctcaaagttttggtactgtgtgcaactggcttgccaccttcatcgtcggatacctcttcccgataggccacggcctcatgggcggctacgtatttgcgatcttcgccgccatcgctgccatgtttgctacatatgtgtacaagcgtgtacccgagacaaagggcaagactacatacagcgaggtttgggctggctactga

SEQ ID NO: 881 - DNA, 717 bp, Saccharomyces cerevisiae
atgacagcaacgatcacaaataagaaatcatgctctggttctgttgaggcaggaaagacacgtttaacaactgaatggaagcctgaaagccaagtaccccaatatgttaaaaatgagctctctaaaccccatccaaactatatcctggcgtttttgaacgtggtacagcaattaaaaattcagagaagaaccggttatcttgacctcggtattaaagaatgtgaaagcatatcagatcacatgtacagattgagcataatcaccatgctgatcaaggattcgcgggttaaccgcgataaatgtgtccggatcgcattggtgcacgatatcgccgaatctttagttggcgatattactccagttgaccctattgggaaggaagaaaagcatcgtcgggaatgggaaaccataaaatatctatgtaatgctctgatcaagccatacaatgagatcgcggcaaaggaaattatggacgattggttggcttatgaaaatgtcacctcattggaagctagatacgtgaaagatatcgataaatatgaaatgcttgtacaatgttttgagtacgagagggaatacaaaggaacgaaaaacttcgatgatttctttggggctgtagctagcataaaaacagacgaagtaaagggctggacaagtgaccttgtcgtgcagcgccaaaaatacttcgccgatttgactcaatcgataactaaataa

SEQ ID NO: 882 - DNA, 717 bp, Artificial Sequence
  Description of Artificial Sequence: Synthetic polynucleotide
atgacagcaacgatcacaaataagaaaagttgctctggttctgttgaggcaggaaagacacgtttaacaactgaatggaagcctgaaagccaagtaccccaatatgttaaaaatgagctctctaaaccccatccaaactatatcttagcgtttttgaacgtggtacagcaattaaaaattcagagaagaaccggttatcttgacctcggtattaaagaatgtgaaagcatatctgatcacatgtacagattgagcataatcaccatgttgatcaaggattctagagttaaccgcgataaatgtgtcagaatcgcattggtgcacgatatcgccgaatctttagttggcgatattactccagttgaccctattgggaaggaagaaaagcatcgtagagaatgggaaaccataaaatatttatgtaatgctttgatcaagccatacaatgagatcgcggcaaaggaaattatggacgattggttggcttatgaaaatgtcacctctttggaagctagatacgtgaaagatatcgataaatatgaaatgcttgtacaatgttttgagtacgagagggaatacaaaggaacgaaaaacttcgatgatttctttggggctgtagctagcataaaaacagacgaagtaaagggctggacaagtgaccttgtcgtgcagcgccaaaaatacttcgccgatttgactcaaagtataactaaatga

SEQ ID NO: 883 - DNA, 1347 bp, Saccharomyces cerevisiae
atgttgcgacttttttcactggcacttatcacatgcttaatctactattccaaaaatcagggcccatctgctcttgttgcggccgtgggatttggtatagcaggctatttagctacagatatgttgattccacgtgtgggcaaatccttcatcaaaataggcctattcggtaaggacttgagtaaacctggccgtccggtgcttccagaaacaataggtgctatccctgctgcagtttatttatttgtaatgttcatttacattcccttcattttctacaagtatatggtcataaccacttcaggtgggggccatcgcgatgtctcagtggttgaagataacggtatgaattctaatatttttcctcatgataaactatctgaatatttgagcgctatcctatgcttggaaagtacggtcctcttgggtatcgctgatgatttatttgatttacgttggagacataagtttttcttgcctgccattgcagccatcccactgctaatggtttattatgtggattttggagttacgcatgtacttattcccggattcatggaacgctggttgaaaaagactagtgttgatttggggctgtggtattatgtttatatggcatcgatggcaattttttgccccaactccatcaacatcctggcaggtgttaatggtttagaggttggccaatgtatagtgttggccatcttagcgctattgaacgatttgctgtacttctcgatggggccattagccacaagagactcccataggttttccgctgttttgattatcccatttttgggtgtatccttggcgctatggaaatggaatcgttggcccgccacagtgtttgtgggagatacatattgttatttcgctggaatggtattcgcagtcgttggtatactgggtcatttttcaaagacgatgcttttgctattcattcctcaaatcgttaattttatttattcatgtcctcagctattcaaattggtcccctgcccgagacataggttacctaaatttaatgaaaaagacggtttaatgtatccatcaagagcaaacttaaaagaagaaccgccaaagagcatttttaaaccgatcttgaagttactatactgtctccatttgattgacctggaatttgatgaaaataatgagattattagcacctctaatatgacgttaataaacttgacattagtatggtttggccctatgagggaagacaaattgtgcaatacaatcttgaagttgcaattctgcattggaattttggctttacttggaagacacgctataggcgctatcatctttggccacgacaacctatggacagtacgttga

SEQ ID NO: 884 - DNA, 1347 bp, Artificial Sequence
  Description of Artificial Sequence: Synthetic polynucleotide
atgttgagacttttttctttggcacttatcacatgcttaatctactattccaaaaatcagggcccatctgctcttgttgcggccgtgggatttggtatagcaggctatttagctacagatatgttgattccacgtgtgggcaaatccttcatcaaaataggccttttcggtaaggacttgagtaaacctggccgtccggtgcttccagaaacaataggtgctatccctgctgcagtttatttatttgtaatgttcatttacattcccttcattttctacaagtatatggtcataaccacttctggtgggggccatcgcgatgtctctgtggttgaagataacggtatgaattctaatatttttcctcatgataaattatctgaatatttgagcgctatcctttgcttggaaagtacggtcctcttgggtatcgctgatgatttatttgatttacgttggagacataagtttttcttgcctgccattgcagccatcccattgttgatggtttattatgtggattttggagttacgcatgtacttattcccggattcatggaacgctggttgaaaaagactagtgttgatttggggttgtggtattatgtttatatggcatctatggcaattttttgccccaactccatcaacatcttggcaggtgttaatggtttagaggttggccaatgtatagtgttggccatcttagcgttattgaacgatttgttgtacttctccatggggccattagccacaagagactcccataggttttccgctgttttgattatcccatttttgggtgtatccttggcgctttggaaatggaatcgttggcccgccacagtgtttgtgggagatacatattgttatttcgctggaatggtattcgcagtcgttggtatattaggtcatttttccaagacgatgcttttgttattcattcctcaaatcgttaattttatttattcttgtcctcagttattcaaattggtcccctgcccgagacataggttacctaaatttaatgaaaaagacggtttaatgtatccatctagagcaaacttaaaagaagaaccgccaaagagcatttttaaaccgatcttgaagttattgtactgtctccatttgattgacttggaatttgatgaaaataatgagattattagcacctctaatatgacgttaataaacttgacattagtatggtttggccctatgagggaagacaaattgtgcaatacaatcttgaagttgcaattctgcattggaattttggctttacttggaagacacgctataggcgctatcatctttggccacgacaacctttggacagtacgttga

SEQ ID NO: 885 - DNA, 489 bp, Saccharomyces cerevisiae
atgaccacatctttttatgatttagaatgcaaggacaagaaaggcgaatcttttaagtttgaccaactgaaaggcaaagtagttctcatagttaatgttgcctccaagtgcggcttcacgccgcagtataaagaattggaagaactatacaaaaaatatcaagataaggggtttgttattttggggttcccatgtaatcagttcgggaagcaggaaccgggctctgatgaacaaattacggaattttgccagttgaattatggcgttacattcccaattatgaagaagattgatgttaacggaagtaatgctgactctgtctataattatttgaaaagccaaaaagcaggtttactaggtttcaagggtatcaaatggaattttgaaaagttcttagttgattccaatggtaaggttgtccaaagattttcctccttaacaaaaccatcgtccttggaccaagaaatccaaagcctgttaagtaaatga

SEQ ID NO: 886 - DNA, 489 bp, Artificial Sequence
  Description of Artificial Sequence: Synthetic polynucleotide
atgaccacatctttttatgatttagaatgcaaggacaagaaaggcgaatcttttaagtttgaccaattgaaaggcaaagtagttctcatagttaatgttgcctccaagtgcggcttcacgccgcagtataaagaattggaagaattatacaaaaaatatcaagataaggggtttgttattttggggttcccatgtaatcagttcgggaagcaggaaccgggctctgatgaacaaattacggaattttgccagttgaattatggcgttacattcccaattatgaagaagattgatgttaacggaagtaatgctgactctgtctataattatttgaaaagccaaaaagcaggtttattgggtttcaagggtatcaaatggaattttgaaaagttcttagttgattccaatggtaaggttgtccaaagattttcctccttaacaaaaccatcttccttggaccaagaaatccaaagcttattaagtaaatga

SEQ ID NO: 887 - DNA, 3390 bp, Saccharomyces cerevisiae
atggcctatatgttagctattgcaaattttcactttttcaagttctatactagaatgagaaaaaaacacgaaaacaattcttgcaatgaaaaggacaaagatgagaacctattcaaaattattctcgccatatttttgcaagaaaaaaaaaaatacgattgtatttcatctggttcaattatgactgcttcagaagagtacttggagaatttaaaaccgttccaggtcggtctccctccacatgatcctgaatcgaataaaaaacgttacctgctgaaggatgctaatggtaaaaagtttgatctggaaggcactacaaaaagatttgaacatctgctatccttgagtggtttattcaagcattttattgaaagtaaagccgctaaagatcccaaattcaggcaggtcttagatgtattagaagaaaataaagcaaatggcaaaggcaaaggcaaacaccaagatgttcgtagacgaaagactgaacacgaagaagatgcggaattattgaaagaagaagactcggatgatgatgagagcattgaattccaattcagagaatcacctgcttacgttaatggtcaattgagaccttatcaaatccaaggtgtcaactggttggtgtctctgcataagaacaaaatagcgggtatccttgctgatgaaatgggtttaggtaagaccctgcaaactatttcatttctgggatatcttaggtacattgaaaaaattccaggtccatttttagtcattgcgcctaagtctaccttaaataattggctgagagaaataaatagatggacgccagacgtaaacgcctttattttgcaaggagataaagaagaaagagctgaactgatccaaaaaaaacttttaggttgtgactttgatgttgtgattgcttcttatgaaattattataagagaaaagtcgccccttaagaagattaactgggagtatattatcattgatgaggctcacagaatcaagaatgaagagtcaatgctttcgcaagtcttaagggaatttacctcacgtaataggctgttgattactggtactcctttgcaaaacaatttgcatgaactatgggcgttattaaattttttgttaccagatatcttttccgatgcacaagatttcgacgattggttttcttctgaaagcacagaggaagatcaggataaaattgtcaagcaactccacactgttttacagccttttctactacgtcgtatcaaaagcgatgtggaaacatccttactgcctaaaaaggaactgaatttatatgtcggtatgtctagcatgcagaagaaatggtacaaaaagattttggaaaaggatctggacgctgtgaacgggtctaatggcagcaaggaatccaaaacaagacttttaaatatcatgatgcaacttagaaaatgttgtaatcatccatatttattcgatggtgctgagccaggtccaccgtacactacggatgagcacttggtttataacgctgccaaacttcaagttttggataagttattgaagaaattgaaggaagaaggttctagagttctgattttcagtcaaatgtcaagattattggatattctcgaggattattgctacttcagaaactatgaatattgcaggatcgacggttccaccgctcacgaagatagaattcaagccattgatgattataatgctcctgattctaagaagtttgttttcttattaacgacacgtgcaggtgggttaggtatcaatttaacgtcagcagatgtcgttgtcttgtatgattcagattggaacccacaagcagatttacaagcaatggatagagcgcatcgtattggtcagaagaagcaggtcaaggtattccgtttggtcacagataactccgtggaagagaaaattttagaaagggctacccagaagttaagattagatcaattagttatccagcaaaacaggacttctttgaaaaagaaggaaaataaagcagattccaaagatgctttattatccatgattcaacatggtgccgccgatgtattcaaaagtggtacatctaccggttcagctggtacgccggaacctggttcaggagaaaaaggagatgatattgatctggacgaacttttactgaaatcagaaaacaaaactaagtcattaaatgcaaaatatgaaactttaggtcttgatgatttgcaaaaattcaaccaagattcggcctatgaatggaatggtcaagatttcaagaagaaaatacaaagggatattataagtccgctactgctcaaccccaccaaacgtgaacgtaaggaaaattactctattgataattattataaagatgttttgaatacaggaaggtcctcgaccccatcacaccccagaatgcctaagcctcatgtcttccattcccatcaattacaacctccccaattgaaagtcctgtacgaaaaggaaagaatgtggacggcgaagaagactggttatgtaccgaccatggatgacgtaaaagcagcatatggcgatatttcagatgaagaagaaaagaaacaaaaattggaattgttaaaattgtcggttaacaactcgcaaccattaactgaagaggaagaaaagatgaaggctgattgggagtctgaaggatttacaaattggaataaattagaatttagaaaattcatcacggtatctggtaaatacggtaggaactccattcaagccattgcgagagaattggcccctggcaaaacactagaggaagttcgcgcatatgctaaggccttctggtctaacattgaaagaattgaagattatgagaaatatctgaaaataattgagaatgaagaagagaagatcaagcgtgtcaaaatgcaacaagaggctttacgtcggaagttgtctgagtataagaatccattcttcgatttgaaattaaaacatcctccttcttctaacaacaaaaggacgtactctgaagaagaagatcgttttatccttctcatgttattcaagtatggcttggatagagatgacgtatacgaattagtgcgtgatgaaattagagattgtcccctattcgaattagacttttacttcagaagcaggacacctgtagagctagccagaagaggaaatacattactgcaatgcttggaaaaggaatttaacgcagggattgtattggatgacgccactaaagatagaatgaagaaagaagatgaaaatggtaaaaggataagggaagaatttgcagatcagaccgctaatgagaaggagaacgttgatggagtagagagcaaaaaagcgaagattgaggatacgtcgaatgttggaactgaacagttggtagcagagaaaattccggaaaacgaaaccactcattaa

SEQ ID NO: 888 - DNA, 3390 bp, Artificial Sequence
  Description of Artificial Sequence: Synthetic polynucleotide
atggcctatatgttagctattgcaaattttcactttttcaagttctatactagaatgagaaaaaaacacgaaaacaattcttgcaatgaaaaggacaaagatgagaacttgttcaaaattattctcgccatatttttgcaagaaaaaaaaaaatacgattgtatttcttctggttccattatgactgcttctgaagagtacttggagaatttaaaaccgttccaggtcggtctccctccacatgatcctgaaagtaataaaaaacgttacttgttgaaggatgctaatggtaaaaagtttgatttggaaggcactacaaaaagatttgaacatttattatccttgagtggtttattcaagcattttattgaaagtaaagccgctaaagatcccaaattcaggcaggtcttagatgtattagaagaaaataaagcaaatggcaaaggcaaaggcaaacaccaagatgttcgtagaagaaagactgaacacgaagaagatgcggaattattgaaagaagaagacagtgatgatgatgagagcattgaattccaattcagagaatctcctgcttacgttaatggtcaattgagaccttatcaaatccaaggtgtcaactggttggtgtctttgcataagaacaaaatagcgggtatccttgctgatgaaatgggtttaggtaagaccttacaaactatttcctttttgggatatcttaggtacattgaaaaaattccaggtccatttttagtcattgcgcctaagtctaccttaaataattggttgagagaaataaatagatggacgccagacgtaaacgcctttattttgcaaggagataaagaagaaagagctgaattgatccaaaaaaaacttttaggttgtgactttgatgttgtgattgcttcttatgaaattattataagagaaaagtctccccttaagaagattaactgggagtatattatcattgatgaggctcacagaatcaagaatgaagagtccatgctttctcaagtcttaagggaatttacctctcgtaataggttattgattactggtactcctttgcaaaacaatttgcatgaattatgggcgttattaaattttttgttaccagatatcttttccgatgcacaagatttcgacgattggttttcttctgaaagcacagaggaagatcaggataaaattgtcaagcaactccacactgttttacagccttttttattacgtcgtatcaaaagcgatgtggaaacatccttattgcctaaaaaggaattgaatttatatgtcggtatgtctagcatgcagaagaaatggtacaaaaagattttggaaaaggatttggacgctgtgaacgggtctaatggcagcaaggaatccaaaacaagacttttaaatatcatgatgcaacttagaaaatgttgtaatcatccatatttattcgatggtgctgagccaggtccaccgtacactacggatgagcacttggtttataacgctgccaaacttcaagttttggataagttattgaagaaattgaaggaagaaggttctagagttttgattttcagtcaaatgagtagattattggatattctcgaggattattgctacttcagaaactatgaatattgcaggatcgacggttccaccgctcacgaagatagaattcaagccattgatgattataatgctcctgattctaagaagtttgttttcttattaacgacacgtgcaggtgggttaggtatcaatttaacgtctgcagatgtcgttgtcttgtatgattctgattggaacccacaagcagatttacaagcaatggatagagcgcatcgtattggtcagaagaagcaggtcaaggtattccgtttggtcacagataactccgtggaagagaaaattttagaaagggctacccagaagttaagattagatcaattagttatccagcaaaacaggacttctttgaaaaagaaggaaaataaagcagattccaaagatgctttattatccatgattcaacatggtgccgccgatgtattcaaaagtggtacatctaccggttctgctggtacgccggaacctggttctggagaaaaaggagatgatattgatttggacgaacttttattgaaaagtgaaaacaaaactaagtctttaaatgcaaaatatgaaactttaggtcttgatgatttgcaaaaattcaaccaagattctgcctatgaatggaatggtcaagatttcaagaagaaaatacaaagggatattataagtccgttacttctcaaccccaccaaacgtgaacgtaaggaaaattactctattgataattattataaagatgttttgaatacaggaaggtcctccaccccatctcaccccagaatgcctaagcctcatgtcttccattcccatcaattacaacctccccaattgaaagtcttgtacgaaaaggaaagaatgtggacggcgaagaagactggttatgtaccgaccatggatgacgtaaaagcagcatatggcgatatttctgatgaagaagaaaagaaacaaaaattggaattgttaaaattgagtgttaacaactctcaaccattaactgaagaggaagaaaagatgaaggctgattgggagtctgaaggatttacaaattggaataaattagaatttagaaaattcatcacggtatctggtaaatacggtaggaactccattcaagccattgcgagagaattggcccctggcaaaacattagaggaagttcgcgcatatgctaaggccttctggtctaacattgaaagaattgaagattatgagaaatatttgaaaataattgagaatgaagaagagaagatcaagcgtgtcaaaatgcaacaagaggctttacgtagaaagttgtctgagtataagaatccattcttcgatttgaaattaaaacatcctccttcttctaacaacaaaaggacgtactctgaagaagaagatcgttttatccttctcatgttattcaagtatggcttggatagagatgacgtatacgaattagtgcgtgatgaaattagagattgtccccttttcgaattagacttttacttcagaagcaggacacctgtagagttggccagaagaggaaatacattattacaatgcttggaaaaggaatttaacgcagggattgtattggatgacgccactaaagatagaatgaagaaagaagatgaaaatggtaaaaggataagggaagaatttgcagatcagaccgctaatgagaaggagaacgttgatggagtagagagcaaaaaagcgaagattgaggatacgtccaatgttggaactgaacagttggtagcagagaaaattccggaaaacgaaaccactcattga

SEQ ID NO: 889 - DNA, 1164 bp, Saccharomyces cerevisiae
atggactctattcaagaatcagatgtactaaatgcagtgaaaacaaaactaccgccgtgttgtttgagaatattcaggaataagatcatccttgttgggacgtatgatttagataagtcaactggatacaggtcaggctcactggatgtcttcacaatggacctcaaacttttatgttcgaataatacgtatggcgcaatcctagatttgaagttatccccctttgatgatacattgatatgcacggcccattcgacaggtaatatcatgctatggaggatacggtgcacagataaggatgatttccaatcaaacgaactagatattcatgcaattgcaaatctacaactctttgaaaaagatgttctcattgcctcgtgccatttttccccacttgattgtaagaaattacttgtaacaaatacggcaggcgaagcagctaccattgatataagaacactatctgtacagttcacggcatcagcaatcgcgcaggcttactcaaaactagataaaatagattacgaagttcaaggtgcaaccgaaaaagtcattcatgttgaatcgggacaatttttgaaaccccatgaactcgagtgttggactgcggaatttggatctctacagccttttcaagacgttgtatttacaggaggtgatgattcgagaattatggcccacgacttacgttccaaagaattcatttggagtaataatcgtattcatgatgctggtgttgttagcattaagtgtagtcaacctaactttcgaaataataaacccacgtccataataactggatcctatgatgataacattcgttctctggatttaaggatgatgggtgagtccatatttcctggtgcaaatgtccccacagttaataaattggcgtgtgatcttggtggcggtgtttggagatttgttgaatcccccattgatcaggaacaatctcaccacaacggctccgatcggcttttagtttgttgcatgtacaatggtgccaaggtggtgaccatgaatgataattccgatgagtattttcaaattcaacattatctgaagaagggccatgattcgatgtgttacggtggcgactggtcaaattctttgatcgcaacatgctcattttatgataattccttgcaaacatggatagtttag

SEQ ID NO: 890 - DNA, 1164 bp, Artificial Sequence
  Description of Artificial Sequence: Synthetic polynucleotide
atggactctattcaagaaagtgatgtattgaatgcagtgaaaacaaaattaccgccgtgttgtttgagaatattcaggaataagatcatccttgttgggacgtatgatttagataagtctactggatacaggagtggctctttagatgtcttcacaatggacctcaaacttttatgttctaataatacgtatggcgcaatcttagatttgaagttatccccctttgatgatacattgatatgcacggcccattctacaggtaatatcatgttatggaggataagatgcacagataaggatgatttccaaagtaacgaattagatattcatgcaattgcaaatttacaactctttgaaaaagatgttctcattgccagttgccatttttccccacttgattgtaagaaattacttgtaacaaatacggcaggcgaagcagctaccattgatataagaacattatctgtacagttcacggcatctgcaatcgcgcaggcttactctaaattggataaaatagattacgaagttcaaggtgcaaccgaaaaagtcattcatgttgaatctggacaatttttgaaaccccatgaactcgagtgttggactgcggaatttggatctttgcagccttttcaagacgttgtatttacaggaggtgatgattccagaattatggcccacgacttacgttccaaagaattcatttggagtaataatcgtattcatgatgctggtgttgttagcattaagtgtagtcaacctaactttagaaataataaacccacgtccataataactggatcctatgatgataacattcgttctttagatttaaggatgatgggtgagtccatatttcctggtgcaaatgtccccacagttaataaattggcgtgtgatcttggtggcggtgtttggagatttgttgaatcccccattgatcaggaacaatctcaccacaacggctccgatagacttttagtttgttgcatgtacaatggtgccaaggtggtgaccatgaatgataattccgatgagtattttcaaattcaacattatttgaagaagggccatgattctatgtgttacggtggcgactggtctaattctttgatcgcaacatgctctttttatgataattccttgcaaacatggatagtttga

SEQ ID NO: 891 - DNA, 1452 bp, Saccharomyces cerevisiae
atggccagagcatcctctactaaagccagaaaacagaggcatgatccacttttaaaggatttagatgcagctcaaggtaccttgaaaaaaatcaataaaaagaagctagcgcagaacgatgctgcaaatcacgatgctgcaaatgaggaagatggatacatagactccaaagcatcaagaaaaattttgcagttggccaaggaacaacaggatgaaattgaaggtgaggaacttgctgaatcagaaagaaacaagcaatttgaagccagattcaccaccatgagctatgatgatgaagacgaagacgaagacgaagacgaagaagcttttggagaagacatctccgattttgaacccgaaggtgattataaagaagaggaagagatagttgaaatcgatgaagaagacgcagcgatgtttgagcaatatttcaagaaatcagatgattttaactctttaagtggtagctataatcttgcagacaagattatggcctctatccgagaaaaggaaagtcaagttgaagatatgcaagatgatgaaccacttgctaatgaacagaatacctcaagaggcaatatttcatccggtttgaagagtggagagggtgttgcacttccagagaaggtcatcaaagcatatactacggtaggtagtattttaaaaacttggacgcacggtaagttgccaaagttgttcaaggttatcccatccttaagaaattggcaagatgtcatttatgtgaccaacccggaagaatggtcaccacacgttgtttacgaagcaacgaaattatttgtatccaacctaactgctaaagaatctcaaaaatttattaacctaattttacttgaacgtttccgtgacaatatcgagaccagtgaagaccactctttaaactatcatatataccgtgcggtgaaaaaatcgctttataaaccaagtgccttcttcaaaggtttcctattcccattggttgaaacagggtgtaatgtacgtgaagcgacaattgcaggaagtgtgcttgctaaagtctctgttccggctttacattcttcagctgccttgagttatcttttaaggctacctttctctccacctacaactgtttttatcaaaatattgctcgataaaaaatatgctttaccgtaccagacggtggacgactgcgtgtattactttatgaggtttagaattttggatgacggtagtaatggggaagatgctacaagagtactcccagtgatatggcacaaggctttcttaacatttgcacaacgttacaagaacgatattacccaggatcagagagatttcttgttggaaactgttcgtcaaagaggccataaagatatcggtcctgagattagaagagaactattggcaggagccagcagggagtttgttgatccacaggaagctaatgatgatttaatgattgatgtcaattga

SEQ ID NO: 892 - DNA, 1452 bp, Artificial Sequence
  Description of Artificial Sequence: Synthetic polynucleotide
atggccagagcatcctctactaaagccagaaaacagaggcatgatccacttttaaaggatttagatgcagctcaaggtaccttgaaaaaaatcaataaaaagaagttggcgcagaacgatgctgcaaatcacgatgctgcaaatgaggaagatggatacatagactccaaagcatctagaaaaattttgcagttggccaaggaacaacaggatgaaattgaaggtgaggaacttgctgaaagtgaaagaaacaagcaatttgaagccagattcaccaccatgagctatgatgatgaagacgaagacgaagacgaagacgaagaagcttttggagaagacatctccgattttgaacccgaaggtgattataaagaagaggaagagatagttgaaatcgatgaagaagacgcagcgatgtttgagcaatatttcaagaaatctgatgattttaactctttaagtggtagctataatcttgcagacaagattatggcctctatcagagaaaaggaaagtcaagttgaagatatgcaagatgatgaaccacttgctaatgaacagaatacctccagaggcaatatttcttccggtttgaagagtggagagggtgttgcacttccagagaaggtcatcaaagcatatactacggtaggtagtattttaaaaacttggacgcacggtaagttgccaaagttgttcaaggttatcccatccttaagaaattggcaagatgtcatttatgtgaccaacccggaagaatggtctccacacgttgtttacgaagcaacgaaattatttgtatccaacttgactgctaaagaatctcaaaaatttattaacttgattttacttgaacgtttccgtgacaatatcgagaccagtgaagaccactctttaaactatcatatataccgtgcggtgaaaaaatctctttataaaccaagtgccttcttcaaaggtttccttttcccattggttgaaacagggtgtaatgtacgtgaagcgacaattgcaggaagtgtgcttgctaaagtctctgttccggctttacattcttctgctgccttgagttatcttttaaggttgcctttctctccacctacaactgtttttatcaaaatattgctcgataaaaaatatgctttaccgtaccagacggtggacgactgcgtgtattactttatgaggtttagaattttggatgacggtagtaatggggaagatgctacaagagtactcccagtgatatggcacaaggctttcttaacatttgcacaacgttacaagaacgatattacccaggatcagagagatttcttgttggaaactgttcgtcaaagaggccataaagatatcggtcctgagattagaagagaattattggcaggagccagcagggagtttgttgatccacaggaagctaatgatgatttaatgattgatgtcaattga

SEQ ID NO: 893 - DNA, 1659 bp, Saccharomyces cerevisiae
atgccggtcgttcacgtgattgacgttgaaagtggtaacctacagtcactaaccaatgcaattgagcatttaggttacgaagtacaactggtgaaatcaccaaaggattttaacatatcaggcacgtcaagattgattttgcctggtgtcggaaattatggccatttcgtcgacaatttatttaatagaggattcgaaaagccgataagagaatacattgaatctggaaaaccaataatgggaatttgcgtcgggctacaagcgctctttgccggttccgtggaaagccctaagagtacgggtctgaactacattgattttaagttgtccaggttcgatgattcagaaaagccagtaccagaaataggttggaattcttgcattccctcggaaaacctattctttggattggatccatacaagaggtactatttcgtccattcttttgctgccattctgaattcagaaaagaaaaaaaacctagaaaatgacggttggaaaattgcaaaagctaagtacggttcagaggaatttattgcggcagtcaacaagaataatatattcgctactcagttccatcctgaaaaatcaggtaaagctggtttgaacgtcattgagaattttttgaagcaacaaagtcctccgattccaaactatagtgcggaagagaaggaactcttaatgaatgactattcaaattatggtctaacacgcagaattattgcttgtcttgatgtacgtactaatgaccaaggtgatttggtggttactaaaggtgatcaatacgatgtacgtgaaaaaagtgatggtaaaggtgttagaaaccttggtaagcctgttcagttggcacagaaatattaccaacagggtgcggatgaagtaacatttttgaatataacttcttttagagattgtcctttgaaggatactccgatgctagaggttctgaaacaagccgcaaagacagtctttgttccattgacagtcggtggggggatcaaggatattgtcgatgttgatggaaccaaaatacctgctttagaagttgcaagtctatacttcagatctggtgctgataaagtatcgatcggtacggatgcagtctatgcagccgaaaaatactacgagttgggtaacagaggagatggaacgtcaccaatagagacaatctcgaaagcatacggtgctcaggcagttgttatttctgtcgaccctaagagagtatatgtaaattcacaagcagatacgaagaacaaagtcttcgagacagaatatccgggccccaatggagagaaatactgctggtaccaatgtacaatcaaaggtggaagagaatctagagaccttggtgtgtgggaattaacaagggcatgtgaagctctaggtgctggggagattttattgaactgcatagacaaggatggctctaattctggttatgatctggaattgatagaacatgttaaagatgcggtcaagattcccgtcattgcatccagtggcgccggtgtacccgaacatttcgaagaggccttcctaaagacccgcgcagatgcttgcttgggtgcaggtatgttccacagaggtgaattcactgttaacgatgtaaaggagtatttactagagcacggattaaaggttagaatggatgaagagtaa

SEQ ID NO: 894 - DNA, 1659 bp, Artificial Sequence
  Description of Artificial Sequence: Synthetic polynucleotide
atgccggtcgttcacgtgattgacgttgaaagtggtaacttacagtccttgaccaatgcaattgagcatttaggttacgaagtacaattagtgaaatctccaaaggattttaacatatctggcacgtccagattgattttgcctggtgtcggaaattatggccatttcgtcgacaatttatttaatagaggattcgaaaagccgataagagaatacattgaatctggaaaaccaataatgggaatttgcgtcgggttgcaagcgctctttgccggttccgtggaaagccctaagagtacgggtttgaactacattgattttaagttgtccaggttcgatgattctgaaaagccagtaccagaaataggttggaattcttgcattcccagtgaaaacttgttctttggattggatccatacaagaggtactatttcgtccattcttttgctgccattttgaattctgaaaagaaaaaaaacttggaaaatgacggttggaaaattgcaaaagctaagtacggttctgaggaatttattgcggcagtcaacaagaataatatattcgctactcagttccatcctgaaaaatctggtaaagctggtttgaacgtcattgagaattttttgaagcaacaaagtcctccgattccaaactatagtgcggaagagaaggaactcttaatgaatgactattctaattatggtttaacacgcagaattattgcttgtcttgatgtacgtactaatgaccaaggtgatttggtggttactaaaggtgatcaatacgatgtacgtgaaaaaagtgatggtaaaggtgttagaaaccttggtaagcctgttcagttggcacagaaatattaccaacagggtgcggatgaagtaacatttttgaatataacttcttttagagattgtcctttgaaggatactccgatgttagaggttttgaaacaagccgcaaagacagtctttgttccattgacagtcggtggggggatcaaggatattgtcgatgttgatggaaccaaaatacctgctttagaagttgcaagtttatacttcagatctggtgctgataaagtatctatcggtacggatgcagtctatgcagccgaaaaatactacgagttgggtaacagaggagatggaacgtctccaatagagacaatctccaaagcatacggtgctcaggcagttgttatttctgtcgaccctaagagagtatatgtaaattctcaagcagatacgaagaacaaagtcttcgagacagaatatccgggccccaatggagagaaatactgctggtaccaatgtacaatcaaaggtggaagagaatctagagaccttggtgtgtgggaattaacaagggcatgtgaagctttgggtgctggggagattttattgaactgcatagacaaggatggctctaattctggttatgatttggaattgatagaacatgttaaagatgcggtcaagattcccgtcattgcatccagtggcgccggtgtacccgaacatttcgaagaggccttcttgaagacccgcgcagatgcttgcttgggtgcaggtatgttccacagaggtgaattcactgttaacgatgtaaaggagtatttattggagcacggattaaaggttagaatggatgaagagtga

SEQ ID NO: 895 - DNA, 1113 bp, Saccharomyces cerevisiae
atgagtgaatctccaatgttcgctgccaacggcatgccaaaggtaaatcaaggtgctgaagaagatgtcagaattttaggttacgacccattagcttctccagctctccttcaagtgcaaatcccagccacaccaacttctttggaaactgccaagagaggtagaagagaagctatagatattattaccggtaaagacgacagagttcttgtcattgtcggtccttgttccatccatgatctagaagccgctcaagaatacgctttgagattaaagaaattgtcagatgaattaaaaggtgatttatccatcattatgagagcatacttggagaagccaagaacaaccgtcggctggaaaggtctaattaatgaccctgatgttaacaacactttcaacatcaacaagggtttgcaatccgctagacaattgtttgtcaacttgacaaatatcggtttgccaattggttctgaaatgcttgataccatttctcctcaatacttggctgatttggtctccttcggtgccattggtgccagaaccaccgaatctcaactgcacagagaattggcctccggtttgtctttcccagttggtttcaagaacggtaccgatggtaccttaaatgttgctgtggatgcttgtcaagccgctgctcattctcaccatttcatgggtgttactaagcatggtgttgctgctatcaccactactaagggtaacgaacactgcttcgttattctaagaggtggtaaaaagggtaccaactacgacgctaagtccgttgcagaagctaaggctcaattgcctgccggttccaacggtctaatgattgactactctcacggtaactccaataaggatttcagaaaccaaccaaaggtcaatgacgttgtttgtgagcaaatcgctaacggtgaaaacgccattaccggtgtcatgattgaatcaaacatcaacgaaggtaaccaaggcatcccagccgaaggtaaagccggcttgaaatatggtgtttccatcactgatgcttgtataggttgggaaactactgaagacgtcttgaggaaattggctgctgctgtcagacaaagaagagaagttaacaagaaatag

SEQ ID NO: 896 - DNA, 1113 bp, Artificial Sequence
  Description of Artificial Sequence: Synthetic polynucleotide
atgagtgaatctccaatgttcgctgccaacggcatgccaaaggtaaatcaaggtgctgaagaagatgtcagaattttaggttacgacccattagcttctccagctctccttcaagtgcaaatcccagccacaccaacttctttggaaactgccaagagaggtagaagagaagctatagatattattaccggtaaagacgacagagttcttgtcattgtcggtccttgttccatccatgatttggaagccgctcaagaatacgctttgagattaaagaaattgagtgatgaattaaaaggtgatttatccatcattatgagagcatacttggagaagccaagaacaaccgtcggctggaaaggtttgattaatgaccctgatgttaacaacactttcaacatcaacaagggtttgcaatccgctagacaattgtttgtcaacttgacaaatatcggtttgccaattggttctgaaatgcttgataccatttctcctcaatacttggctgatttggtctccttcggtgccattggtgccagaaccaccgaatctcaattacacagagaattggcctccggtttgtctttcccagttggtttcaagaacggtaccgatggtaccttaaatgttgctgtggatgcttgtcaagccgctgctcattctcaccatttcatgggtgttactaagcatggtgttgctgctatcaccactactaagggtaacgaacactgcttcgttattttaagaggtggtaaaaagggtaccaactacgacgctaagtccgttgcagaagctaaggctcaattgcctgccggttccaacggtttgatgattgactactctcacggtaactccaataaggatttcagaaaccaaccaaaggtcaatgacgttgtttgtgagcaaatcgctaacggtgaaaacgccattaccggtgtcatgattgaatctaacatcaacgaaggtaaccaaggcatcccagccgaaggtaaagccggcttgaaatatggtgtttccatcactgatgcttgtataggttgggaaactactgaagacgtcttgaggaaattggctgctgctgtcagacaaagaagagaagttaacaagaaatga

SEQ ID NO: 897 - DNA, 1572 bp, Saccharomyces cerevisiae
atgttgttttcgtcttcatcttcttcacttaattccgaggtttcacaagtgttctcggaaaatatatctagtagatccactactctgactgaaagttccacacaaagcgagataaggcagcattttggtaatgaagatttcagtggtgaactaccaaaaaaattaattcaactcaagaaattaaaaaatggtggcactacaatcaagaaggctaaggaagaccttgagtattgctatgattcactacggctgtacgaaaatccctatgtaacatcatctgtagataaaaaatgtggttacagcattgaattgtatctagataacaagtacaaaacactaatgttctccgatttacaattgaatgctgactatccgttgtattacgattcctcactggataatatatctacaaatgttgaaagagaaagagccactcctctacaaatcaaaggaaagattaggataaacattgatagagaagaccaggccctcttaatcacttcccattcaatttctttaaaatgtttcacaaaggaatatgcatgctttgtaaattcagaaactagcaaaaactcctatagtgacaaaattatcaaagaacttaatcacacagagttttttgagtcttccacctaccccaaacagcagttgagagtcatacaccactcattaaatgataagaaaattctattgacaaagggcacgtacgattacccattcacttttacccttcaagcaaatactttcccagcaagtttctcttccttctttggcaagacccattttcgaatagaaagcttaacaacaataatgagaataccaagtaaacctaaaaacttactcaaatttttgaagaatgaaagttttacagataagatcattttaacagaagaaattaaagttaaaagagtcctgccttcaacgagtatgcttaagtttgaaacatttcaattaaggtcatacaatactgcaagtgagatcgtagtatcggtcattggaaactccaagttgattgaaattggtatgcctttccaaatgatattatcaattaccaaaacagattcttccattgaattacaggaagcttctttggcagttgcacagagaatggcaataccaagtattgatttgaagaccaagaaaatactacgagagccatacattaaaaagtccgagtatttactaagaactgtagaaagccaaagtttcgattccgacaagaccattttcggattttgctttgatgacgttgtcatcccaacctatgcggatggtctaccgagctggtttaaaacattctactgtgaaccaagttcattttatcccaatcatgctgccctcaaagtaactcatttgcttttgttcagaataacctatagcaggaatgaattggtggaagggcttgaaatgaaaaaaaattatcgtattacggtgaattttccaattttagttggcgatagtgatatttcgaccagctctttgttacccaaatatgaaaaatttgaaaatattagtgatctacaagatgaacccccactatattctatggtagcaggtgagaatagcttatga

SEQ ID NO: 898 - DNA, 1572 bp, Artificial Sequence
  Description of Artificial Sequence: Synthetic polynucleotide
atgttgttttcttcttcttcttcttctcttaattccgaggtttctcaagtgttctctgaaaatatatctagtagatccactactttaactgaaagttccacacaaagcgagataaggcagcattttggtaatgaagatttcagtggtgaattaccaaaaaaattaattcaactcaagaaattaaaaaatggtggcactacaatcaagaaggctaaggaagaccttgagtattgctatgattctttaagattatacgaaaatccctatgtaacatcttctgtagataaaaaatgtggttacagcattgaattgtatttggataacaagtacaaaacattgatgttctccgatttacaattgaatgctgactatccgttgtattacgattcctctttagataatatatctacaaatgttgaaagagaaagagccactcctttacaaatcaaaggaaagattaggataaacattgatagagaagaccaggccctcttaatcacttcccattctatttctttaaaatgtttcacaaaggaatatgcatgctttgtaaattctgaaactagcaaaaactcctatagtgacaaaattatcaaagaacttaatcacacagagttttttgagtcttccacctaccccaaacagcagttgagagtcatacaccactctttaaatgataagaaaattttattgacaaagggcacgtacgattacccattcacttttacccttcaagcaaatactttcccagcaagtttctcttccttctttggcaagacccattttagaatagaaagcttaacaacaataatgagaataccaagtaaacctaaaaacttactcaaatttttgaagaatgaaagttttacagataagatcattttaacagaagaaattaaagttaaaagagtcttaccttctacgagtatgcttaagtttgaaacatttcaattaaggtcttacaatactgcaagtgagatcgtagtaagtgtcattggaaactccaagttgattgaaattggtatgcctttccaaatgatattatccattaccaaaacagattcttccattgaattacaggaagcttctttggcagttgcacagagaatggcaataccaagtattgatttgaagaccaagaaaatattaagagagccatacattaaaaagtccgagtatttattaagaactgtagaaagccaaagtttcgattccgacaagaccattttcggattttgctttgatgacgttgtcatcccaacctatgcggatggtttaccgagctggtttaaaacattctactgtgaaccaagttctttttatcccaatcatgctgccctcaaagtaactcatttgcttttgttcagaataacctatagcaggaatgaattggtggaagggcttgaaatgaaaaaaaattatcgtattacggtgaattttccaattttagttggcgatagtgatatttctaccagctctttgttacccaaatatgaaaaatttgaaaatattagtgatttgcaagatgaacccccattgtattctatggtagcaggtgagaatagcttatga

SEQ ID NO: 899 - DNA, 924 bp, Saccharomyces cerevisiae
atgttcaagaggcaattatcgactagtgttcgttatctacagcattatgatgagtcgctattatcaaggtactatcctgaaagtcttttaaaatccataaaacttgctcaacaaacgataccagaagatactaaattcagagtatctcgtaacgtggaattcgcaccaccatatttggatgattttaccaaaatacatcctttttgggattacaaaccaggcatgccccatctccacgctcaagaggagaataataacttcagcatctttagatgggaccaggtacaacaaccattaccaggcgaaggtaacattctgcctccaggagtcagcttaccaaacgatggtggtcggaaatcgaaaagcgccgatgtagctgcagggctacacaagcaaaccggtgtagatccggattatatcactagaaagttgactatgaagccgctggtgatgaaaagagtgtcaaatcagactgggaagggtaaaattgcgtctttctatgccttggttgtcgttggtgacaaaaacggtatggtaggtttgggagaaggtaaatctcgtgaagaaatgtccaaagcgatctttaaagctcattgggatgcggtaaggaacctgaaggaaatacctaggtatgaaaacagaactatttatggtgatatagattttaggtatcatggtgtgaaactacatttaagaagtgcaaaaccagggtttggattacgtgtaaaccatgtaatctttgagatttgtgaatgtgcaggtatcaaagatctgagtgggaaagtatataaatccagaaacgatatgaatatagctaaaggtaccatcgaggctttcacgaaagctcaaaagacattggatgaggttgccctgggtagaggcaaaaagcttgttgatgtcaggaaagtttactattcaagctga

SEQ ID NO: 900 - DNA, 924 bp, Artificial Sequence
  Description of Artificial Sequence: Synthetic polynucleotide
atgttcaagaggcaattatctactagtgttcgttatttacagcattatgatgagtctttattatctaggtactatcctgaaagtcttttaaaatccataaaacttgctcaacaaacgataccagaagatactaaattcagagtatctcgtaacgtggaattcgcaccaccatatttggatgattttaccaaaatacatcctttttgggattacaaaccaggcatgccccatctccacgctcaagaggagaataataacttcagcatctttagatgggaccaggtacaacaaccattaccaggcgaaggtaacattttacctccaggagtcagcttaccaaacgatggtggtagaaaatctaaaagcgccgatgtagctgcagggttgcacaagcaaaccggtgtagatccggattatatcactagaaagttgactatgaagccgttggtgatgaaaagagtgagtaatcagactgggaagggtaaaattgcgtctttctatgccttggttgtcgttggtgacaaaaacggtatggtaggtttgggagaaggtaaatctcgtgaagaaatgtccaaagcgatctttaaagctcattgggatgcggtaaggaacttgaaggaaatacctaggtatgaaaacagaactatttatggtgatatagattttaggtatcatggtgtgaaattgcatttaagaagtgcaaaaccagggtttggattacgtgtaaaccatgtaatctttgagatttgtgaatgtgcaggtatcaaagatttgagtgggaaagtatataaatccagaaacgatatgaatatagctaaaggtaccatcgaggctttcacgaaagctcaaaagacattggatgaggttgcccttggtagaggcaaaaagcttgttgatgtcaggaaagtttactattctagctga

SEQ ID NO: 901 - DNA, 444 bp, Saccharomyces cerevisiae
atgactgctactagcgacaaagtactaaagattcaattgcgctcagcaagcgctactgtacctaccaaaggttctgccactgccgcgggatacgacatttatgcatctcaggatattaccattccggctatgggtcaaggtatggtttccaccgacatatcgttcaccgtacctgttggtacctacggtcgtattgcgccaaggtcaggcctggcagtgaaaaacggtatccaaaccggtgctggtgttgtcgacagagattacaccggtgaagttaaagtagttttattcaatcattcacagagggatttcgcgatcaaaaaaggtgatcgcgtagcccaattgattctggaaaaaattgtcgatgatgcccagatcgttgttgtagactctctggaagaaagtgcaagaggggccggtggctttggtagcactggtaactaa

SEQ ID NO: 902 - DNA, 444 bp, Artificial Sequence
  Description of Artificial Sequence: Synthetic polynucleotide
atgactgctactagcgacaaagtattgaagattcaattgcgctctgcaagcgctactgtacctaccaaaggttctgccactgccgcgggatacgacatttatgcatctcaggatattaccattccggctatgggtcaaggtatggtttccaccgacatatctttcaccgtacctgttggtacctacggtcgtattgcgccaaggagtggcttggcagtgaaaaacggtatccaaaccggtgctggtgttgtcgacagagattacaccggtgaagttaaagtagttttattcaatcattctcagagggatttcgcgatcaaaaaaggtgatcgcgtagcccaattgattttggaaaaaattgtcgatgatgcccagatcgttgttgtagactctttggaagaaagtgcaagaggggccggtggctttggtagcactggtaactga

SEQ ID NO: 903 - DNA, 366 bp, Saccharomyces cerevisiae
atgagcaaccaggcactatatgagaaactcgaacaaaccaggacgattctgtccgtgaagctggcggaattgataaatatgactacgatagccgatagaaatgatgatgacgagggttcattcgcacaagaaaattctgagctcgctgtggccacgaccagtgtgatgatggtgaataaccagaccatgcaattgattaaaaatgttcaagacttgttgatcctgaccagatcgataaaagagaaatggctactgaaccaaattcctgtaacggaacactcaaaagtgactcgttttgacgagaagcagatagaggaattactggataactgtatagaaacgttcgtggcggaaaaaactacgtaa

SEQ ID NO: 904 - DNA, 366 bp, Artificial Sequence
  Description of Artificial Sequence: Synthetic polynucleotide
atgagcaaccaggcattatatgagaaactcgaacaaaccaggacgattttatccgtgaagttggcggaattgataaatatgactacgatagccgatagaaatgatgatgacgagggttctttcgcacaagaaaattctgagctcgctgtggccacgaccagtgtgatgatggtgaataaccagaccatgcaattgattaaaaatgttcaagacttgttgatcttgaccagaagtataaaagagaaatggttgttgaaccaaattcctgtaacggaacactctaaagtgactcgttttgacgagaagcagatagaggaattattagataactgtatagaaacgttcgtggcggaaaaaactacgtga

SEQ ID NO: 905 - DNA, 528 bp, Saccharomyces cerevisiae
atgcctcagtattttgccattattggtaagaaggacaatcctgtctatgaaatcgagtttaccaatgcagaaaatccacagggttttcctcaggatttaaaagaattaaatccgttcatactgcatgcatcactagatatcgtagaagatttacaatggcaaattaatccgacttcacagttaaatgggaacggtggaaacggatccaatggcggtggtgggttccttcgatctagagctgtaaacaatactgataattgttatctaggtaaagttgatcatttttatggactagcaataacggcttatattagctatagtgggatgaagttcgtgatgatccatgggaactcagccaacagtagcgtagttattgacgacaataatatgaggtcattctaccaagaggtacacgaactatacgtaaagacactaatgaacccgttttataagattacagaccctattaggagcccggcattcgactcgagggtaaggacattagcacgtaagcatttgtccaaataa

SEQ ID NO: 906 - DNA, 528 bp, Artificial Sequence
  Description of Artificial Sequence: Synthetic polynucleotide
atgcctcagtattttgccattattggtaagaaggacaatcctgtctatgaaatcgagtttaccaatgcagaaaatccacagggttttcctcaggatttaaaagaattaaatccgttcatattacatgcatctttagatatcgtagaagatttacaatggcaaattaatccgacttctcagttaaatgggaacggtggaaacggatccaatggcggtggtgggttccttagatctagagctgtaaacaatactgataattgttatttgggtaaagttgatcatttttatggattagcaataacggcttatattagctatagtgggatgaagttcgtgatgatccatgggaactctgccaacagtagcgtagttattgacgacaataatatgaggtctttctaccaagaggtacacgaattatacgtaaagacattgatgaacccgttttataagattacagaccctattaggagcccggcattcgacagcagggtaaggacattagcacgtaagcatttgtccaaatga

SEQ ID NO: 907 - DNA, 2085 bp, Saccharomyces cerevisiae
atgactcatacaaatgagcacgaccataaggctgaacaacaacaaaatggaaggggcgatacaacaacagagactgtaaaccctcagaagatgaaattggttaccaaacttctcattgataataaatttggactaatggacgacttgaattttagtataccattaaccgcttcttctgagggtgtaccaatatcagcaaagacatcagaattgggtacggagtacctcaagaatcaacaagagaattcagtaagcccaatacttccaatatcaagaagtacaagaataaaagcagacagggtgagaatatatttagactattattataatatattagagcgttgcatttcaattgatagctcccagaatcatcatgagggtgttgaaggggtgtacaacccattacaagttattaggaatcgtaaattaaaaaagaagcatcatgaattacctaccagagagttttatactacaaaacaccctattattgccattaagcagttttcgaaaaaacccaacaaaaaaatgccgtggtttgtagatataaacgagaagtatatggatttgacttggagaacttcgcattgggaagaattagtggatcctcaaggtaagctttggttccagtcttatagtccttccaacgaatcgagcggatcatcatcatcccgccggcatcatggacaccacattcatcccagaagacatttacaacatcactccagggtccgtacagctaattcagtgcactcaaacactcaatcactgacaccgaaacgagtcatgaccaatgaagaagacaataataatcataacaataataacatgataacgaagatcgcaactactccagaagctcagatttcaaggaacaaaaaatctgatctcaatttaagtcacattcatttagaggtaccaataaccaatacagttacaaacacctcatcagatcaggggtcattgatcatcgaagcaaagggcagtagctatggaggtgatcgtcgtggaagtagtaataccagtggaagtggtgggaaaagaaattctaaacattatcgttcaaaatcagcaggccccccggaaaacgagaaatcaagaatgaatgggctcgaaaaaatcattagtaaaacgtcgaaaggatggtctagatcaccaaaaaaaaatacgcctgggcttgaaaaacaggtgcttctgaatcccactattagtaatggaggcaccagcagaaggagcagtaataatggagagagtattagtaccaacagtagcaaaagtagcatgggaattacttttggaaacactgaaacttacaagacgccggttgataatgggaaagatgctataatacggcaaagtttgttgagcgaagtgccagttcataccttgagaggtaaaaccagcaacagatcgttgcgagcagaaggtgaacaagctcttgaaagtgacaaagaattaccaaatggtgctgggagtatttacgaaggtgcgcctagggagaagactactagtcaaggtagcgaaccagtgggattagtaagcgattccttacaggttgacgaacagttacagagatactggcatgatacaaggtatattatgagtaccgtagctatgatgcaacacaggagagagacacatgatatagtgaagaggagagaaattgcacgaagaaacgaaattgaaattacacaagatgcagatacaaacattaggaagactgcagatgctttgactcagtatgataatgaattgaataaagttttaaagctaggtaatgactggacatcaaaacttctgaacgactattcaattcgtgtagaaactttgatatcatctagtgacagaattcttagtgatataaatacaacattgacattgaagttgaaaatgtttcaagagaatacagaaaggtatgttacggtgaaagttatgagagcccaaaagatgaccaaaaccatatatcggttgctggaatttggcattgttttagttctttggacaatttggtttttgttcagcgtcctgagaagcattcggttcacaatttttttagttctaaaaatcattaaggcattgctgtggtaa

SEQ ID NO: 908 - DNA, 2085 bp, Artificial Sequence
  Description of Artificial Sequence: Synthetic polynucleotide
atgactcatacaaatgagcacgaccataaggctgaacaacaacaaaatggaaggggcgatacaacaacagagactgtaaaccctcagaagatgaaattggttaccaaacttctcattgataataaatttggattaatggacgacttgaattttagtataccattaaccgcttcttctgagggtgtaccaatatctgcaaagacaagtgaattgggtacggagtacctcaagaatcaacaagagaattctgtaagcccaatacttccaatatctagaagtacaagaataaaagcagacagggtgagaatatatttagactattattataatatattagagcgttgcatttccattgatagctcccagaatcatcatgagggtgttgaaggggtgtacaacccattacaagttattaggaatcgtaaattaaaaaagaagcatcatgaattacctaccagagagttttatactacaaaacaccctattattgccattaagcagttttccaaaaaacccaacaaaaaaatgccgtggtttgtagatataaacgagaagtatatggatttgacttggagaacttctcattgggaagaattagtggatcctcaaggtaagctttggttccagtcttatagtccttccaacgaaagtagcggaagttcttcttcccgccgccatcatggacaccacattcatcccagaagacatttacaacatcactccagggtccgtacagctaattctgtgcactccaacactcaaagtttgacaccgaaaagagtcatgaccaatgaagaagacaataataatcataacaataataacatgataacgaagatcgcaactactccagaagctcagatttctaggaacaaaaaatctgatctcaatttaagtcacattcatttagaggtaccaataaccaatacagttacaaacacctcttctgatcaggggtctttgatcatcgaagcaaagggcagtagctatggaggtgatcgtcgtggaagtagtaataccagtggaagtggtgggaaaagaaattctaaacattatcgttctaaatctgcaggccccccggaaaacgagaaatctagaatgaatgggctcgaaaaaatcattagtaaaacgtccaaaggatggtctagatctccaaaaaaaaatacgcctgggcttgaaaaacaggtgcttttgaatcccactattagtaatggaggcaccagcagaaggagcagtaataatggagagagtattagtaccaacagtagcaaaagtagcatgggaattacttttggaaacactgaaacttacaagacgccggttgataatgggaaagatgctataataagacaaagtttgttgagcgaagtgccagttcataccttgagaggtaaaaccagcaacagaagtttgagagcagaaggtgaacaagctcttgaaagtgacaaagaattaccaaatggtgctgggagtatttacgaaggtgcgcctagggagaagactactagtcaaggtagcgaaccagtgggattagtaagcgattccttacaggttgacgaacagttacagagatactggcatgatacaaggtatattatgagtaccgtagctatgatgcaacacaggagagagacacatgatatagtgaagaggagagaaattgcaagaagaaacgaaattgaaattacacaagatgcagatacaaacattaggaagactgcagatgctttgactcagtatgataatgaattgaataaagttttaaagttgggtaatgactggacaagtaaacttttgaacgactattctattcgtgtagaaactttgatatcttctagtgacagaattcttagtgatataaatacaacattgacattgaagttgaaaatgtttcaagagaatacagaaaggtatgttacggtgaaagttatgagagcccaaaagatgaccaaaaccatatatagattgttggaatttggcattgttttagttctttggacaatttggtttttgttcagcgtcttgagaagcattagattcacaatttttttagttttgaaaatcattaaggcattgttatggtga

SEQ ID NO: 909 - DNA, 363 bp, Saccharomyces cerevisiae
atgggtggtaacgttctccccattcattatgaccccaaaactgttaaacaattaactaaagaaattactgttgcatcatgtataggagctgcccaaggtgctctcttcagtattgcctcagcgctgctgttgagaagattttcatcagtatatagaaatgtcagaactcaagtgcgtgttttttatcattgttcttggatttcaatgggtgctgtcttcagagctgataagcaattgctcaagttccagacaaattattatcgtgaggaacagaaaagaagagaaaagattatggatgaagctgctgagagaggcctttttctggaggatgagagtttgaactcttcccggtcaactacatga

SEQ ID NO: 910 - DNA, 363 bp, Artificial Sequence
  Description of Artificial Sequence: Synthetic polynucleotide
atgggtggtaacgttctccccattcattatgaccccaaaactgttaaacaattaactaaagaaattactgttgcatcttgtataggagctgcccaaggtgctctcttcagtattgcctctgcgttattattgagaagattttcttctgtatatagaaatgtcagaactcaagtgcgtgttttttatcattgttcttggatttccatgggtgctgtcttcagagctgataagcaattgctcaagttccagacaaattattatcgtgaggaacagaaaagaagagaaaagattatggatgaagctgctgagagaggcctttttttggaggatgagagtttgaactcttccagatctactacatga

SEQ ID NO: 911 - DNA, 717 bp, Saccharomyces cerevisiae
atgtttactggtattgtagaatgcatggggactgttttggaaaacaacccatatgatgactctgaaagtggaggtcaaggagtttctattactattggcaatgcggggagtattctcaccgattgtcacgttggagattcaatagccgtaaatggggtatgccttactgtgaccgagtttaataacgactccttcaaagttgggatatcaccagaaactataaaacgaagtaatgtcgcttcctggattcaaggcacccaggtcaacttggagagagcggtatctcaagacgttaggttcggtggtcattatgtacagggtcacgtagacactgttgctaatattgtctcaagaagacctgaggggaattcaattatttttgggtttcagttaagagatcaagagtactttaaatacatagtagaaaagggattcatttgtatagatggaacttccttgaccataatcaaggttgacccactttcgcaaggtggagccttctatattagtatgataaagcacacccaagacaatgttatcatgcctttgaagaaaattggcgacgaggttaatattgaagtagatttgactgggaagattattgagaagcaaattctattaacgttggaaaaccaaatatcaaagaaagatagtactttgaatactatgatctcaaacattatcgaggagaaggttagaaactacctaaataaataa

SEQ ID NO: 912 - DNA, 717 bp, Artificial Sequence
  Description of Artificial Sequence: Synthetic polynucleotide
atgtttactggtattgtagaatgcatggggactgttttggaaaacaacccatatgatgactctgaaagtggaggtcaaggagtttctattactattggcaatgcggggagtattctcaccgattgtcacgttggagattctatagccgtaaatggggtatgccttactgtgaccgagtttaataacgactccttcaaagttgggatatctccagaaactataaaaagaagtaatgtcgcttcctggattcaaggcacccaggtcaacttggagagagcggtatctcaagacgttaggttcggtggtcattatgtacagggtcacgtagacactgttgctaatattgtctctagaagacctgaggggaattctattatttttgggtttcagttaagagatcaagagtactttaaatacatagtagaaaagggattcatttgtatagatggaacttccttgaccataatcaaggttgacccactttctcaaggtggagccttctatattagtatgataaagcacacccaagacaatgttatcatgcctttgaagaaaattggcgacgaggttaatattgaagtagatttgactgggaagattattgagaagcaaattttattaacgttggaaaaccaaatatccaagaaagatagtactttgaatactatgatctccaacattatcgaggagaaggttagaaactacttgaataaatga

SEQ ID NO: 913 - DNA, 840 bp, Saccharomyces cerevisiae
atggatagaactcaaacgtttattaaagactgtcttttcacgaaatgcctggaggaccctgaaaagccctttaatgaaaatagatttcaagatacgttgttgctactgccaactgatggcggattgacttcaaggcttcagagacagcaaagaaaatcaaagctaaatcttgacaatttacaaaaggtctcccagttagagagtgcagacaaacagttggaaaaaagagattaccaaagaatcaacaagaactctaaaatcgcattaagagagtacatcaataattgtaaaaaaaatacaaaaaaatgtctgaaattggcatacgaaaataaaattactgataaggaagaccttttacactacatagaggagaagcatccaacgatatacgaatcattaccgcagtacgttgattttgtaccgatgtataaggaactatggattaactatattaaagaacttttgaacattacaaaaaacttaaaaacattcaatggatcattagcattattaaaactatctatggcagactataatggtgcgctgttacgcgttacaaagagcaaaaataagactttaataggccttcaaggcattgtgatctgggactctcagaaattttttatcatgattgtcaagggcaatataatagacgaaataaaatgcattccaaaaaagggcacagtatttcaatttgaaatcccaatatcagatgacgacgattcggcattgagatatagtatactaggcgataggttcaagtacagaagtgtggatcgtgcaggcaggaagttcaaaagtcgtcgttgtgatgatatgctatattatatacagaattag

SEQ ID NO: 914 - DNA, 840 bp, Artificial Sequence
  Description of Artificial Sequence: Synthetic polynucleotide
atggatagaactcaaacgtttattaaagactgtcttttcacgaaatgcttagaggaccctgaaaagccctttaatgaaaatagatttcaagatacgttgttgttgttaccaactgatggcggattgacttctaggcttcagagacagcaaagaaaatccaagttgaatcttgacaatttacaaaaggtctcccagttagagagtgcagacaaacagttggaaaaaagagattaccaaagaatcaacaagaactctaaaatcgcattaagagagtacatcaataattgtaaaaaaaatacaaaaaaatgtttgaaattggcatacgaaaataaaattactgataaggaagaccttttacactacatagaggagaagcatccaacgatatacgaatctttaccgcagtacgttgattttgtaccgatgtataaggaattatggattaactatattaaagaacttttgaacattacaaaaaacttaaaaacattcaatggatctttagcattattaaaattatctatggcagactataatggtgcgttattacgcgttacaaagagcaaaaataagactttaataggccttcaaggcattgtgatctgggactctcagaaattttttatcatgattgtcaagggcaatataatagacgaaataaaatgcattccaaaaaagggcacagtatttcaatttgaaatcccaatatctgatgacgacgattctgcattgagatatagtatattgggcgataggttcaagtacagaagtgtggatcgtgcaggcaggaagttcaaaagtcgtcgttgtgatgatatgctttattatatacagaattga

SEQ ID NO: 915 - DNA, 429 bp, Saccharomyces cerevisiae
atggcgtataatcaagaagatagtaaaagactatcagacaagtataagaaggagggacattttgacaagttgaaaagagaaatattgtctaacccatggaataatacagaagagaatagtgaatcttttgaacaagcgcttcggaaaagagttgccagtactgttaaagaaatggttaacgaagatgaagaattaatatttaaaaacagagggctaaccagtgcattgattgaatcacaattggtcaaggacaactacctaaagctgggtagtaaaatggagggggataatggtgatggtgagaagaaatttgacttggatgtctatgtacggtctaagttacaggatcccaaactattggaaatgataaagggacaacttcaggaaacactgaactcttatgaagaggaagcaaatggaagtacgtaa

SEQ ID NO: 916 - DNA, 429 bp, Artificial Sequence
  Description of Artificial Sequence: Synthetic polynucleotide
atggcgtataatcaagaagatagtaaaagattaagtgacaagtataagaaggagggacattttgacaagttgaaaagagaaatattgtctaacccatggaataatacagaagagaatagtgaatcttttgaacaagcgcttagaaaaagagttgccagtactgttaaagaaatggttaacgaagatgaagaattaatatttaaaaacagagggttaaccagtgcattgattgaatctcaattggtcaaggacaactacttgaagttgggtagtaaaatggagggggataatggtgatggtgagaagaaatttgacttggatgtctatgtaagatctaagttacaggatcccaaacttttggaaatgataaagggacaacttcaggaaacattgaactcttatgaagaggaagcaaatggaagtacgtga

SEQ ID NO: 917 - DNA, 2067 bp, Saccharomyces cerevisiae
atgtccattgacgaggctgttgccagatatagagatgttataggcaatctagcaactggcaatttaaggcggattgttatacagtcagaaaaactggcccagatcattgcatcttcaaaaggtaccgttcgtttccaccataaaactcgcagcggtaaaacagtaatatacaaatgcatcaaaaaggcgctgctttccagtgtcgcgtctctatcgtcagagttttcctcagaaacagatgttcagcaattcctccatttaaattacatatatcaatctcacttccaagctttgagtggacaaataaacaaatattgcggcatgaagaaatactacgagttaaagtttgcagcaatcgactacttagaaaccgaagtccaaactaccgggcttacactctcaagattctgggtggcatctttagatgagttcattaaaaaagagcgatggccagataatggatctaactttcaaatcttttacaaactaatggctgagtattcgtcttggaaatgggattctgatgataaaaggcaactccagttcatgtacgaatttcgaatgaaactcaaagaatgtttggtgaaattttacgagaattttgatcttcaaaaatctagcgatcctctgaaagaactcattataccttgggaaaagattgtttatgtcgccaactgtatcgatgcattcactggagagcaagttaggatcgacggtgctgaattaatctggacatccaaaaatcttgtgttctcttcgatttcttctgccgttcttagattaaatgaccttcaaaatatgttcagcgcattccggccttatggggaagaagcattagttcaagactttgcgcatatacgatctttaaagtgggatagtaatgataaagttgaaagcttaattcgtgcccttatttttaatgatatgtttccttatttcaataaggaacaggtagatacgaaggcagatggtatattctttttgcgcttactgagaaaaaacttcaaagaacacattaatgacgttaaagattttcatattcaagtgataaagtacttgaattcccaatttaaaaataattacagcacattgatgacgtcatcgaaaactcaggatagaaggaaaagtcataatatgccttcttctatcttagacgatggtaacaaaattggaatgcatgtttcgcctatcgatgaatactcacattttattgataatgatgaaccgttgtggcgagacaaagtatatccaaagatttacacaaatgagcaaacacctacacctgacgcatcagcaatatttgattctcacaagatatatgcaattatatcgctgctgcgatattacttacctgagaagagaaagttttttcggatttattatctgcccagtatttttaaaaggatattatattacggtgcaaagtttgctcaactatatttcatggaaggttgcttggaacggctagtaatagaatctctccaaattctagaaccctctttggtacatgcgataaataatttgatcaagtctagcatagaatcactcaaaaatgtaacagtgacaagtgatgacaaaacttcatctggtgtcattattttgtcctacaaagaatttaagtcactatctgaagttaacaaagatttcaatgaaccattttggcctaaccaatcaattgcgaatagttggccagatttcgcgaataagcaattaaagaggggtcaaattttgcaagacgcatttgcattccacctttttgaaattgaactaccaattattatcgatactacaagaaatacgcatttgaaactcgtttccaacatgtgtactacgagcatattgtacttatataatgaagttgattccttatcattaactagcatacaggaaaaattagctgttttaccgacaagtaaacggaatgaaatcttattgtacaatttgaacaggctaacaaaattgaaactattgttgttgaaagagaacgaaaaaggacaaaagttttacgcatttaattttaagtacaaaagggatggacagaaaacatcattaataaggttaatttaa

SEQ ID NO: 918 - DNA, 2067 bp, Artificial Sequence
  Description of Artificial Sequence: Synthetic polynucleotide
atgtccattgacgaggctgttgccagatatagagatgttataggcaatttggcaactggcaatttaaggagaattgttatacagtctgaaaaattggcccagatcattgcatcttctaaaggtaccgttcgtttccaccataaaactcgcagcggtaaaacagtaatatacaaatgcatcaaaaaggcgttactttccagtgtcgcgtctttatcttctgagttttccagtgaaacagatgttcagcaattcctccatttaaattacatatatcaatctcacttccaagctttgagtggacaaataaacaaatattgcggcatgaagaaatactacgagttaaagtttgcagcaatcgactacttagaaaccgaagtccaaactaccgggcttacactcagcagattctgggtggcatctttagatgagttcattaaaaaagagcgctggccagataatggatctaactttcaaatcttttacaaattaatggctgagtattcttcttggaaatgggattctgatgataaaaggcaactccagttcatgtacgaatttagaatgaaactcaaagaatgtttggtgaaattttacgagaattttgatcttcaaaaatctagcgatcctttgaaagaactcattataccttgggaaaagattgtttatgtcgccaactgtatcgatgcattcactggagagcaagttaggatcgacggtgctgaattaatctggacatccaaaaatcttgtgttctcttccatttcttctgccgttcttagattaaatgaccttcaaaatatgttcagcgcattcaggccttatggggaagaagcattagttcaagactttgcgcatataagatctttaaagtgggatagtaatgataaagttgaaagcttaattcgtgcccttatttttaatgatatgtttccttatttcaataaggaacaggtagatacgaaggcagatggtatattctttttgcgcttattaagaaaaaacttcaaagaacacattaatgacgttaaagattttcatattcaagtgataaagtacttgaattcccaatttaaaaataattacagcacattgatgacgtcttctaaaactcaggatagaaggaaaagtcataatatgccttcttctatcttagacgatggtaacaaaattggaatgcatgtttctcctatcgatgaatactctcattttattgataatgatgaaccgttgtggagagacaaagtatatccaaagatttacacaaatgagcaaacacctacacctgacgcatctgcaatatttgattctcacaagatatatgcaattatatctttacttcgttattacttacctgagaagagaaagttttttagaatttattatttacccagtatttttaaaaggatattatattacggtgcaaagtttgctcaattatatttcatggaaggttgcttggaaagattggtaatagaatctctccaaattttggaaccctctttggtacatgcgataaataatttgatcaagtctagcatagaatctctcaaaaatgtaacagtgacaagtgatgacaaaacttcttctggtgtcattattttgtcctacaaagaatttaagtctttatctgaagttaacaaagatttcaatgaaccattttggcctaaccaatctattgcgaatagttggccagatttcgcgaataagcaattaaagaggggtcaaattttgcaagacgcatttgcattccacctttttgaaattgaattaccaattattatcgatactacaagaaatacgcatttgaaactcgtttccaacatgtgtactacgagcatattgtacttatataatgaagttgattccttatctttaactagcatacaggaaaaattagctgttttaccgacaagtaaaagaaatgaaatcttattgtacaatttgaacaggttgacaaaattgaaacttttgttgttgaaagagaacgaaaaaggacaaaagttttacgcatttaattttaagtacaaaagggatggacagaaaacaagtttaataaggttaatttga

SEQ ID NO: 919 - DNA, 2001 bp, Saccharomyces cerevisiae
atggaagagactgcgaagaaaccagctagtgccacagtaagtgcgaagtcgtcgcacgatggtggcaccgacgatttggcgcacctttttagcacgccagagatcaagaaggtgctaaattccgatgtggcaattaacgctttgttgagccgtttaaagcagtcgttgttgacttgtgaagagtttatgaaatttattagaaagaaatacgccttcgaagaagagcacgttcaggagctctccaagcaatataagcactttttcaacattcagggttccacaaattcatccttaaaaaagatgattcacgaagttttgggattcgatggcaagatggctcaagtaaagcagagttatatcaccgccttgcagaaaatgtactccgagattagtagtcttttattaacaatgacaaaattaagaaagtctgtcaaggagaacagcaaaaggctggaaaaggatgtttctgatgccatacacagcgcagaaaaggcgcaatctcgttacaattcgttgtgccaagattgggacaaattgaggatgactgacccaacaaaaacaaagctgaccttgagaggttccaaaactacgaaggaacaagaagaagaattgttaagaaaaatcgataacgccgatctggaatataagcaaaaagtagatcattctaattctttgagaaacacattcataacgaaggagagacctagaattgttcaagaattaaaagatttgattttagaaatagacacagcgatgactatccaattgcagaagtacacgatatggacggaaaatttggttctgaatacaggtgttacaataagcccattggactccaccaaatctatgaaatcatttgctggatctgtttccaatgaacgtgatctttacagttttttgaacaagtataaccaaacaggaaaacattccctactgatcaacaaaaacttgatccctgtatcatacaaaaagcatccatcaatgaatcatggtcagaaaaataagagccccccaaagtttgccgtggacccttcaagaaactccatcccgaagagaatgatatccactcataatgaatctccatttttgagcagtagtagtaacactgccgctgttccgaatgctaatcttaacagtgctacaccgtccttaaataccaacaagcagttaccacctactatggcttcatctatttcttccactagcaatgcggctggcgctatgtcaccgtcttcttccattgtaacaagcgacaccacatcatccataacaaagaccctggatcctggcaacaatagtccacaaattccagaagaattgattaactctttagactcggatcgcccgatttctcacattcagactaacaacaatatgccacccggtgttcaaaaaaatttcaaaacatttggtgtaccgctagaatcactgatagaattcgaacaagacatggtccctgcgatagtgcgccaatgcatatacgttattgataaatttgggcttgatcaagaaggaatttatagaaaatcggcaaatgtacttgatgtcagcaagttgaaggaggaaattgataaggatcccgcaaacatttccatgattctaccatcaaagccacattctgattcggatatttatttagtaggatcactgctgaaaactttttttgcgtcgctgcctgatagtgttttaccaaaggccctatcatcggagatcaaggtttgtttacaaattgaagacccaacaacaagaaaaaattttatgcacggactaatatataacctccccgacgcacaatactggacgttaagggctcttgtctttcatttgaaaagagtgttggcacatgaagcccaaaacagaatgaatttaagggctctttgtataatttggggtccaactattgcgcctgcaaatccagatgacgctaatgatgtaaattttcaaattatggcaatggaagtattattagaggtttcagatcaagcttttgagcctgaataa

SEQ ID NO: 920 - DNA, 2001 bp, Artificial Sequence
  Description of Artificial Sequence: Synthetic polynucleotide
atggaagagactgcgaagaaaccagctagtgccacagtaagtgcgaagtcttctcacgatggtggcaccgacgatttggcgcacctttttagcacgccagagatcaagaaggtgttgaattccgatgtggcaattaacgctttgttgagccgtttaaagcagtctttgttgacttgtgaagagtttatgaaatttattagaaagaaatacgccttcgaagaagagcacgttcaggagctctccaagcaatataagcactttttcaacattcagggttccacaaattcttccttaaaaaagatgattcacgaagttttgggattcgatggcaagatggctcaagtaaagcagagttatatcaccgccttgcagaaaatgtactccgagattagtagtcttttattaacaatgacaaaattaagaaagtctgtcaaggagaacagcaaaaggttagaaaaggatgtttctgatgccatacacagcgcagaaaaggcgcaatctcgttacaattctttgtgccaagattgggacaaattgaggatgactgacccaacaaaaacaaagttgaccttgagaggttccaaaactacgaaggaacaagaagaagaattgttaagaaaaatcgataacgccgatttggaatataagcaaaaagtagatcattctaattctttgagaaacacattcataacgaaggagagacctagaattgttcaagaattaaaagatttgattttagaaatagacacagcgatgactatccaattgcagaagtacacgatatggacggaaaatttggttttgaatacaggtgttacaataagcccattggactccaccaaatctatgaaaagttttgctggatctgtttccaatgaacgtgatctttacagttttttgaacaagtataaccaaacaggaaaacattccttattgatcaacaaaaacttgatccctgtatcttacaaaaagcatccaagcatgaatcatggtcagaaaaataagagccccccaaagtttgccgtggacccttccagaaactccatcccgaagagaatgatatccactcataatgaatctccatttttgagcagtagtagtaacactgccgctgttccgaatgctaatcttaacagtgctacaccgtccttaaataccaacaagcagttaccacctactatggcttcttctatttcttccactagcaatgcggctggcgctatgtctccgtcttcttccattgtaacaagcgacaccacatcttccataacaaagaccttggatcctggcaacaatagtccacaaattccagaagaattgattaactctttagacagtgatcgcccgatttctcacattcagactaacaacaatatgccacccggtgttcaaaaaaatttcaaaacatttggtgtaccgttggaatctttgatagaattcgaacaagacatggtccctgcgatagtgcgccaatgcatatacgttattgataaatttgggcttgatcaagaaggaatttatagaaaatctgcaaatgtacttgatgtcagcaagttgaaggaggaaattgataaggatcccgcaaacatttccatgattttaccatctaagccacattctgattctgatatttatttagtaggatctttattgaaaactttttttgcgtctttgcctgatagtgttttaccaaaggccttgtcttctgagatcaaggtttgtttacaaattgaagacccaacaacaagaaaaaattttatgcacggattgatatataacctccccgacgcacaatactggacgttaagggctcttgtctttcatttgaaaagagtgttggcacatgaagcccaaaacagaatgaatttaagggctctttgtataatttggggtccaactattgcgcctgcaaatccagatgacgctaatgatgtaaattttcaaattatggcaatggaagtattattagaggtttctgatcaagcttttgagcctgaatga

SEQ ID NO: 921 - DNA, 699 bp, Saccharomyces cerevisiae
atggacgtgcctgcagattcccatatcaaatacgaagatgccatcgactattggacggatgtggacgccactgtggatggtgttctaggtggatacggagaaggtacagtagtacccacaatggatgtcctgggatccaataacttcctgcgtaaactgaagtcgaggatgctgcctcaggagaacaacgtgaagtacgctgtagacattggtgcggggattggacgtgtaagcaagaccatgcttcacaagcacgccgctaagatagaccttgtagaaccggtaaagccttttatcgagcaaatgcacgttgaattggctgagctgaaagacaaaggccaaattggacaaatatatgaagtagggatgcaggactggacccccgatgccggcaagtactggctgatctggtgccaatggtgcgtgggacacctgccagatgcagaactcgtcgcattcctgaaaagatgtattgttggtttgcaacctaatgggacaatcgtggtcaaagaaaataacacacctacagataccgatgatttcgacgaaacggattcttcggtcacaaggtcagatgctaagttcaggcaaatcttcgaagaagctggcctaaagctcatcgccagtgaaagacaacgtggcttaccaagagaattgtacccagtgaggatgtacgcactcaagcccatgccaaactag

SEQ ID NO: 922 - DNA, 699 bp, Artificial Sequence
  Description of Artificial Sequence: Synthetic polynucleotide
atggacgtgcctgcagattcccatatcaaatacgaagatgccatcgactattggacggatgtggacgccactgtggatggtgttttaggtggatacggagaaggtacagtagtacccacaatggatgtccttggatccaataacttcttgcgtaaattgaagtccaggatgttgcctcaggagaacaacgtgaagtacgctgtagacattggtgcggggattggacgtgtaagcaagaccatgcttcacaagcacgccgctaagatagaccttgtagaaccggtaaagccttttatcgagcaaatgcacgttgaattggctgagttgaaagacaaaggccaaattggacaaatatatgaagtagggatgcaggactggacccccgatgccggcaagtactggttgatctggtgccaatggtgcgtgggacacttgccagatgcagaactcgtcgcattcttgaaaagatgtattgttggtttgcaacctaatgggacaatcgtggtcaaagaaaataacacacctacagataccgatgatttcgacgaaacggattcttctgtcacaaggtctgatgctaagttcaggcaaatcttcgaagaagctggcttgaagctcatcgccagtgaaagacaacgtggcttaccaagagaattgtacccagtgaggatgtacgcactcaagcccatgccaaactga

SEQ ID NO: 923 - DNA, 321 bp, Saccharomyces cerevisiae
atgtcgaaattgggtccgttagcaagatctgtgaagtggactctctctgtgggagtaatcggttctgttttttacctgtaccgatacagtaacaatggctacttctacgatcacgatgctacatggttgaaacaagatcatcaggtacaggacctggtggatagaaaagaagtggtacctggggagaccaggaaccgcaagctagttgtgacggatgatggcactgcatggagcaggaccatgggggagagcataaaagatatttggaatgaacagataagaaactctgtcgattggatctactcctggggtaagaattag

SEQ ID NO: 924 - DNA, 321 bp, Artificial Sequence
  Description of Artificial Sequence: Synthetic polynucleotide
atgtccaaattgggtccgttagcaagatctgtgaagtggactctctctgtgggagtaatcggttctgttttttacttgtacagatacagtaacaatggctacttctacgatcacgatgctacatggttgaaacaagatcatcaggtacaggacttggtggatagaaaagaagtggtacctggggagaccaggaaccgcaagttggttgtgacggatgatggcactgcatggagcaggaccatgggggagagcataaaagatatttggaatgaacagataagaaactctgtcgattggatctactcctggggtaagaattga

SEQ ID NO: 925 - DNA, 1473 bp, Saccharomyces cerevisiae
atgtttcccagagcttctgcattggccaaatgtatggcaactgttcatcgtcgtgggctactcaccagtggtgcacaatcgctagtctccaaaccagtctcggagggagatccagagatgtttgacatcttgcaacaagaacgtcacagacaaaaacactctatcacccttatcccatcagaaaacttcacctcgaaggccgttatggatttgctaggttctgagctccaaaacaagtattctgaaggttatccaggtgaaagatactacggaggtaacgaaatcatcgataagtccgaatccttgtgtcaagcaagagctctggaactgtacggattagaccctgccaagtggggagttaatgttcaaccattaagcggggcacctgccaatttgtatgtttactccgctatcatgaacgttggtgaaagattaatgggattggatttgccagatggtggtcacttgtctcacgggtaccaacttaagtcaggaacgccaatttctttcatttccaaatacttccaaagtatgccataccatgtcgaccacactacggggctaatcgattacgataacttgcaagtattggccaaggcattcagaccaaaggtgatcgtggccggtacttccgcgtactcgagattaatagactacgctagattcaaggaaatttcccaaggatgcggcgcatatttgatgagtgatatggcacacatatccggtttggtggcagccaatgttgtcccatctccatttgaacattccgatatagttaccacaaccactcacaagtccttgagaggcccaagaggtgctatgattttcttcagaaagggtatcaagtctgtcaccaaaaagggcaaggaaatcccatatgagttagaaaagaaaatcaacttctcagttttcccaggacatcaaggtggtcctcacaaccatactatcggtgcaatggcagtggcattaaagcaagcgatgtctccagaattcaaagaataccaacaaaaaattgtcgacaacagcaaatggtttgctcaggaactaaccaagatgggttataagttggtttccggcggtaccgataaccacttgattgttattgacttatccggtactcaggtagacggtgctcgtgtcgagacaattttaagtgccttgaacattgctgctaacaagaacaccatcccaggtgataagagtgctcttttcccctctggtctaagaatcggtactccagcaatgaccacgagaggatttggccgtgaagagttttctcaagtcgcaaagtacattgattctgccgttaagctcgctgaaaatttgaaaactttggaaccaacaacgaaactagatgcaagatcaagactcaatgagttcaagaagttgtgtaatgaatctagtgaagtcgctgctttgtctggcgagatttccaagtgggtcggtcaataccctgtcccaggtgatatctaa

SEQ ID NO: 926 - DNA, 1473 bp, Artificial Sequence
  Description of Artificial Sequence: Synthetic polynucleotide
atgtttcccagagcttctgcattggccaaatgtatggcaactgttcatcgtcgtgggttactcaccagtggtgcacaatctttggtctccaaaccagtcagtgagggagatccagagatgtttgacatcttgcaacaagaacgtcacagacaaaaacactctatcacccttatcccatctgaaaacttcacctccaaggccgttatggatttgttgggttctgagctccaaaacaagtattctgaaggttatccaggtgaaagatactacggaggtaacgaaatcatcgataagtccgaatccttgtgtcaagcaagagctttggaattatacggattagaccctgccaagtggggagttaatgttcaaccattaagcggggcacctgccaatttgtatgtttactccgctatcatgaacgttggtgaaagattaatgggattggatttgccagatggtggtcacttgtctcacgggtaccaacttaagagtggaacgccaatttctttcatttccaaatacttccaaagtatgccataccatgtcgaccacactacggggttgatcgattacgataacttgcaagtattggccaaggcattcagaccaaaggtgatcgtggccggtacttccgcgtactctagattaatagactacgctagattcaaggaaatttcccaaggatgcggcgcatatttgatgagtgatatggcacacatatccggtttggtggcagccaatgttgtcccatctccatttgaacattccgatatagttaccacaaccactcacaagtccttgagaggcccaagaggtgctatgattttcttcagaaagggtatcaagtctgtcaccaaaaagggcaaggaaatcccatatgagttagaaaagaaaatcaacttctctgttttcccaggacatcaaggtggtcctcacaaccatactatcggtgcaatggcagtggcattaaagcaagcgatgtctccagaattcaaagaataccaacaaaaaattgtcgacaacagcaaatggtttgctcaggaattgaccaagatgggttataagttggtttccggcggtaccgataaccacttgattgttattgacttatccggtactcaggtagacggtgctcgtgtcgagacaattttaagtgccttgaacattgctgctaacaagaacaccatcccaggtgataagagtgctcttttcccctctggtttaagaatcggtactccagcaatgaccacgagaggatttggccgtgaagagttttctcaagtcgcaaagtacattgattctgccgttaagctcgctgaaaatttgaaaactttggaaccaacaacgaaattggatgcaagatctagactcaatgagttcaagaagttgtgtaatgaatctagtgaagtcgctgctttgtctggcgagatttccaagtgggtcggtcaataccctgtcccaggtgatatctga

SEQ ID NO: 927 - DNA, 600 bp, Saccharomyces cerevisiae
atggaagcaaccatcaaagtggtactgctaggagattcatcagtggggaaaaccagtatagtgactaggctcaaatcaggtaagtttctagcaaaacatgcggctacgataggtgcggcgttcatcaccaagacaatcgaggttccttctaacgactcctctacggagaaacgtatccatatggagatatgggacacggcgggtcaggaacggtataaatcactggtgccaatgtattatcgagatgcgaatattgctttgattgtattcgaattgggagacgtatccagtctgcaatgtgcaaagacatggtttcaagatttacaggaccgtgctcagggaacgcaggtaattatcgtgggcaataagtacgatttagtctgcgaagagcattcaggggaagtgactataccggcggagttacagggtctgccgtatgtggccgtaagtgcaaagacagggtacaatttcgatacattgaataaaataataatcagtttggttcccgaaagtcaattcaagacattgtcaaagaacaatgaacagggaaatatactggaaataaataaaaaaaaaagcggcagtggctgtatatgttaa

SEQ ID NO: 928 - DNA, 600 bp, Artificial Sequence
  Description of Artificial Sequence: Synthetic polynucleotide
atggaagcaaccatcaaagtggtattattaggagattcttctgtggggaaaaccagtatagtgactaggctcaaatctggtaagtttttggcaaaacatgcggctacgataggtgcggcgttcatcaccaagacaatcgaggttccttctaacgactcctctacggagaaacgtatccatatggagatatgggacacggcgggtcaggaaagatataaatctttggtgccaatgtattatagagatgcgaatattgctttgattgtattcgaattgggagacgtatccagtttacaatgtgcaaagacatggtttcaagatttacaggaccgtgctcagggaacgcaggtaattatcgtgggcaataagtacgatttagtctgcgaagagcattctggggaagtgactataccggcggagttacagggtttaccgtatgtggccgtaagtgcaaagacagggtacaatttcgatacattgaataaaataataatcagtttggttcccgaaagtcaattcaagacattgtccaagaacaatgaacagggaaatatattggaaataaataaaaaaaaaagcggcagtggctgtatatgttga

SEQ ID NO: 929 - DNA, 963 bp, Saccharomyces cerevisiae
atgaagtttacgttagaagaccaagttgtgttgatcactggtggttcacaaggtcttggaaaggaattcgccaaaaaatattataatgaggctgaaaacacaaagattattatcgtcagtaggtcagaggctagactgctggacacatgcaacgaaattaggattgaagctcacctgagaagggaaaccactgacgagggccaagtgcaacataagttggctgcgcccttggaccttgagcaacggttattttactacccatgcgacttgtcctgctacgaatccgtggaatgtttgttcaatgccctgagagacttggatttactccctacacaaacgttatgctgtgcagggggggctgttcctaagttatttcgtgggctaagcggacatgagttgaacttgggtatggacatcaactataaaacaactttgaacgtggcacatcagattgcccttgcagagcaaaccaaggaacaccacctcatcatcttttctagtgccaccgcgctttacccatttgtgggctattcccagtatgcgcctgcaaaagctgcaatcaaatcactggtagcaatcttaagacaagaactgacgaacttccgtatcagttgtgtttatcctggtaattttgaaagcgaaggtttcactgtagagcagctaacgaaacccgaaattacaaagttgatcgaaggcccctcagacgctatcccatgcaaacaagcatgtgatatcattgccaagtcgctggccagaggtgatgatgacgtttttacagattttgtcggatggatgataatggggatggaccttgggctcaccgcaaagaaaagccgctttgttccgttgcaatggatttttggtgtcctatcaaacattctggtcgtgccattctacatggttggctgttcctggtatatcaggaaatggtttcgtgaaaatgacggcaagaaggccaactga

SEQ ID NO: 930 - DNA, 963 bp, Artificial Sequence
  Description of Artificial Sequence: Synthetic polynucleotide
atgaagtttacgttagaagaccaagttgtgttgatcactggtggttctcaaggtcttggaaaggaattcgccaaaaaatattataatgaggctgaaaacacaaagattattatcgtcagtaggagtgaggctagattattagacacatgcaacgaaattaggattgaagctcacttgagaagggaaaccactgacgagggccaagtgcaacataagttggctgcgcccttggaccttgagcaaagattattttactacccatgcgacttgtcctgctacgaatccgtggaatgtttgttcaatgccttgagagacttggatttactccctacacaaacgttatgctgtgcagggggggctgttcctaagttatttcgtgggttgagcggacatgagttgaacttgggtatggacatcaactataaaacaactttgaacgtggcacatcagattgcccttgcagagcaaaccaaggaacaccacctcatcatcttttctagtgccaccgcgctttacccatttgtgggctattcccagtatgcgcctgcaaaagctgcaatcaaatctttagtagcaatcttaagacaagaattgacgaacttccgtatcagttgtgtttatcctggtaattttgaaagcgaaggtttcactgtagagcagttaacgaaacccgaaattacaaagttgatcgaaggcccctctgacgctatcccatgcaaacaagcatgtgatatcattgccaagtctttggccagaggtgatgatgacgtttttacagattttgtcggatggatgataatggggatggaccttgggctcaccgcaaagaaaagccgctttgttccgttgcaatggatttttggtgtcctttccaacattttagtcgtgccattctacatggttggctgttcctggtatatcaggaaatggtttcgtgaaaatgacggcaagaaggccaactga

SEQ ID NO: 931 - DNA, 1182 bp, Saccharomyces cerevisiae
atgagtagcagtggtgtttatacgtgtaattcatgtgtcctgacctttgattcaagcgacgagcagcgggcccacatgaagtccgattggcatcgctacaatttgaaaagacgtgttgcacaattgccaccaatatcatttgagacatttgactccaaagtgtctgcagctgctgccagtactagtaagtctgctgaaaaggagaaacctgttaccaaaaaggagttgaaaagaagggaaaagcaagcattgctcgaaaagaaaaagaaactgttggaaattgccagggctaatatgcttgaaaacatgcaaaagagccaagagggaaatactcccgacctaagcaagctctctttgcaagaaaatgaggagaacaaggaaaaggaagaacctaagaaggaggagcctgaacagttgaccgaggaagaaatggcggaaagagtaatgcaagaaaagctacgcaacagagtcgatattccactggaacaatgtctattttgtgagcacaataagcacttcaaagatgttgaagaaaacctggaacacatgtttaggacccacgggttttatatcccagaacagaaatatctagtcgacaagatcggcttggtaaaatacatgtcggagaagattggtcttgggaacatttgtattgtttgtaattaccaggggagaacgttgaccgctgtaagacagcacatgttggcaaagagacactgtaaaattccctacgaaagcgaggatgaaaggttggagatatctgaattctacgattttacaagctcatacgcaaactttaatagcaacacaacaccagacaacgaagatgactgggaagacgtgggcagcgacgaagccggaagcgacgacgaagatctgccacaagagtacttatataacgatggtatagagctgcatctaccgacaggcatcaaagttggccacaggtccttgcaaagatactacaagcaagacttaaagcccgaggtgatactgaccgaaggccaaggtaccctggtcgctgcagagacgagatcgttcttacctgccttcgacaaaaagggcgtgcagactcaacagcgtgtttggcaaactgagaggttcgacaagaaaaggctcgataagagaagtgccaagttcgtcaataaccaaccacactacagagaccaacttctgcagtaa

SEQ ID NO: 932 - DNA, 1182 bp, Artificial Sequence
  Description of Artificial Sequence: Synthetic polynucleotide
atgagtagcagtggtgtttatacgtgtaattcttgtgtcttgacctttgattctagcgacgagcagagagcccacatgaagtccgattggcatcgctacaatttgaaaagacgtgttgcacaattgccaccaatatcctttgagacatttgactccaaagtgtctgcagctgctgccagtactagtaagtctgctgaaaaggagaaacctgttaccaaaaaggagttgaaaagaagggaaaagcaagcattgctcgaaaagaaaaagaaacttttggaaattgccagggctaatatgcttgaaaacatgcaaaagagccaagagggaaatactcccgacttgagcaagctctctttgcaagaaaatgaggagaacaaggaaaaggaagaacctaagaaggaggagcctgaacagttgaccgaggaagaaatggcggaaagagtaatgcaagaaaagttgcgcaacagagtcgatattccattggaacaatgtttattttgtgagcacaataagcacttcaaagatgttgaagaaaacttggaacacatgtttaggacccacgggttttatatcccagaacagaaatatttagtcgacaagatcggcttggtaaaatacatgtctgagaagattggtcttgggaacatttgtattgtttgtaattaccaggggagaacgttgaccgctgtaagacagcacatgttggcaaagagacactgtaaaattccctacgaaagcgaggatgaaaggttggagatatctgaattctacgattttacaagctcttacgcaaactttaatagcaacacaacaccagacaacgaagatgactgggaagacgtgggcagcgacgaagccggaagcgacgacgaagatttaccacaagagtacttatataacgatggtatagagttacatttaccgacaggcatcaaagttggccacaggtccttgcaaagatactacaagcaagacttaaagcccgaggtgatattgaccgaaggccaaggtaccttggtcgctgcagagacgagatctttcttacctgccttcgacaaaaagggcgtgcagactcaacagcgtgtttggcaaactgagaggttcgacaagaaaaggctcgataagagaagtgccaagttcgtcaataaccaaccacactacagagaccaacttttacagtga

SEQ ID NO: 933 - DNA, 453 bp, Saccharomyces cerevisiae
atgtgttccaggttttcttcaacatctttgaagtgcttattgtgctcacaaaatagacattgttccagtggaatatcgactctgttgcgtagcttttcttgcattactctttccgccatttcttcctcggtcaactgttcaggctcctccttcttaggttcttccttttccttgttctcctcattttcttgcaaagagagcttgcttaggtcgggagtatttccctcttggctcttttgcatgttttcaagcatattagccctggcaatttccaacagtttctttttcttttcgagcaatgcttgcttttcccttcttttcaactcctttttggtaacaggtttctccttttcagcagacttactagtactggcagcagctgcagacactttggagtcaaatgtctcaaatgatattggtggcaattgtgcaacacgtcttttcaaattgtag

SEQ ID NO: 934 - DNA, 453 bp, Artificial Sequence
  Description of Artificial Sequence: Synthetic polynucleotide
atgtgttccaggttttcttctacatctttgaagtgcttattgtgctctcaaaatagacattgttccagtggaatatctactttattgcgtagcttttcttgcattactctttccgccatttcttcctctgtcaactgttctggctcctccttcttaggttcttccttttccttgttctcctctttttcttgcaaagagagcttgcttaggtctggagtatttccctcttggctcttttgcatgttttctagcatattagccttggcaatttccaacagtttctttttcttttctagcaatgcttgcttttcccttcttttcaactcctttttggtaacaggtttctccttttctgcagacttattggtattggcagcagctgcagacactttggagagcaatgtctccaatgatattggtggcaattgtgcaacacgtcttttcaaattgtga

SEQ ID NO: 935 - DNA, 318 bp, Saccharomyces cerevisiae
atgttggcgcgcagtttgggttacaggttgatatcgaccagtcgtatcttatataataaacccacggttaagtcagtggtgtcgtcgtgtcctgcgggaacatcgcttaacttaaacatatggaagagcggtaaagacgcagtggcactcgaggacaaggagtatccaaattggttatggagcgtattggatagtgatcacgttgtcgaacatgcggctgaggacccagagggacaggctctcttaaagagaagaaagaacataaggaaggcgaacaggcagcgaatcaagcaaaacaatttcttgagccaactttaa

SEQ ID NO: 936 - DNA, 318 bp, Artificial Sequence
  Description of Artificial Sequence: Synthetic polynucleotide
atgttggcgcgcagtttgggttacaggttgatatctaccagtcgtatcttatataataaacccacggttaagtctgtggtgtcttcttgtcctgcgggaacatctcttaacttaaacatatggaagagcggtaaagacgcagtggcactcgaggacaaggagtatccaaattggttatggagcgtattggatagtgatcacgttgtcgaacatgcggctgaggacccagagggacaggctctcttaaagagaagaaagaacataaggaaggcgaacaggcagagaatcaagcaaaacaatttcttgagccaactttga

SEQ ID NO: 937 - DNA, 417 bp, Saccharomyces cerevisiae
atgttgtgcgccatcaaaagcacaggttatcggtatcctcgcacgggagccttaaatctactacgtggacgaccatttaatatggccacccgaaaaataactactgaaaggatccccggccctcccaagctgccaagagaagagcaggaagagttcgaaagacttcagaggattgccacatcgcaagaggcaatagatcagtataatgcgcaggccaccggcgatcgtacaaaggagagtttgaattcaccgcttttaaccaaaaacgatattgggtcattctcgcctgaattttccaagaccatacctgaattcgaaggtgatgttaaccccaagactggtgaagttgggggtcccaagcaggacccgttgagacacggcgattattcgtttaacggaagagtaacggatttctag

SEQ ID NO: 938 - DNA, 417 bp, Artificial Sequence
  Description of Artificial Sequence: Synthetic polynucleotide
atgttgtgcgccatcaaaagcacaggttatcgttatcctcgcacgggagccttaaatttattacgtggaagaccatttaatatggccaccagaaaaataactactgaaaggatccccggccctcccaagttaccaagagaagagcaggaagagttcgaaagacttcagaggattgccacatctcaagaggcaatagatcagtataatgcgcaggccaccggcgatcgtacaaaggagagtttgaattctccgcttttaaccaaaaacgatattgggtctttcagtcctgaattttccaagaccatacctgaattcgaaggtgatgttaaccccaagactggtgaagttgggggtcccaagcaggacccgttgagacacggcgattattcttttaacggaagagtaacggatttctga

SEQ ID NO: 939 - DNA, 1638 bp, Saccharomyces cerevisiae
atggcaacagacctaaatcgtaaaagaagtgctacctcaggctcactgagcgtcacgaacccgaacataaaagcaactaatcgcaaaccagctagagtttatagtgtttcttctgatatagtaccgcaagcgctgacacatcccgacgaagatgtgcatctaaaaacatccaaatctcctcatgatgccgctcctagatggtcacaggtggggtttcaatctatattccatgatggttccaatgcaaggcgctcgacggattcgattgaagaggagtacagccaaggcacggagaataacgatggtcactccgaaataggttcatcaagtagtaaccgaatggaggggaacaccacgtctaatgatagtttattttcttccaactcaaggggcaataaaaggcgactgtccatcttcaccaattcaaaagataatatgagaaatcgaagcaggagcgggtcaaaaaactacggcactgttattaccggcacaagtagtaacaacataagtaggagtggctctaaattgtttcatacgaaatctaatatgagtgtgaacagtttacaatcttcactgtctacaggacattctcattcaaacaaaggcagtaatgtctttagcaaaatggcaaaaaagcttttaccctacaagccgcataattccattggtaaagacgacgttgaacccgtagttcccagcccattcagtaaatttctgcattcttcatatggtaaacataggtcacccgtacagtttatccatacttctactggaggccttattgactctggaaaatctgtatattcctttaaccctagcattaacaacaaccctaatgatacagctctatcgctgatccaagatgatgctttcgacgcgactaatgtttctttactacatgatttactgaaaaacttgccatccttgatagcaaactataaaagcttcaccgtacaggagttatttgttctggaggggaatatctggggtatatactgcagcatagttgtggagctatttaaaaacaagagggtatggcaattgccagcaaaaatagaagatattgaccggctgctggaattttatatcactttgaaaacacaaaccaaggctgccgtaacgcactcaaggtttttggccgaaatcgaggaattcattaccacttcactttacattttagagaaccagattgtgttcaattatgccaatgaggataccgtaaatacggctttgaaaagagtcggcataatctggaaggtgttttaccaacaggtttactacgacatgatggcagtgttactgcccttcgagaaaagcttccaaaaaaatagtaactactggcttgacggatatctatctgaaccttcaaggtacgcaccgtcaattgatgtccttttattaaagtgttttagagactccatcattcttccgtattacgaaagcttcctacatacaaatgacggtgccagtaagagttttcaaagatatattttcagcgaggaagaacagaacggcgtcacagaggaagataaactgacgctgctgcagtgttttgggatcctgaataccataaaaggtaacagcagaaaccaaagaattattggtgaacttcttgagggcatacgcatgagtatataa

SEQ ID NO: 940 - DNA, 1638 bp, Artificial Sequence
  Description of Artificial Sequence: Synthetic polynucleotide
atggcaacagacttgaatcgtaaaagaagtgctacctctggctctttaagcgtcacgaacccgaacataaaagcaactaatcgcaaaccagctagagtttatagtgtttcttctgatatagtaccgcaagcgttaacacatcccgacgaagatgtgcatttgaaaacatccaaatctcctcatgatgccgctcctagatggtctcaggtggggtttcaatctatattccatgatggttccaatgcaaggcgctccacggattctattgaagaggagtacagccaaggcacggagaataacgatggtcactccgaaataggttcttccagtagtaacagaatggaggggaacaccacgtctaatgatagtttattttcttccaacagcaggggcaataaaaggaggctttccatcttcaccaattctaaagataatatgagaaatagaagcaggagcgggtctaaaaactacggcactgttattaccggcacaagtagtaacaacataagtaggagtggctctaaattgtttcatacgaaatctaatatgagtgtgaacagtttacaatcttctttatctacaggacattctcattccaacaaaggcagtaatgtctttagcaaaatggcaaaaaagcttttaccctacaagccgcataattccattggtaaagacgacgttgaacccgtagttcccagcccattcagtaaatttttacattcttcttatggtaaacataggtctcccgtacagtttatccatacttctactggaggccttattgactctggaaaatctgtatattcctttaaccctagcattaacaacaaccctaatgatacagctttatctttgatccaagatgatgctttcgacgcgactaatgtttctttattacatgatttattgaaaaacttgccatccttgatagcaaactataaaagcttcaccgtacaggagttatttgttttggaggggaatatctggggtatatactgcagcatagttgtggagttatttaaaaacaagagggtatggcaattgccagcaaaaatagaagatattgacagattattggaattttatatcactttgaaaacacaaaccaaggctgccgtaacgcactctaggtttttggccgaaatcgaggaattcattaccacttctctttacattttagagaaccagattgtgttcaattatgccaatgaggataccgtaaatacggctttgaaaagagtcggcataatctggaaggtgttttaccaacaggtttactacgacatgatggcagtgttattgcccttcgagaaaagcttccaaaaaaatagtaactactggcttgacggatatttatctgaaccttctaggtacgcaccgtctattgatgtccttttattaaagtgttttagagactccatcattcttccgtattacgaaagcttcttacatacaaatgacggtgccagtaagagttttcaaagatatattttcagcgaggaagaacagaacggcgtcacagaggaagataaattaacgttattgcagtgttttgggatcttgaataccataaaaggtaacagcagaaaccaaagaattattggtgaacttcttgagggcatacgcatgagtatatga

SEQ ID NO: 941 - DNA, 1260 bp, Saccharomyces cerevisiae
atgtttgatcctctcgatttgtacacccctgatgacatccaggttgaggctttacagttcaatctagcagagagagagccaaaagatccttgctcaccgcaacgtgacgaaatattaacggctgtagatgaagaagagagtgacgacgatgacaccattatcgataatctggatctgccctccgtgaagtatgctccgccagaagttatcctttgtatactaatacttctgaagcccgatagacaagtaaacttcaatcaggagacagggaagaacaaatctgtactggaggtttgcaagagtcatgggctggaacccgatctgctgaaaagacttttgacttggtatacagaagaatggcctaacaagaggttaaactcgttggaaaagatatgcaataaaatcccaatgctgagatttacagtatccaaagaactactgttgggctactatactagtgtattgaaaaaatacaataatagttgcggattgaatgaggaaatcatacaagaacttcttaaggaattgagctcaaggatatccgaaaactgtgggagaacggcccaaccatccatagtaagatattttgaattaagaaatctaagcacttccataccgcttcatgaaccctctttaacggccgataatcttggttggaaaacatggggatcatctttaatactttcacaattagtcgtagatcacctggattacctacataccactaatgtgaacatgttagcgaacagcgacatcaaacagattaaagtattagaattaggagcgggcactggtttagtaggactttcatgggccttaaaatggaaagaactttatggaactgaaaatatagaaatcttcgtgacggatttacccgagattgtgacgaatttgaagaaaaatgtgtcattaaataatttaggagatttcgttcaagcagagatattagattggactaatcctcacgattttatagataaatttggacatgaaaatgaatttgacgtcatattgatcgccgacccgatatattcgcctcagcatccggaatgggtagttaacatgatatcgaagtttttggcggcatcagggacctgtcacctagaaatacctttaagggcaaaatacgccaaagaacgagaggttttgaaattattactaaaagagagtgatttaaaagtagttgaagaacggcattcagagggtgtggatgattggggtgccgttaagtatttatataggcaaatcgttcgcaattag

SEQ ID NO: 942 - DNA, 1260 bp, Artificial Sequence
  Description of Artificial Sequence: Synthetic polynucleotide
atgtttgatcctctcgatttgtacacccctgatgacatccaggttgaggctttacagttcaatttggcagagagagagccaaaagatccttgctctccgcaacgtgacgaaatattaacggctgtagatgaagaagagagtgacgacgatgacaccattatcgataatttggatttgccctccgtgaagtatgctccgccagaagttatcctttgtatattaatacttttgaagcccgatagacaagtaaacttcaatcaggagacagggaagaacaaatctgtattggaggtttgcaagagtcatgggttggaacccgatttattgaaaagacttttgacttggtatacagaagaatggcctaacaagaggttaaactctttggaaaagatatgcaataaaatcccaatgttgagatttacagtatccaaagaattattattgggctactatactagtgtattgaaaaaatacaataatagttgcggattgaatgaggaaatcatacaagaacttcttaaggaattgagcagtaggatatccgaaaactgtgggagaacggcccaaccatccatagtaagatattttgaattaagaaatttgagcacttccataccgcttcatgaaccctctttaacggccgataatcttggttggaaaacatggggatcttctttaatactttctcaattagtcgtagatcacttggattacttgcataccactaatgtgaacatgttagcgaacagcgacatcaaacagattaaagtattagaattaggagcgggcactggtttagtaggactttcttgggccttaaaatggaaagaactttatggaactgaaaatatagaaatcttcgtgacggatttacccgagattgtgacgaatttgaagaaaaatgtgtctttaaataatttaggagatttcgttcaagcagagatattagattggactaatcctcacgattttatagataaatttggacatgaaaatgaatttgacgtcatattgatcgccgacccgatatattctcctcagcatccggaatgggtagttaacatgatatccaagtttttggcggcatctgggacctgtcacttggaaatacctttaagggcaaaatacgccaaagaaagagaggttttgaaattattattgaaagagagtgatttaaaagtagttgaagaaagacattctgagggtgtggatgattggggtgccgttaagtatttatataggcaaatcgttcgcaattga

SEQ ID NO: 943 - DNA, 1443 bp, Saccharomyces cerevisiae
atgagtgagaaagaaacaaattacgtggaaaatctccttacgcaattagaaaatgaacttaatgaagataacttgcctgaagatatcaacacactattaaggaaatgttctttgaatcttgtgactgttgtctcccttccagatatggatgttaaaccactactggctacgatcaagcgttttctgacgtctaacgtatcctatgattcattgaattacgattaccttttggacgttgtggacaagcttgttcccatggctgattttgacgatgttctagaagtttatagcgcggaggacttagtgaaggcccttaggtcagaaatagatccattaaaagtagcagcatgtagagtcattgagaattcgcagccaaagggtttattcgcgaccagtaatatcatcgatattctattggatattctatttgatgagaaagtggagaatgataagctcattacagcaatcgaaaaagcgttggaaaggttgagtacagatgaattgattaggcgtcgattatttgataataatttgccatacctggtgagcgtaaagggtagaatggaaacggtttcttttgtcagattaattgacttcttgactattgagtttcaattcatcagcggtcctgagttcaaggatatcatattttgctttactaaagaagagatactgaaatccgttgaagatatcctcgttttcatcgaattggttaattattatactaagtttttgctggaaatacgaaatcaagataaatactgggctttaagacatgtaaaaaaaatactgccagtatttgctcaactttttgaagacacggagaactatcctgatgtcagggccttttctacaaattgtcttttacagttattcgcagaggtgtcacgaattgaggaagatgaatattctttattcaagactatggacaaagattctttaaaaattgggtccgaagcaaaattaataaccgagtggttggaattaattaatccgcagtacttggtaaaatatcataaagatgtggtcgaaaactattttcacgtcagtggctacagcattggaatgttgagaaatctttcagcagatgaagaatgtttcaatgctataagaaacaagtttagtgctgagattgtcttaagactaccgtacttagaacaaatgcaagtagtagaaaccttgacgagatacgaatacacttcaaaatttctgctcaatgagatgccaaaggtgatgggcagcttgataggtgatgggagcgcaggtgctattatagatcttgagactgtgcattataggaattctgccttgagaaatttactggacaaaggtgaagaaaagttaagtgtatggtatgaacctttattgcgagaatactccaaagcagttaacggaaaaaattattccacaggcagtgaaactaagattgcagattgcagatga

SEQ ID NO: 944 - DNA, 1443 bp, Artificial Sequence
  Description of Artificial Sequence: Synthetic polynucleotide
atgagtgagaaagaaacaaattacgtggaaaatctccttacgcaattagaaaatgaacttaatgaagataacttgcctgaagatatcaacacattattaaggaaatgttctttgaatcttgtgactgttgtctcccttccagatatggatgttaaaccattattagctacgatcaagcgttttttaacgtctaacgtatcctatgattctttgaattacgattaccttttggacgttgtggacaagcttgttcccatggctgattttgacgatgttttggaagtttatagcgcggaggacttagtgaaggcccttaggtctgaaatagatccattaaaagtagcagcatgtagagtcattgagaattctcagccaaagggtttattcgcgaccagtaatatcatcgatattttattggatattttatttgatgagaaagtggagaatgataagctcattacagcaatcgaaaaagcgttggaaaggttgagtacagatgaattgattaggcgtcgtttatttgataataatttgccatacttggtgagcgtaaagggtagaatggaaacggtttcttttgtcagattaattgacttcttgactattgagtttcaattcatcagcggtcctgagttcaaggatatcatattttgctttactaaagaagagatattgaaatccgttgaagatatcctcgttttcatcgaattggttaattattatactaagtttttgttggaaataagaaatcaagataaatactgggctttaagacatgtaaaaaaaatattgccagtatttgctcaactttttgaagacacggagaactatcctgatgtcagggccttttctacaaattgtcttttacagttattcgcagaggtgtccagaattgaggaagatgaatattctttattcaagactatggacaaagattctttaaaaattgggtccgaagcaaaattaataaccgagtggttggaattaattaatccgcagtacttggtaaaatatcataaagatgtggtcgaaaactattttcacgtcagtggctacagcattggaatgttgagaaatctttctgcagatgaagaatgtttcaatgctataagaaacaagtttagtgctgagattgtcttaagattaccgtacttagaacaaatgcaagtagtagaaaccttgacgagatacgaatacacttctaaatttttactcaatgagatgccaaaggtgatgggcagcttgataggtgatgggagcgcaggtgctattatagatcttgagactgtgcattataggaattctgccttgagaaatttattagacaaaggtgaagaaaagttaagtgtatggtatgaacctttattgagagaatactccaaagcagttaacggaaaaaattattccacaggcagtgaaactaagattgcagattgcagatga

SEQ ID NO: 945 - DNA, 1311 bp, Saccharomyces cerevisiae
atgttagaagcactgtttagagattctgtggaagaagcaataaacgattccatcaaggaaggcgttgtgctggccgtttacaacactgcacgggatgaccagtggctgaaaagttggtttaaaggagatgatgtctcattagatactttagcggaacatagtatttggttgaggttggtcaaagacactgagcagttccagttatttgagcaagtatttcctaatgtagttgtacccagtatatacttgatacgtgctggaaagatagaattgattattcaaggcgaggatgaccgacattgggagaagttgctggcgtgcataggcatcaaagacaaaaaggctggtgagagttcgtccagggaaaccaatccaggtttggctagagaagaaaagtcatccagagacgtccataggaaaaatgcaagagaacggattgctgagactaccttagagatccaacgtcgtgaacaactgaaacaaagaaagctggctgaggaggaaagagaaagaattataagacttgttagggcagaccgtgcagaaagaaaagctcttgatgaaactcatcacagaacccttgatgatgataagccattggatgttcatgattacataaaagacgcacaaaaactgcacagcagcaaatgcgtcttgcaaatcaggatgactgatggcaagactctaaaacatgagttcaactcgtctgaaacattaaatgacgttagaaaatgggtggacgtcaacaggacagatggagactgcccgtactcattccacaggggcattcccagagtgacatttaaggattctgatgaattgaagacgctagagacactagaactaactccaaggtctgcattattacttaaaccactagaaactcaaaactcggggctatctgtgactgggatggagggaccaagccttttgggccgtctttataagggattctctacgtggtggcacaacgataaagatcctgaagtaacatcacaacgtgaggaaacatcgaagccgaatcgtcacgaagtgaggtcttcaacacctttatctggagctgcttcgtcaagctgtttccaatacaacaatgttcgggaaccagttcaatcatctgctcatgcatcaccaatgctgacacctagcggaaccaggtacccatcggaaaccaaccttactacgtcacgttctgtctcgccaaatgttttccaatttgttaacaacgatcatcaagaagatcctgaagacccaacaacctttaatggtaataatgtccatttagaaaagaaaaaggacgaagataaaaaataa

SEQ ID NO: 946 - DNA, 1311 bp, Artificial Sequence
  Description of Artificial Sequence: Synthetic polynucleotide
atgttagaagcattatttagagattctgtggaagaagcaataaacgattccatcaaggaaggcgttgtgcttgccgtttacaacactgcaagagatgaccagtggttgaaaagttggtttaaaggagatgatgtctctttagatactttagcggaacatagtatttggttgaggttggtcaaagacactgagcagttccagttatttgagcaagtatttcctaatgtagttgtacccagtatatacttgatacgtgctggaaagatagaattgattattcaaggcgaggatgacaggcattgggagaagttgttagcgtgcataggcatcaaagacaaaaaggctggtgagagttcttccagggaaaccaatccaggtttggctagagaagaaaagtcttccagagacgtccataggaaaaatgcaagagaaagaattgctgagactaccttagagatccaacgtcgtgaacaattgaaacaaagaaagttggctgaggaggaaagagaaagaattataagacttgttagggcagaccgtgcagaaagaaaagctcttgatgaaactcatcacagaacccttgatgatgataagccattggatgttcatgattacataaaagacgcacaaaaattacacagcagcaaatgcgtcttgcaaatcaggatgactgatggcaagactttgaaacatgagttcaactcttctgaaacattaaatgacgttagaaaatgggtggacgtcaacaggacagatggagactgcccgtactctttccacaggggcattcccagagtgacatttaaggattctgatgaattgaagacgttggagacattagaattgactccaaggtctgcattattacttaaaccattggaaactcaaaactctgggttatctgtgactgggatggagggaccaagccttttgggccgtctttataagggattctctacgtggtggcacaacgataaagatcctgaagtaacatctcaacgtgaggaaacatccaagccgaatcgtcacgaagtgaggtcttctacacctttatctggagctgcttcttctagctgtttccaatacaacaatgttagagaaccagttcaatcttctgctcatgcatctccaatgttaacacctagcggaaccaggtacccatctgaaaccaaccttactacgagtcgttctgtctctccaaatgttttccaatttgttaacaacgatcatcaagaagatcctgaagacccaacaacctttaatggtaataatgtccatttagaaaagaaaaaggacgaagataaaaaatga

SEQ ID NO: 947 - DNA, 1584 bp, Saccharomyces cerevisiae
atgagtctctcgcaggtgtcacctttaccccatatcaaggatgttgttttaggagatacagtaggccaaggcgcattcgcctgcgttaaaaatgctcatcttcaaatggatccctccattattctagctgttaaattcattcatgttcccacttgcaaaaaaatgggactcagtgacaaggatatcacaaaagaggttgttttgcaatcgaagtgttctaagcatcctaatgttttgagacttatcgattgtaatgtctctaaagaatatatgtggataattctggagatggcagatggtggtgatctatttgataagattgagcctgacgttggagttgattccgacgtggcccaattttactttcaacagctcgttagtgctattaattatctgcatgtagaatgtggagttgctcacagagacatcaagcctgaaaacatcttactcgataagaacggaaatctgaagctagctgattttgggctcgcctctcaatttaggaggaaagatggtacattacgtgtatccatggatcaaaggggttctccaccctacatggctcctgaagtattatattctgaagagggttattacgcagatcgaacagatatatggtctattggcatcctcttgttcgtattgttgactggtcaaacgccttgggaattaccttcattagagaacgaagatttcgtcttttttattgaaaatgatggaaatttaaactggggaccctggtcaaagatagaatttactcacttgaacctactccgaaaaattttacaacctgacccaaataagagggtgacattgaaggctttaaagttacatccttgggtattacgtcgagcttcattttctggggatgatggtctctgtaatgaccctgaactcttggctaagaaactgttttctcacttaaaagtctcactgagtaacgaaaattatttgaaattcactcaagatacaaactctaataataggtacatttctactcagccaattggtaacgaattggctgagcttgaacacgactcaatgcatttccagacagtttcgaatacacaacgtgcatttacctcgtatgattcaaatacgaactataatagcggaacaggtatgacacaagaggctaagtggacgcaattcataagctatgatatcgctgccttacagtttcattctgatgaaaatgattgtaatgaattagtaaaacgacatttacaatttaatccgaataaacttaccaagttctacacgttgcaacctatggatgttttgttaccgattttggagaaagccttgaatttatcacaaattagagtaaaacccgacctttttgcgaattttgaaagattgtgcgaattattgggttatgataacgttttcccacttattataaatattaaaaccaaaagtaatgggggttatcaattatgcggtagcatttccatcataaagattgaagaagagttgaaaagtgtcggatttgaaagaaaaactggtgatcctttagaatggagaagattgttcaagaaaatttcaactatctgtagggatattatcctaattcccaactga

SEQ ID NO: 948 - DNA, 1584 bp, Artificial Sequence
  Description of Artificial Sequence: Synthetic polynucleotide
atgagtctctctcaggtgtctcctttaccccatatcaaggatgttgttttaggagatacagtaggccaaggcgcattcgcctgcgttaaaaatgctcatcttcaaatggatccctccattattttggctgttaaattcattcatgttcccacttgcaaaaaaatgggactcagtgacaaggatatcacaaaagaggttgttttgcaatccaagtgttctaagcatcctaatgttttgagacttatcgattgtaatgtctctaaagaatatatgtggataattttagagatggcagatggtggtgatttatttgataagattgagcctgacgttggagttgattccgacgtggcccaattttactttcaacagctcgttagtgctattaattatttgcatgtagaatgtggagttgctcacagagacatcaagcctgaaaacatcttactcgataagaacggaaatttgaagttggctgattttgggctcgcctctcaatttaggaggaaagatggtacattacgtgtatccatggatcaaaggggttctccaccctacatggctcctgaagtattatattctgaagagggttattacgcagatagaacagatatatggtctattggcatcctcttgttcgtattgttgactggtcaaacgccttgggaattaccttctttagagaacgaagatttcgtcttttttattgaaaatgatggaaatttaaactggggaccctggtccaagatagaatttactcacttgaacttactcagaaaaattttacaacctgacccaaataagagggtgacattgaaggctttaaagttacatccttgggtattacgtcgtgcttctttttctggggatgatggtctctgtaatgaccctgaactcttggctaagaaattattttctcacttaaaagtctctttgagtaacgaaaattatttgaaattcactcaagatacaaactctaataataggtacatttctactcagccaattggtaacgaattggctgagcttgaacacgactccatgcatttccagacagtttctaatacacaacgtgcatttacctcttatgattctaatacgaactataatagcggaacaggtatgacacaagaggctaagtggacgcaattcataagctatgatatcgctgccttacagtttcattctgatgaaaatgattgtaatgaattagtaaaaagacatttacaatttaatccgaataaacttaccaagttctacacgttgcaacctatggatgttttgttaccgattttggagaaagccttgaatttatctcaaattagagtaaaacccgacctttttgcgaattttgaaagattgtgcgaattattgggttatgataacgttttcccacttattataaatattaaaaccaaaagtaatgggggttatcaattatgcggtagcatttccatcataaagattgaagaagagttgaaaagtgtcggatttgaaagaaaaactggtgatcctttagaatggagaagattgttcaagaaaatttctactatctgtagggatattatcttgattcccaactga

SEQ ID NO: 949 - DNA, 5751 bp, Saccharomyces cerevisiae
atgtcgaaagatttttcagataaaaagaaacatacgatagatcgaattgatcagcatatcctccgtaggtctcaacacgataattattccaatggaagctctccgtggatgaaaactaacttgccacctccatctccacaagctcatatgcatatacaaagcgatctatcgccaacgccaaagaggcgaaagctagcgtcttcaagtgattgcgagaataaacaatttgatttatcagctattaacaagaatttatatccagaagatacaggaagcaggctaatgcaaagtcttccagagttgtctgcctctaatagtgataatgtatcaccggttacaaaaagtgtagctttttctgataggatagaatcatcaccgatttaccgcataccaggttcctcacctaaaccctctccatcaagcaaaccaggaaaatcaattttgaggaataggttgccttcagtgaggactgtaagcgacttgagttacaataaactccaatatacccaacacaaattacacaacggtaatattttcacatcaccttataaggaaacaagggtaaatcctcgcgccttagagtattgggtgagtggtgagatccatggtttagttgataatgaaagtgtttcggagtttaaagaaattattgagggcggattgggcatcttgcgacaagaatctgaagattacgtcgcgaggaggtttgaggtatacgcaacctttaataatattatacccattctaaccactaaaaatgttaacgaggttgatcagaaattcaatattctaattgtgaatatagaaagtatcattgaaatatgcataccgcatctacaaatagcacaggacacattattaagtagtagtgaaaaaaaaaatccatttgtaatcagactatatgttcaaatagttcgattcttcagtgctattatgtctaatttcaaaatcgttaagtggctaacgaaaaggccagatttggttaataagttaaaagttatttacaggtggaccaccggtgcgctaagaaatgaaaattcaaacaagataatcataacagcacaagtctctttcttgagagacgaaaaatttggtacttttttcttgagcaacgaagaaattaaacctatcattagcactttcactgaaataatggaaatcaatagtcacaacctaatatatgaaaaattgctacttataaggggatttttgagcaagtatccaaaattaatgattgagacggtaacttcttggttaccaggtgaggtactacctaggattattatcggagatgaaatttactccatgaaaattctcataacttcaatagttgttttactggaactactaaaaaaatgcttagattttgttgatgaacatgaaaggatttaccagtgtatcatgctatctccagtatgcgaaacaatcccggaaaaatttttatctaaactaccgttaaattcatatgacagcgctaatttagataaagtgacaattggtcatcttcttacacagcagataaaaaactatattgtggtcaaaaatgacaataaaatagcaatggatttgtggctttcaatgaccggattactatacgatagcggaaagagagtttatgatttgacatcagaatctaacaaagtttggtttgatttaaataacctgtgctttatcaataatcaccccaagactcgcttaatgtccatcaaagtttggagaattattacctactgcatatgcacgaaaatatcacagaaaaatcaggaaggaaacaaaagtttactgtcacttttacgaaccccttttcaaatgacgcttccttatgtgaatgatccaagcgctagagaagggatcatctaccaccttttaggtgttgtttacactgcatttacaagtaataagaatttgtcaacagatatgtttgaactattttgggaccacctaataaccccgatttatgaagattatgttttcaaatatgattcgattcacttgcaaaatgtactcttcacagttttgcatttgttaattgggggaaagaatgcagatgttgcattggaaagaaaatataaaaagcatattcacccaatgagtgttatagcctcagaaggtgtaaagttaaaagacatttcaagcctgcccccgcagatcatcaagcgtgaatacgataaaatcatgaaagttgtgttccaggctgttgaagtagccatttctaacgttaatttggctcatgatctgatccttacatctttgaagcatcttccagaggatagaaaggaccaaactcatttagaatcctttagcagtcttatattaaaagtcacgcaaaacaacaaagatacacccatttttcgtgacttttttggtgctgttacttcatcgtttgtttatacatttttggacctgtttttaagaaagaatgattcatcattagtaaatttcaatatccaaatttccaaagttggtatttcgcaaggaaacatgacccttgatcttttaaaagatgttatcaggaaagctcgaaacgaaacatctgaatttctgataatagaaaagtttctagaattggatgataagaaaacagaagtatatgcccaaaattgggttggatcaacgttattaccaccaaatatatctttcagagaatttcagagtttggcgaatattgtgaacaaagttccgaatgaaaattccattgaaaatttcttggacctatgtttgaagctcagctttccagttaatttgtttacactacttcatgtgtctatgtggtcgaacaataattttatttatttcattcaaagctatgtttcaaaaaatgaaaacaaattaaacgtggatctgatcacgctgttaaaaacttctttaccagggaatcctgaactgttttccggtctgctcccatttttaaggcgtaacaaatttatggatattttggagtactgtattcattccaatccaaatttactaaattccatccctgatctaaattcagatctcctattgaagctgttaccacgtagcagagcttcatattttgcagcaaacataaaactattcaagtgctccgaacagcttacattagttcgttggctgttgaagggtcaacaacttgaacagctaaatcaaaatttttcagaaatcgagaacgttttacaaaatgcgtctgatagcgagttagaaaaatcagaaataatcagagaactccttcatctggcgatggcaaatcccattgaaccattattcagtggcctattgaatttttgcataaagaataatatggcggatcatttggatgaattttgcggaaatatgaccagcgaagttcttttcaaaataagtccagagctactgttaaaattactgacgtataaggagaagcctaatgggaagttactggcagcagttattgaaaaaattgaaaatggagatgatgattatatattggagttgcttgaaaagattattatacaaaaagagatccaaattttggaaaaattaaaggagccacttttagttttcttcttaaatccagttagctctaatatgcaaaaacacaaaaagagtacaaatatgctccgtgaattagtcttattatatctcactaaaccgctttctagaagtgccgccaaaaaatttttttccatgttaattagtatattaccgccaaaccctaactatcaaactattgatatggttaatctgttgattgacctcatcaaatcacataatcgtaagtttaaagataagagaacctataatgcaacattaaagacaataggaaagtggatacaggaatcgggcgtggttcatcaaggggactcaagtaaggaaattgaagctatacctgacactaagtcgatgtatattccatgcgaagggagtgaaaataaactttcaaacttacagagaaaagtggattctcaagatatccaggttccggctacgcagggaatgaaagagcctccctcctcaattcaaatatcttcccagattagtgcgaaagattcagattcaatatcgcttaaaaatactgcaataatgaattcttcacagcaagaatcacatgctaaccgaagcagatcaattgatgatgaaacactagaggaagtggataatgaaagcattagagaaatagatcagcagatgaagagtacgcagttagataaaaacgtggccaatcatagcaacatttgttctactaaaagcgatgaggtggatgttactgagctgcatgaaagtattgatacacaatcctcggaagtgaacgcataccaaccgatagaagttctcactagcgaactgaaggcggtaacaaatagatctatcaaaacgaatcctgatcataacgttgttaacagtgataatcctctaaaacgaccttccaaagagacgcctacctctgaaaataaaagatcgaaaggtcatgaaacgatggtggacgttttagtttctgaggaacaagcggtgtcgcctagcagtgacgttatatgtactaacatcaagagtatagccaacgaagaatcttcgttagctttaaggaatagcataaaagtggaaacaaactgtaatgaaaattccttgaatgtcactttagatcttgaccagcaaaccataacaaaggaagatggaaaagggcaagttgaacatgttcaaagacaggagaaccaggaaagtatgaataaaatcaacagtaaaagttttacgcaagacaatattgcacagtacaagagcgtgaagaaagcccgtcctaataatgagggtgaaaacaacgattatgcttgtaatgttgaacaagcctctccagtaaggaatgaggtgccaggagacggcattcagatcccgagtgggactatacttctcaatagttcaaagcagacagaaaaatcaaaagttgatgacttgcgtagtgatgaagatgaacatggaacggttgcgcaagagaaacatcaagtgggtgcaataaacagtagaaacaaaaataatgacaggatggacagcacacccattcaaggcactgaagaagaatctagggaagttgttatgaccgaagaaggtatcaatgtacgcttagaagatagtggaacatgcgaacttaataaaaatttgaagggaccgcttaaaggagataaggatgccaatattaatgacgattttgtacctgttgaagaaaatgtcagagatgagggctttttaaaatcaatggaacatgcggtatctaaagagacaggtctagaagaacaacccgaagttgctgatatttcagtgttaccagaaattcgtatacccattttcaattctttgaaaatgcaagggtcaaagagccaaataaaagagaaattgaaaaagagattgcaaaggaatgagttaatgccaccagattcacctcctcgaatgacagaaaatacaaatatcaacgcgcagaatggcttagacaccgtaccaaaaacaattggtggaaaagaaaaacaccatgaaattcaattaggccaagcccacacagaagcagatggcgaacctttgttggggggagatggtaacgaagatgctacatctagggaagccacaccttcattaaaagtgcactttttttcaaaaaagtcgagaaggttagtggccagattgagagggttcacaccgggcgacttgaacggaatatctgtggaagaaagaagaaacttgagaattgaattattagattttatgatgaggctcgaatattactcaaacagggataatgatatgaattga

SEQ ID NO: 950 - DNA, 5751 bp, Artificial Sequence
  Description of Artificial Sequence: Synthetic polynucleotide
atgtccaaagatttttctgataaaaagaaacatacgatagatagaattgatcagcatatcctccgtaggtctcaacacgataattattccaatggaagctctccgtggatgaaaactaacttgccacctccatctccacaagctcatatgcatatacaaagcgatttatctccaacgccaaagaggcgtaagttggcgtcttccagtgattgcgagaataaacaatttgatttatctgctattaacaagaatttatatccagaagatacaggaagcaggttgatgcaaagtcttccagagttgtctgcctctaatagtgataatgtatccccggttacaaaaagtgtagctttttctgataggatagaatcttctccgatttaccgcataccaggttcctcccctaaaccctctccatccagcaaaccaggaaaatccattttgaggaataggttgccttctgtgaggactgtaagcgacttgagttacaataaactccaatatacccaacacaaattacacaacggtaatattttcacatctccttataaggaaacaagggtaaatcctcgcgccttagagtattgggtgagtggtgagatccatggtttagttgataatgaaagtgtttctgagtttaaagaaattattgagggcggattgggcatcttgagacaagaatctgaagattacgtcgcgaggaggtttgaggtatacgcaacctttaataatattatacccattttgaccactaaaaatgttaacgaggttgatcagaaattcaatattttaattgtgaatatagaaagtatcattgaaatatgcataccgcatttacaaatagcacaggacacattattaagtagtagtgaaaaaaaaaatccatttgtaatcagattatatgttcaaatagttagattcttcagtgctattatgtctaatttcaaaatcgttaagtggttgacgaaaaggccagatttggttaataagttaaaagttatttacaggtggaccaccggtgcgttaagaaatgaaaatagcaacaagataatcataacagcacaagtctctttcttgagagacgaaaaatttggtacttttttcttgagcaacgaagaaattaaacctatcattagcactttcactgaaataatggaaatcaatagtcacaacttgatatatgaaaaattgttacttataaggggatttttgagcaagtatccaaaattaatgattgagacggtaacttcttggttaccaggtgaggtattacctaggattattatcggagatgaaatttactccatgaaaattctcataacttccatagttgttttattggaattattgaaaaaatgcttagattttgttgatgaacatgaaaggatttaccagtgtatcatgctttctccagtatgcgaaacaatcccggaaaaatttttatctaaattaccgttaaattcttatgacagcgctaatttagataaagtgacaattggtcatcttcttacacagcagataaaaaactatattgtggtcaaaaatgacaataaaatagcaatggatttgtggctttctatgaccggattattgtacgatagcggaaagagagtttatgatttgacaagtgaatctaacaaagtttggtttgatttaaataacttatgctttatcaataatcaccccaagactcgcttaatgtccatcaaagtttggagaattattacctactgcatatgcacgaaaatatctcagaaaaatcaggaaggaaacaaaagtttattatctcttttaagaaccccttttcaaatgacgcttccttatgtgaatgatccaagcgctagagaagggatcatctaccaccttttaggtgttgtttacactgcatttacaagtaataagaatttgagtacagatatgtttgaattattttgggaccacttgataaccccgatttatgaagattatgttttcaaatatgattctattcacttgcaaaatgtactcttcacagttttgcatttgttaattgggggaaagaatgcagatgttgcattggaaagaaaatataaaaagcatattcacccaatgagtgttatagccagtgaaggtgtaaagttaaaagacatttctagcttgcccccgcagatcatcaagcgtgaatacgataaaatcatgaaagttgtgttccaggctgttgaagtagccatttctaacgttaatttggctcatgatttgatccttacatctttgaagcatcttccagaggatagaaaggaccaaactcatttagaatcctttagcagtcttatattaaaagtcacgcaaaacaacaaagatacacccatttttcgtgacttttttggtgctgttacttcttcttttgtttatacatttttggacttatttttaagaaagaatgattcttctttagtaaatttcaatatccaaatttccaaagttggtatttctcaaggaaacatgacccttgatcttttaaaagatgttatcaggaaagctagaaacgaaacatctgaatttttaataatagaaaagtttttggaattggatgataagaaaacagaagtatatgcccaaaattgggttggaagtacgttattaccaccaaatatatctttcagagaatttcagagtttggcgaatattgtgaacaaagttccgaatgaaaattccattgaaaatttcttggacttatgtttgaagctcagctttccagttaatttgtttacattgcttcatgtgtctatgtggagcaacaataattttatttatttcattcaaagctatgtttccaaaaatgaaaacaaattaaacgtggatttgatcacgttattaaaaacttctttaccagggaatcctgaattattttccggtttactcccatttttaaggcgtaacaaatttatggatattttggagtactgtattcattccaatccaaatttattgaattccatccctgatttgaattctgatctcttattgaagcttttaccacgtagcagagcttcttattttgcagcaaacataaaattattcaagtgctccgaacagcttacattagttcgttggttattgaagggtcaacaacttgaacagttgaatcaaaatttttctgaaatcgagaacgttttacaaaatgcgtctgatagcgagttagaaaaaagtgaaataatcagagaactccttcatttagcgatggcaaatcccattgaaccattattcagtggccttttgaatttttgcataaagaataatatggcggatcatttggatgaattttgcggaaatatgaccagcgaagttcttttcaaaataagtccagagttattattaaaattattgacgtataaggagaagcctaatgggaagttattggcagcagttattgaaaaaattgaaaatggagatgatgattatatattggagttgcttgaaaagattattatacaaaaagagatccaaattttggaaaaattaaaggagccacttttagttttcttcttaaatccagttagctctaatatgcaaaaacacaaaaagagtacaaatatgctccgtgaattagtcttattatatctcactaaaccgctttctagaagtgccgccaaaaaatttttttccatgttaattagtatattaccgccaaaccctaactatcaaactattgatatggttaatttattgattgacctcatcaaatctcataatcgtaagtttaaagataagagaacctataatgcaacattaaagacaataggaaagtggatacaggaaagtggcgtggttcatcaaggggacagcagtaaggaaattgaagctatacctgacactaagtctatgtatattccatgcgaagggagtgaaaataaactttccaacttacagagaaaagtggattctcaagatatccaggttccggctacgcagggaatgaaagagcctccctccagtattcaaatatcttcccagattagtgcgaaagattctgattctatatctcttaaaaatactgcaataatgaattcttctcagcaagaaagtcatgctaacagaagcagatctattgatgatgaaacattagaggaagtggataatgaaagcattagagaaatagatcagcagatgaagagtacgcagttagataaaaacgtggccaatcatagcaacatttgttctactaaaagcgatgaggtggatgttactgagttacatgaaagtattgatacacaatccagtgaagtgaacgcataccaaccgatagaagttctcactagcgaattgaaggcggtaacaaatagatctatcaaaacgaatcctgatcataacgttgttaacagtgataatcctttgaaaagaccttccaaagagacgcctacctctgaaaataaaagaagtaaaggtcatgaaacgatggtggacgttttagtttctgaggaacaagcggtgtctcctagcagtgacgttatatgtactaacatcaagagtatagccaacgaagaatcttctttagctttaaggaatagcataaaagtggaaacaaactgtaatgaaaattccttgaatgtcactttagatcttgaccagcaaaccataacaaaggaagatggaaaagggcaagttgaacatgttcaaagacaggagaaccaggaaagtatgaataaaatcaacagtaaaagttttacgcaagacaatattgcacagtacaagagcgtgaagaaagcccgtcctaataatgagggtgaaaacaacgattatgcttgtaatgttgaacaagcctctccagtaaggaatgaggtgccaggagacggcattcagatcccgagtgggactatacttctcaatagttccaagcagacagaaaaatctaaagttgatgacttgcgtagtgatgaagatgaacatggaacggttgcgcaagagaaacatcaagtgggtgcaataaacagtagaaacaaaaataatgacaggatggacagcacacccattcaaggcactgaagaagaatctagggaagttgttatgaccgaagaaggtatcaatgtacgcttagaagatagtggaacatgcgaacttaataaaaatttgaagggaccgcttaaaggagataaggatgccaatattaatgacgattttgtacctgttgaagaaaatgtcagagatgagggctttttaaaatctatggaacatgcggtatctaaagagacaggtttggaagaacaacccgaagttgctgatatttctgtgttaccagaaattcgtatacccattttcaattctttgaaaatgcaagggtccaagagccaaataaaagagaaattgaaaaagagattgcaaaggaatgagttaatgccaccagattctcctcctagaatgacagaaaatacaaatatcaacgcgcagaatggcttagacaccgtaccaaaaacaattggtggaaaagaaaaacaccatgaaattcaattaggccaagcccacacagaagcagatggcgaacctttgttggggggagatggtaacgaagatgctacatctagggaagccacaccttctttaaaagtgcactttttttccaaaaagtctagaaggttagtggccagattgagagggttcacaccgggcgacttgaacggaatatctgtggaagaaagaagaaacttgagaattgaattattagattttatgatgaggctcgaatattactctaacagggataatgatatgaattga

SEQ ID NO: 951 - DNA, 2424 bp, Saccharomyces cerevisiae
atggttttggaagtgccctcaatcacacctggtgaactgcatgatcttatgcgactacatcaggatgcagaatggcctgaatgtaaaaaaatgttcccctgggctcatgatatttcctttggtcaaccacccgattttcctcattctcttgcaatagtcaaatcgcaatcagatgctaacaattctgcgcttttgcgtaattctctcgaagtgaatgatatcttccagtcctggaaagttcgcacttcctttcatagagagggcgatacctgtgaaactggaaatgattctaatggttttcaatatcccaataacacaaaggaacttttgaacttgctaaagtttcagatacgacaattggaattgcaagtggatgatgttgctttggaaaacgctgctacttattgtcacaatcatagcattttaccatttctgaaagtagatcctcgtggactatcattagaacttaaaaggtattctagaaacaaggttgggtctaataccacgctaaaacggagtgggcaggacgtctggggaaggagaggtctattccgaaggttcgacctgcaatgtgccaagatgatagaaatggttgataatatagtaatttattgttcgcggactggtggcagcactgatatgcaaacagaatcagcgccagcgtgctcacacgagggaaattgccccaattgtacaacccttgcactacttttacagatctgtttaatgtttgttcaaaagggttatgtagggagtggaggatcgctttacaagacgaatctttttatttgcacttatcagaatttcaatacagatatacctcaaactttgattggtacacctttattagacaacgaatttttcaagaataatactcccttgaatttatgttcgtcacctagtgaaatagtgtgtttcaataacgttgataagaatatggttttgtgcgagaagttagagttgaataagctgacttcagctacacgattggaggaaacagggttgatttgcggtaacaccactgattggcataattatcaaataattaaaaaaaacaatatatctctgacccaccgtttcgaagagaatacaagcatagtaaatttaaagtctctaaattatgatacggacaatccgacaacctccatttctcaactgtataacataccgaatacaaaagaggtgtggaaattgatcataaaatgtacgtcaaactcgcaaatgccgtcgttaacgaaaatccgaacatatctagatcttttattagacgatgatgcgtcaaaatcacaagagcatttgcatttgactttccctgcctcaggtagtataggtttggggaacttaaacattcagtctgtggaaattcttttgaatgtttgttatttaatatttcaagtatcccaagttcaagaattattgacgttcatgtattgcgaagacggatatacagaaacgtcattattattaacagcttatattatattccactttaatattccgttacaagacgctcttttgaggatccatccaagaccatttttcctttttccatcagacttgcaaattttaggccatttacaacctgtcctgcgggagtttagtccgcagaatggaagtaatctaaaattatatgccaatgcattgaaatttagggataaaagctttcaattacacatttcttcagagctttttagtagcatattttttatgaagattcctcttgagtctaatttcgttaatttgaagggcccactgccatcccggattctacgtcacttgtatttgggatccctggatcatgcacaaaatcctgccttacttaagtctctaggaattacgcatatagtttctgtcggtgaagttgtttcatggacattgaataaggataaaattgctcatcctgtaaggccacatcgtgcaataactatgacgaataccaatgaagttgcaggtaatactacatgtaataaaagcagaaatagagctgatactgtggtcagcgataagcaagaaaatggcagcaacgtagtaataagtgaaaattctggatttcaaatttgccagatcgaaaatctagatgacaacggcaaagatccgcttttccaccaaatagacaaagttttggattttattagcaattccgaagcaacaggagggaaagttctggtgcattgtatggtcggagtctccagatctgcaacagtttgtatagctgaatgtatgagatatctccagtgtgacctggcaagtgcgtatttgtttgtgagggtacggaggcttaatgttatcattcaaccaaacttgttcttcgtatatgagctcttcaaatggtggaaaaagcattataatcgcgaaaaagacaaaactatggattggcacatcatctgtaggggtatcgctgaggttaatatgaagtacacatga

SEQ ID NO: 952 - DNA, 2424 bp, Artificial Sequence
  Description of Artificial Sequence: Synthetic polynucleotide
atggttttggaagtgccctccatcacacctggtgaattacatgatcttatgagattacatcaggatgcagaatggcctgaatgtaaaaaaatgttcccctgggctcatgatatttcctttggtcaaccacccgattttcctcattctcttgcaatagtcaaatctcaatctgatgctaacaattctgcgcttttgcgtaattctctcgaagtgaatgatatcttccagtcctggaaagttcgcacttcctttcatagagagggcgatacctgtgaaactggaaatgattctaatggttttcaatatcccaataacacaaaggaacttttgaacttgttgaagtttcagataagacaattggaattgcaagtggatgatgttgctttggaaaacgctgctacttattgtcacaatcatagcattttaccatttttgaaagtagatcctcgtggattatctttagaacttaaaaggtattctagaaacaaggttgggtctaataccacgttgaaaagaagtgggcaggacgtctggggaaggagaggtcttttcagaaggttcgacttgcaatgtgccaagatgatagaaatggttgataatatagtaatttattgttctagaactggtggcagcactgatatgcaaacagaaagtgcgccagcgtgctcccacgagggaaattgccccaattgtacaacccttgcattacttttacagatctgtttaatgtttgttcaaaagggttatgtagggagtggaggatctctttacaagacgaatctttttatttgcacttatcagaatttcaatacagatatacctcaaactttgattggtacacctttattagacaacgaatttttcaagaataatactcccttgaatttatgttcttctcctagtgaaatagtgtgtttcaataacgttgataagaatatggttttgtgcgagaagttagagttgaataagttgactagtgctacaagattggaggaaacagggttgatttgcggtaacaccactgattggcataattatcaaataattaaaaaaaacaatatatctttaacccaccgtttcgaagagaatacaagcatagtaaatttaaagtctttgaattatgatacggacaatccgacaacctccatttctcaattatataacataccgaatacaaaagaggtgtggaaattgatcataaaatgtacgtccaactctcaaatgccgtctttaacgaaaatcagaacatatttggatcttttattagacgatgatgcgtccaaatctcaagagcatttgcatttgactttccctgcctctggtagtataggtttggggaacttaaacattcagtctgtggaaattcttttgaatgtttgttatttaatatttcaagtatcccaagttcaagaattattgacgttcatgtattgcgaagacggatatacagaaacgtctttattattaacagcttatattatattccactttaatattccgttacaagacgctcttttgaggatccatccaagaccatttttcctttttccatctgacttgcaaattttaggccatttacaacctgtcttgagagagtttagtccgcagaatggaagtaatttgaaattatatgccaatgcattgaaatttagggataaaagctttcaattacacatttcttctgagctttttagtagcatattttttatgaagattcctcttgagtctaatttcgttaatttgaagggcccattaccatccagaattttgcgtcacttgtatttgggatccttggatcatgcacaaaatcctgccttacttaagtctttgggaattacgcatatagtttctgtcggtgaagttgtttcctggacattgaataaggataaaattgctcatcctgtaaggccacatcgtgcaataactatgacgaataccaatgaagttgcaggtaatactacatgtaataaaagcagaaatagagctgatactgtggtcagcgataagcaagaaaatggcagcaacgtagtaataagtgaaaattctggatttcaaatttgccagatcgaaaatttggatgacaacggcaaagatccgcttttccaccaaatagacaaagttttggattttattagcaattccgaagcaacaggagggaaagttttggtgcattgtatggtcggagtctccagatctgcaacagtttgtatagctgaatgtatgagatatctccagtgtgacttggcaagtgcgtatttgtttgtgagggtaagaaggcttaatgttatcattcaaccaaacttgttcttcgtatatgagctcttcaaatggtggaaaaagcattataatcgcgaaaaagacaaaactatggattggcacatcatctgtaggggtatcgctgaggttaatatgaagtacacatga

SEQ ID NO: 953 - DNA, 606 bp, Saccharomyces cerevisiae
atgtccaacttagttaaagaaaaagcacctgtctttcctatatctaaagtaaagaagattgccaaatgcgaccccgaatacgtaattacatctaatgtagctatatcagcgaccgcattcgctgctgagttatttgtacagaatctcgtcgaagaatcgctggtcttagcacaactgaattcgaaaggaaagacaagcctacgattaagcctaaattctatagaagaatgtgtcgaaaaaagagataatttcaggtttctagaggatgccattaaacaactgaagaagaatagcgcactcgacaagaagagagaactaaacatgcaaccgggtcggagcgatcaagaggttgttatagaagagcctgaattgcatgaggatgatggtgtagaggaagaagaagaagaagacgaggtatccgaagaagaagagcccgtacacaatgaagaacttcttgatgatagtaaagatcaacaaaatgataaatccacgcgcagtgtggcaagcttgctgtcgagattccagtataaatccgcactagacgtaggagaacactccgactcttctgatatcgaagttgaccatacgaaaagcaccgatccttag

SEQ ID NO: 954 - DNA, 606 bp, Artificial Sequence
  Description of Artificial Sequence: Synthetic polynucleotide
atgtccaacttagttaaagaaaaagcacctgtctttcctatatctaaagtaaagaagattgccaaatgcgaccccgaatacgtaattacatctaatgtagctatatctgcgaccgcattcgctgctgagttatttgtacagaatctcgtcgaagaatctttggtcttagcacaattgaattctaaaggaaagacaagcttaagattaagcttgaattctatagaagaatgtgtcgaaaaaagagataatttcaggtttttggaggatgccattaaacaattgaagaagaatagcgcactcgacaagaagagagaattgaacatgcaaccgggtagaagcgatcaagaggttgttatagaagagcctgaattgcatgaggatgatggtgtagaggaagaagaagaagaagacgaggtatccgaagaagaagagcccgtacacaatgaagaacttcttgatgatagtaaagatcaacaaaatgataaatccacgcgcagtgtggcaagcttgctttctagattccagtataaatccgcattggacgtaggagaacactccgactcttctgatatcgaagttgaccatacgaaaagcaccgatccttga

SEQ ID NO: 955 - DNA, 1338 bp, Saccharomyces cerevisiae
atgtccaaaaaacaggaatatattgcaccaataaaataccaaaacagcttgcctgtgccacaattacctcctaaacttctggtttaccccgagtctccggagacgaatgcagactcctcccaactaatcaattcactatacatcaaaacaaacgtcactaatctaattcaacaggatgaagatttaggtatgccggttgatttgatgaaattcccaggcctattgaacaaattagattctaaactgctttacggctttgataatgtgaaattggacaaagatgatcgaattttactgagggaccctagaatagatagactgaccaagactgatatatcaaaggttaccttcttgagacgcaccgaatatgtctccaatacaattgcagcccatgataacacatcgttgaaaaggaaaaggcgcttggatgatggagattcggatgatgaaaaccttgatgttaatcatataattagtagggtcgaaggaacattcaataagacggacaaatggcaacatccggtgaagaagggtgtcaagatggttaaaaaatgggacctattgcccgacacagcttcaatggaccaggtgtattttatcctaaaattcatgggcagtgcatcattggatactaaagaaaaaaaatctttaaatacaggaattttcaggccagtggaactggaagaagacgaatggatttccatgtatgccacagatcataaggactctgccattctggaaaacgaattggaaaagggtatggatgaaatggatgatgactctcatgaaggtaaaatatacaagtttaaaaggataagagactacgacatgaaacaagtggctgaaaagccaatgacagagttagctatacgtttgaatgataaggacggcatagcttactacaaacccctacgttcaaagatcgaattaagacgtaggagagtaaacgacatcattaaacctttggtgaaggagcacgatatagaccaacttaatgttactttgagaaaccctagcactaaggaagctaacataagggacaagttaagaatgaagtttgaccccataaatttcgccactgtagatgaagaagacgatgaagacgaggagcaaccagaagacgttaagaaagaatcggaaggcgattcaaaaacagaaggttctgagcaagaaggagaaaatgagaaggatgaagaaatcaaacaggaaaaagagaatgaacaagatgaagaaaataaacaagatgaaaaccgtgcagctgatacgcccgaaacttcagatgctgttcatactgaacaaaaaccagaggaagaaaaggaaactttacaagaagaatag

SEQ ID NO: 956 - DNA, 1338 bp, Artificial Sequence
  Description of Artificial Sequence: Synthetic polynucleotide
atgtccaaaaaacaggaatatattgcaccaataaaataccaaaacagcttgcctgtgccacaattacctcctaaacttttggtttaccccgagtctccggagacgaatgcagactcctcccaattgatcaattctttgtacatcaaaacaaacgtcactaatttaattcaacaggatgaagatttaggtatgccggttgatttgatgaaattcccaggccttttgaacaaattagattctaaattactttacggctttgataatgtgaaattggacaaagatgatagaattttattgagggaccctagaatagatagattgaccaagactgatatatccaaggttaccttcttgagacgcaccgaatatgtctccaatacaattgcagcccatgataacacatctttgaaaaggaaaaggcgcttggatgatggagattctgatgatgaaaaccttgatgttaatcatataattagtagggtcgaaggaacattcaataagacggacaaatggcaacatccggtgaagaagggtgtcaagatggttaaaaaatgggacttgttgcccgacacagcttccatggaccaggtgtattttatcttgaaattcatgggcagtgcaagtttggatactaaagaaaaaaaatctttaaatacaggaattttcaggccagtggaattggaagaagacgaatggatttccatgtatgccacagatcataaggactctgccattttggaaaacgaattggaaaagggtatggatgaaatggatgatgactctcatgaaggtaaaatatacaagtttaaaaggataagagactacgacatgaaacaagtggctgaaaagccaatgacagagttagctatacgtttgaatgataaggacggcatagcttactacaaacccttacgttccaagatcgaattaagacgtaggagagtaaacgacatcattaaacctttggtgaaggagcacgatatagaccaacttaatgttactttgagaaaccctagcactaaggaagctaacataagggacaagttaagaatgaagtttgaccccataaatttcgccactgtagatgaagaagacgatgaagacgaggagcaaccagaagacgttaagaaagaaagtgaaggcgattctaaaacagaaggttctgagcaagaaggagaaaatgagaaggatgaagaaatcaaacaggaaaaagagaatgaacaagatgaagaaaataaacaagatgaaaaccgtgcagctgatacgcccgaaacttctgatgctgttcatactgaacaaaaaccagaggaagaaaaggaaactttacaagaagaatga

SEQ ID NO: 957 - DNA, 1914 bp, Saccharomyces cerevisiae
atgagtgaagttgagagcagagaaaaggagcctgacgcaggattgtccccagatatcgttcaagctacgctaccatttttaagcagtgatgatattaagaacctctcgcagacaaataagtattataatacattactagattttgaccactctaaaattttgtggcatgaactatttcataaggcatttgggacattaaagacaaatgacgagcctttccagggtcgaaattcggcggaatttaagacctgcacagagacgattttaagagaagcattccccaccttgtcatggcaggaagtataccaattacgggcatatgatgcaaagttttatagttggggttatttaaagcatggaaggttgggctataccgcgagttccaataatgaacttgtcgccacttcactaaacgggccaagtccgcggttcaaatatggtgtcaatacccccactgaagttccttggtttaacagtaggacaacatctagaactagtaacttcactccttcagaggacccgttaagcgccatcaagaaggatggagacgaaatcatagctcaagtatctagtggtggtttttctttccaaatattgactgagtcaggtaacctttacagcagcggatccactttttctggagggttaaaaggaccaggtcccagtggttcacagcatgattataatcccttcagagaaatgattcacaatatggaaagatcgtatccgcggatcactagccgcagtaatgggagtactgtcaataccacgggtacattttctggaaggagaatgagcggtagccatccatctactgcttatgaaccaggaaatgcaactacagctcagcatattaccatagatagcggaggtgcgcctgcagcctctcccggagggagccatagtggtgtccctagaactacaatgccttcaatggggccgcatgagaatatttacagccagatagaaatgctggaacgaagtgctaacaaggctgtaccaggaaataatcatatcaggagaatgttcgcaagaaattctttcccattatatagtggtagggatgaaaatttaggatcatttaatgatattcaatttgtcgcggtaagctctgggagaagtcatttcctagcaatggatacagataacaatatttattcttgggactcaacggaatctgaccaaggtgtcaaaattgagtttgctaacctacctagtcgtgctacgaatcctattttgaaaattgctagtggttggaatttcaattgttgctatatatataaggtcgggttggttgcatggaaagaaagagatgctattcaaaagggcgagagctttgcttttgcaaaatacgagattgtcccgaatacgaatgatgttaatggagactccaggattgtcgactttgcatgtttacaagataactgcgttttcttcattaataacaacggcgataaactatggaagtaccacaatggactgaaccagatagtagatttaaatattgtcggaaaactgtgcaaaattaacgcctgttttgcttcattagtcctcttcaccgatactcactgttatactttgaaagtaacaaatggagatgtcgataaagatagtttaacggagctagacatcaatgaaaatgttatctccgttgcaagtggtgactatcacacggtggcactaaccgaacgcggtcatttgtattcatggggtattgaaagtcaggattgtgggtgcttaggattgggcccttctgaaaaaatagttaacgagctacatattggcaattgggaagggcaaagaaacattagggtcgttaagcccacgaaaatagaactacctgaagattatatttgtgtcagtgtaactgctggtggctggcaaaccggtgcattaatcatcaagaagcattga

SEQ ID NO: 958 - DNA, 1914 bp, Artificial Sequence
  Description of Artificial Sequence: Synthetic polynucleotide
atgagtgaagttgagagcagagaaaaggagcctgacgcaggattgtccccagatatcgttcaagctacgttaccatttttaagcagtgatgatattaagaacctctctcagacaaataagtattataatacattattagattttgaccactctaaaattttgtggcatgaattatttcataaggcatttgggacattaaagacaaatgacgagcctttccagggtagaaattctgcggaatttaagacctgcacagagacgattttaagagaagcattccccaccttgtcctggcaggaagtataccaattaagagcatatgatgcaaagttttatagttggggttatttaaagcatggaaggttgggctataccgcgagttccaataatgaacttgtcgccacttctttgaacgggccaagtccgcgcttcaaatatggtgtcaatacccccactgaagttccttggtttaacagtaggacaacatctagaactagtaacttcactccttctgaggacccgttaagcgccatcaagaaggatggagacgaaatcatagctcaagtatctagtggtggtttttctttccaaatattgactgagtctggtaacctttacagcagcggatccactttttctggagggttaaaaggaccaggtcccagtggttctcagcatgattataatcccttcagagaaatgattcacaatatggaaagatcttatccgagaatcactagccgcagtaatgggagtactgtcaataccacgggtacattttctggaaggagaatgagcggtagccatccatctactgcttatgaaccaggaaatgcaactacagctcagcatattaccatagatagcggaggtgcgcctgcagcctctcccggagggagccatagtggtgtccctagaactacaatgccttctatggggccgcatgagaatatttacagccagatagaaatgttggaaagaagtgctaacaaggctgtaccaggaaataatcatatcaggagaatgttcgcaagaaattctttcccattatatagtggtagggatgaaaatttaggaagttttaatgatattcaatttgtcgcggtaagctctgggagaagtcatttcttggcaatggatacagataacaatatttattcttgggacagtacggaatctgaccaaggtgtcaaaattgagtttgctaacttgcctagtcgtgctacgaatcctattttgaaaattgctagtggttggaatttcaattgttgctatatatataaggtcgggttggttgcatggaaagaaagagatgctattcaaaagggcgagagctttgcttttgcaaaatacgagattgtcccgaatacgaatgatgttaatggagactccaggattgtcgactttgcatgtttacaagataactgcgttttcttcattaataacaacggcgataaattatggaagtaccacaatggattgaaccagatagtagatttaaatattgtcggaaaattatgcaaaattaacgcctgttttgcttctttagtcctcttcaccgatactcactgttatactttgaaagtaacaaatggagatgtcgataaagatagtttaacggagttggacatcaatgaaaatgttatctccgttgcaagtggtgactatcacacggtggcattgaccgaacgcggtcatttgtattcttggggtattgaaagtcaggattgtgggtgcttaggattgggcccttctgaaaaaatagttaacgagttacatattggcaattgggaagggcaaagaaacattagggtcgttaagcccacgaaaatagaattacctgaagattatatttgtgtcagtgtaactgctggtggctggcaaaccggtgcattaatcatcaagaagcattga

SEQ ID NO: 959 - DNA, 2637 bp, Saccharomyces cerevisiae
atgtacgatagcaggggtgtcgcattgcactctgaactaattcataggtggaatcacgctttttccatcttatccattgttgcatttccaaaaaaaagattgttgtttgctggtagccaagactccaagatattggtttttgatcttcccacatataatctaatacatacgattagactaggcgaatcacaagaggaaacgcataccagatcttcggttttgtgcttgacaggatcagaagatgaaaactttttattttcaggcggcgcagattctttggtgagaatttggtccattggcgaaaagaccattagagatgactttctacctgttactgaaatagccactgtttactcagtgaccgatattggtgatattttctcattggcatatttggattcgttggaaactattgtctttggctgtcaaaatgcaagcttactatatgttgagaacttgattcagaagattgaaaaaaaatcctctgatggagtagaaaatatcaataaattaccgcatagaagatatgataagttctttgattcgttaggtccgactggatatagttcaaattcattatctcaaacttcattgacctctctacaagaaaactgtggcgctgccatcatagaggttccctccgaaaacattattaaatatgcacattatgggtttatttattctattaataaattgtgtcccaggtttaatcagttattggaaaaaagctcacgaacttctggtgcagagcacataatttcatccgctggtgatggaataagcaagctttgggagttctctaaagataaagggcaaaacactgttaaaatctccttgataaacgataaaatcgacaatgaagatagcgtcatatcccaaactattgagttcccatttttatattgcgggttgactgacgggattataaaaatctgggacttaaatactcagcaaataatctcaactctgaaaacaaagcatgaatcggacgtcatttcaatatcagtttatatggaccatgtatttgccattgatgaatcaggcatcacgcatttttaccagaaccaagttaaccattggaaccctcaacaaggaaaaatattaagctcagagattttcagtaaatcaaatgctggatctgttagtttattaacgggtggtagcgatgggtcattgactctctgggatataacctcattattatctgcggtgcctctgtcaagcaactcacccatcaatgcatcatctacattacaaaccaccaatttatgggccgcctatcaatctgcctctctaaataacgaggagatgttaaacacactgagagaacttatttctttccagacagtgtctcaaagcaaagacactactaatactttgtcattaaggcgttgtgcaatctacctgcaacaattattcttgaagtttggagctacaaactcccaattatttccattgcctgatggtggtaatcctgttgtattcgcatattttcaagggaatgggaaagtttcacaggtgaagggtgccaagaaaaagcgtattctatggtatgggcattatgacgttatatcgtctggaaatactttcaactggaataccgacccatttactttaacttgtgaaaacggatacttaaaaggtcgaggagtatcagataataaagggccattggtgagcgctattcatagtgtggcgtatttgtttcaacagggagaattggtgaacgatgtcgtatttttggtggaaggaagtgaagaaatcggatctgctagtttgaagcaagtttgtgaaaagtaccatgatattattggaaaagatattgactggattttattaagtaattctacttgggttgatcaagaacatccatgcttgaattatggattgagaggtgttattaatgcccaaataaaagtctggagcgataagcctgacggacattctggtcttaacggtggtgtttatgatgaacctatggttaatttagtgaaaatcgtgtccaaactacaaaacgaacaaaatgaaattatgattccaaatttttattcaccattgaaagatctgactgaagaagaatatcaaaggtttcagaaaattaccgagcttgcaaatatcgacgaaaatactactgttcaagatttaattaccaactggactaagccttccttgtctatgacaacagtcaagtttagcggtcctggtaacataacagttattccaaaaagtgtcaccatgggtatctccatcaggttagtacctgagcaaagtgtagaacaagtcaagagagatctcaaagcgtatttagaagaaagtttcaagcaattgaaatctcaaaatcatctagaaattaaagttttaaacgaagcagaaggttggttgggtgacccaacaaatcatgcataccaaatattaaaggacgaaattactactgcatgggacgtagaaccattgctagtaagagaaggaggttctatttcatgtttgagaatgttggaaagaatattcgacgcgccagctgttcaaataccatgtggccaatccactgacaatggccatttagccaacgaaaatctcagaatcaaaaattggtctaatttgactgagattttgtctaaagtattcaataggttataa

SEQ ID NO: 960 - DNA, 2637 bp, Artificial Sequence
  Description of Artificial Sequence: Synthetic polynucleotide
atgtacgatagcaggggtgtcgcattgcactctgaattgattcataggtggaatcacgctttttccatcttatccattgttgcatttccaaaaaaaagattgttgtttgctggtagccaagactccaagatattggtttttgatcttcccacatataatttgatacatacgattagattgggcgaatctcaagaggaaacgcataccagatcttctgttttgtgcttgacaggatctgaagatgaaaactttttattttctggcggcgcagattctttggtgagaatttggtccattggcgaaaagaccattagagatgactttttacctgttactgaaatagccactgtttactctgtgaccgatattggtgatattttcagtttggcatatttggattctttggaaactattgtctttggctgtcaaaatgcaagcttattatatgttgagaacttgattcagaagattgaaaaaaaatcctctgatggagtagaaaatatcaataaattaccgcatagaagatatgataagttctttgattctttaggtccgactggatatagtagtaattctttatctcaaacttctttgacctctttacaagaaaactgtggcgctgccatcatagaggttccctccgaaaacattattaaatatgcacattatgggtttatttattctattaataaattgtgtcccaggtttaatcagttattggaaaaaagcagcaggacttctggtgcagagcacataatttcttccgctggtgatggaataagcaagctttgggagttctctaaagataaagggcaaaacactgttaaaatctccttgataaacgataaaatcgacaatgaagatagcgtcatatcccaaactattgagttcccatttttatattgcgggttgactgacgggattataaaaatctgggacttaaatactcagcaaataatctctactttgaaaacaaagcatgaaagtgacgtcatttctatatctgtttatatggaccatgtatttgccattgatgaaagtggcatcacgcatttttaccagaaccaagttaaccattggaaccctcaacaaggaaaaatattaagctctgagattttcagtaaatctaatgctggatctgttagtttattaacgggtggtagcgatgggtctttgactctctgggatataaccagtttattatctgcggtgcctttatccagcaactctcccatcaatgcatcttctacattacaaaccaccaatttatgggccgcctatcaatctgcctctttgaataacgaggagatgttaaacacattaagagaacttatttctttccagacagtgtctcaaagcaaagacactactaatactttgtctttaaggcgttgtgcaatctacttacaacaattattcttgaagtttggagctacaaactcccaattatttccattgcctgatggtggtaatcctgttgtattcgcatattttcaagggaatgggaaagtttctcaggtgaagggtgccaagaaaaagcgtattttatggtatgggcattatgacgttatatcttctggaaatactttcaactggaataccgacccatttactttaacttgtgaaaacggatacttaaaaggtagaggagtatctgataataaagggccattggtgagcgctattcatagtgtggcgtatttgtttcaacagggagaattggtgaacgatgtcgtatttttggtggaaggaagtgaagaaatcggatctgctagtttgaagcaagtttgtgaaaagtaccatgatattattggaaaagatattgactggattttattaagtaattctacttgggttgatcaagaacatccatgcttgaattatggattgagaggtgttattaatgcccaaataaaagtctggagcgataagcctgacggacattctggtcttaacggtggtgtttatgatgaacctatggttaatttagtgaaaatcgtgtccaaattacaaaacgaacaaaatgaaattatgattccaaatttttattctccattgaaagatttgactgaagaagaatatcaaaggtttcagaaaattaccgagcttgcaaatatcgacgaaaatactactgttcaagatttaattaccaactggactaagccttccttgtctatgacaacagtcaagtttagcggtcctggtaacataacagttattccaaaaagtgtcaccatgggtatctccatcaggttagtacctgagcaaagtgtagaacaagtcaagagagatctcaaagcgtatttagaagaaagtttcaagcaattgaaatctcaaaatcatttggaaattaaagttttaaacgaagcagaaggttggttgggtgacccaacaaatcatgcataccaaatattaaaggacgaaattactactgcatgggacgtagaaccattgttagtaagagaaggaggttctattagttgtttgagaatgttggaaagaatattcgacgcgccagctgttcaaataccatgtggccaatccactgacaatggccatttagccaacgaaaatctcagaatcaaaaattggtctaatttgactgagattttgtctaaagtattcaataggttatga

SEQ ID NO: 961 - DNA, 441 bp, Saccharomyces cerevisiae
atgaaaggctcacccatttctcaatttagtaagacctctattaatgctcttaccaggccttggaagaaatacagagatggtgaattattttatgggttatcaaaagttgggaataaaagagtgccgttgaccacgaagcaaggtaacaagacgatgtacaaagggacaagagcttcagggattggtagacatacaaaattcggtggttatgtgataaactggaagaaagtcagaacctatgttaccccagatatggttaatttcgaattaaagccctacgttaacgcaaatgtaccacctctaaaacacgaatttaaaggatttagcggcggcccattagatcctcgtttacagttattaaagataaaagaatacatagtaaacgggagggtacaaagcgaaggggccaccgacacttcatgttataaggagcgtggataa

SEQ ID NO: 962 - DNA, 441 bp, Artificial Sequence
  Description of Artificial Sequence: Synthetic polynucleotide
atgaaaggctcccccatttctcaatttagtaagacctctattaatgctcttaccaggccttggaagaaatacagagatggtgaattattttatgggttatccaaagttgggaataaaagagtgccgttgaccacgaagcaaggtaacaagacgatgtacaaagggacaagagcttctgggattggtagacatacaaaattcggtggttatgtgataaactggaagaaagtcagaacctatgttaccccagatatggttaatttcgaattaaagccctacgttaacgcaaatgtaccacctttgaaacacgaatttaaaggatttagcggcggcccattagatcctcgtttacagttattaaagataaaagaatacatagtaaacgggagggtacaaagcgaaggggccaccgacacttcttgttataaggagcgtggatga

SEQ ID NO: 963 - DNA, 1473 bp, Saccharomyces cerevisiae
atgtctggttttcgtctaattgatatcgttaagcctatcctaccgattttaccggaagttgagttaccttttgaaaaattaccatttgatgacaagattgtctatactatttttgcagggttaatttacctttttgcacaattcccacttgttggtttgcccaaagctaccacacctaatgttaatgaccccatttattttctaagaggtgtatttgggtgtgaaccaagaaccttgctagaatttggcctttttcccaacatttctagtgggttaatcttacaattattagccggtttgaaagtaattaaagttaatttcaagatccaaagtgatagagaattatttcaaagcttaacaaaagtttttgccattgttcagtatgtgattttgaccaacattttcatatttgcaggttattttggtgatgatttatctgtggtacagatcgggttgatcaactttcaattggtcggtgctggcatattcaccactttgttagctgaagtcatcgataaaggatttggattttcttctggagctatgataatcaacactgtggtaatcgccactaacttggtggctgatacttttggtgtttctcaaattaaagttggcgaggacgaccaaaccgaagcccaaggtgccctaatcaatttgattcaaggtttaagatctaagcacaagacatttattggcggcatcatctctgcattcaacagagactatctaccaaacttgacaactactattatagttttggcaattgccattattgtgtgctatttgcaaagtgtccgtgtagaattgccaatcagatcaacaagagcccgtggtacaaacaatgtttacccaattaagctactatacactggctgtttatctgttttgttttcttacaccatcttgttctacatccacatttttgctttcgttttaattcaattggttgccaagaatgaaccaactcacatcatctgcaaaataatgggccactatgagaatgctaataatcttttagcagtcccaaccttcccattatctcttttggctccaccaacatctttcttcaaaggtgtcactcaacaacctttaaccttcatcacctattccgcctttatattggttactggtatttggtttgctgataagtggcaggctatttcaggttcctctgctcgtgatgtagccttggaattcaaagaccaaggtatcactttgatgggacgcagagaacagaatgtcgctaaagaattgaacaaagtcattccaatcgcagctgttacgggtgcatccgtcttaagtttgatcaccgttatcggtgaatctttgggtttgaaaggtaaagctgctggtatagttgttggcattgctggtgggttttctttgctagaagtcattaccattgaataccaacaaagtggcggtcaaagtgctttgaatcaagtcttgggtgttccaggtgctatgtaa

SEQ ID NO: 964 - DNA, 1473 bp, Artificial Sequence
  Description of Artificial Sequence: Synthetic polynucleotide
atgtctggttttcgtttaattgatatcgttaagcctatcttaccgattttaccggaagttgagttaccttttgaaaaattaccatttgatgacaagattgtctatactatttttgcagggttaatttacctttttgcacaattcccacttgttggtttgcccaaagctaccacacctaatgttaatgaccccatttattttttaagaggtgtatttgggtgtgaaccaagaaccttgttggaatttggcctttttcccaacatttctagtgggttaatcttacaattattagccggtttgaaagtaattaaagttaatttcaagatccaaagtgatagagaattatttcaaagcttaacaaaagtttttgccattgttcagtatgtgattttgaccaacattttcatatttgcaggttattttggtgatgatttatctgtggtacagatcgggttgatcaactttcaattggtcggtgctggcatattcaccactttgttagctgaagtcatcgataaaggatttggattttcttctggagctatgataatcaacactgtggtaatcgccactaacttggtggctgatacttttggtgtttctcaaattaaagttggcgaggacgaccaaaccgaagcccaaggtgccttgatcaatttgattcaaggtttaagatctaagcacaagacatttattggcggcatcatctctgcattcaacagagactatttaccaaacttgacaactactattatagttttggcaattgccattattgtgtgctatttgcaaagtgtccgtgtagaattgccaatcagatctacaagagcccgtggtacaaacaatgtttacccaattaagttattgtacactggctgtttatctgttttgttttcttacaccatcttgttctacatccacatttttgctttcgttttaattcaattggttgccaagaatgaaccaactcacatcatctgcaaaataatgggccactatgagaatgctaataatcttttagcagtcccaaccttcccattatctcttttggctccaccaacatctttcttcaaaggtgtcactcaacaacctttaaccttcatcacctattccgcctttatattggttactggtatttggtttgctgataagtggcaggctatttctggttcctctgctcgtgatgtagccttggaattcaaagaccaaggtatcactttgatgggacgcagagaacagaatgtcgctaaagaattgaacaaagtcattccaatcgcagctgttacgggtgcatccgtcttaagtttgatcaccgttatcggtgaatctttgggtttgaaaggtaaagctgctggtatagttgttggcattgctggtgggttttctttgttggaagtcattaccattgaataccaacaaagtggcggtcaaagtgctttgaatcaagtcttgggtgttccaggtgctatgtga

SEQ ID NO: 965 - DNA, 2394 bp, Saccharomyces cerevisiae
atggtacagaacaatgaatcggtttttttcgttgaatgcgactcttataaggagagcccttccacttcaccaatacgcttggacgacctggatggaaatgacgctgtgtcggatcagggtttagctttcgacggggacgtaggaattacatcacaagctcgagtaagaaatcctcgagctcaaatcttcgaggatagtaatactgacgtagtattgcatttggatgatcttgatatggtcccactaaatacgaagttcgatatgcagatggagatgggttcacccatggcgatgccggcagaaacgccacctcctgtcgaacctttaaaaacaaaagatctagcatattcatccttggctcaccttcctagctatttctttgagcaaacacatttccgcatagaccgcaaatgcctgttggaaatgtctaagttaaggcgaaattatctaactataagtaaacaagatgctttgtcatgtccgcagcttcattcaagagtggctgggggttatcttaaacctgtaaaagaaaaattatttggaatacgtcactttcttgatctagaggaaagtaatactgtaaacctcctccaggatggtaattatatgacggaattgttcaacagtcagattaatatccccacttttaaagaatttagggaagattttgaatggtgcttgaaaattataagagatagaagcctatcaaggtttagcgaaaaaagattacaatatcttgtaaataagtttccagtttttcaacacctacattccaaggaagaaatgagacagagcaaaaaggtgccacacaaggatttttacaactgtagaaagattgatctgaatcttctgttaagcggctgtttctcacagtggcaattgactgagtttatttggaccaagttgagaaaagaaccggacagggttatccatcaagcttttaatggtagtcatataaccttgagccaattattcaaagtgaatttcgaggagaccggtcagttcttcaatgggttgaaaattattgacgattcatttttggagtggtataaagttatttatctcgcaaaatatcatttggttaacgatgaaatggaaatacacacaggctcacacggtaagcagcttcgatactatttgattgcgaaaacatttttggagtttgataactatattaatggtgaatacttagcggaactactgaaaacgtttttaataaaaccgcaagaggagtcgaaatatcagttatgtcaactctccgtggacttccaattttatctgcattacgataattccgatgtggacaattggtggatggtctttgccaattggctgaaccactataatatattttctaacaatattcgctggaatattcgcatttctagaatttatccagaactgtatcatactggcaaggtgaagaattttcaggagtatttaaatctaatcttcaaaccacttttcaatgccgaaaattatctacacaagtcattaggacctattcttttgaaatttctttctcaagtatcttcgattgatctatgtattcaagatacggacaactatatttggaaaaacttcacagcagttagttgcttgccaaaagattggacatctggcggtgataatccaaccatttcacaatatatgtattacgtctacgtcaacctaacaaaattgaaccatatccgccaagcccttcatcaaaataccttcactttgagaagttcatgttctcccacctcaatgaatcgaacttcacagtttagtaatacactgaacttcacagaacatacggaagctattttaaacaatttcttgctcgcctgtggagggtttctaaatgcagaaaatctctggaatgcaccaccatcactggtgtatcttttctatctaagtcaaattcccatggttgtggcgcctttgaattccatagtagattcaaagcctacaatgctgcaagaacaagccccgacggggcttgtcctagagccctcaaagccttataagaagaaccctttcatgaagttttttgaaatggggttcaagatatcgctgagctcagaatctatcctctacaacaattcgtatacgaaagaacccattatagaagagtatagtgtagcggctagtatataccgtttacattcagcagatttatgcgaacttctaagaaacagtgtcataaccagtggattttcaagtaccctaaagaacaaatggctcggcgtttccttagccagccatgactacttcgtggaaaacactgggtttgtagacaagtggtatgattgtaaaccaaatacaagtttagagcataacgttccgatcatcagacgtcaatatcgcagtagcactctcgcaggggagtggcgactcataattgcgtga

SEQ ID NO: 966 - DNA, 2394 bp, Artificial Sequence
  Description of Artificial Sequence: Synthetic polynucleotide
atggtacagaacaatgaatctgtttttttcgttgaatgcgactcttataaggagagcccttccacttctccaatacgcttggacgacttggatggaaatgacgctgtgtctgatcagggtttagctttcgacggggacgtaggaattacatctcaagctcgtgtaagaaatcctagggctcaaatcttcgaggatagtaatactgacgtagtattgcatttggatgatcttgatatggtcccattgaatacgaagttcgatatgcagatggagatgggttctcccatggcgatgccggcagaaacgccacctcctgtcgaacctttaaaaacaaaagatttggcatattcttccttggctcaccttcctagctatttctttgagcaaacacatttccgcatagaccgcaaatgcttgttggaaatgtctaagttaaggagaaattatttgactataagtaaacaagatgctttgagttgtccgcagcttcattccagagtggctgggggttatcttaaacctgtaaaagaaaaattatttggaatacgtcactttcttgatttagaggaaagtaatactgtaaacctcctccaggatggtaattatatgacggaattgttcaacagtcagattaatatccccacttttaaagaatttagggaagattttgaatggtgcttgaaaattataagagatagaagcttatctaggtttagcgaaaaaagattacaatatcttgtaaataagtttccagtttttcaacacttgcattccaaggaagaaatgagacagagcaaaaaggtgccacacaaggatttttacaactgtagaaagattgatttgaatcttttattaagcggctgtttctctcagtggcaattgactgagtttatttggaccaagttgagaaaagaaccggacagggttatccatcaagcttttaatggtagtcatataaccttgagccaattattcaaagtgaatttcgaggagaccggtcagttcttcaatgggttgaaaattattgacgattcttttttggagtggtataaagttatttatctcgcaaaatatcatttggttaacgatgaaatggaaatacacacaggctctcacggtaagcagcttcgttactatttgattgcgaaaacatttttggagtttgataactatattaatggtgaatacttagcggaattattgaaaacgtttttaataaaaccgcaagaggagagtaaatatcagttatgtcaactctccgtggacttccaattttatttgcattacgataattccgatgtggacaattggtggatggtctttgccaattggttgaaccactataatatattttctaacaatattcgctggaatattcgcatttctagaatttatccagaattgtatcatactggcaaggtgaagaattttcaggagtatttaaatttgatcttcaaaccacttttcaatgccgaaaattatttgcacaagtctttaggacctattcttttgaaatttctttctcaagtatcttccattgatttatgtattcaagatacggacaactatatttggaaaaacttcacagcagttagttgcttgccaaaagattggacatctggcggtgataatccaaccatttctcaatatatgtattacgtctacgtcaacttaacaaaattgaaccatatccgccaagcccttcatcaaaataccttcactttgagaagtagttgttctcccacctccatgaatagaacttctcagtttagtaatacattgaacttcacagaacatacggaagctattttaaacaatttcttgctcgcctgtggagggtttttgaatgcagaaaatctctggaatgcaccaccatctttggtgtatcttttctatttgagtcaaattcccatggttgtggcgcctttgaattccatagtagattctaagcctacaatgttacaagaacaagccccgacggggcttgtcttggagccctccaagccttataagaagaaccctttcatgaagttttttgaaatggggttcaagatatctttaagctctgaatctatcctctacaacaattcttatacgaaagaacccattatagaagagtatagtgtagcggctagtatataccgtttacattctgcagatttatgcgaacttttgagaaacagtgtcataaccagtggattttctagtaccttgaagaacaaatggctcggcgtttccttagccagccatgactacttcgtggaaaacactgggtttgtagacaagtggtatgattgtaaaccaaatacaagtttagagcataacgttccgatcatcagacgtcaatatcgcagtagcactctcgcaggggagtggaggctcataattgcgtga

SEQ ID NO: 967 - DNA, 435 bp, Saccharomyces cerevisiae
atgaccatattttctaggttctcatattttgatagtctattctcctttaaaaagcaagagccttcccccattgaaataatctattgcaatgaaaacaatggtttcataaacataaaatccttagaaagccccactgacgatagcatggaggcggacatttcagatagagaaatggctacaatcctgactagaaacagaaacaatttgggtaaggttgccattgataagaaaggcgttaataatcattgcatagatttgaatgagctgaaaaagggccttgtcgccaatgaacacaaattggataacgataactcaacacggcaccagaacacatattcaccagaggattccgtggaatttgataggttcgatgataaacaaagcagaatactaaagtgtagcactagaaggagctacttgagatacaagaaataa

SEQ ID NO: 968 - DNA, 435 bp, Artificial Sequence
  Description of Artificial Sequence: Synthetic polynucleotide
atgaccatattttctaggttctcttattttgatagtttattctcctttaaaaagcaagagccttcccccattgaaataatctattgcaatgaaaacaatggtttcataaacataaaatccttagaaagccccactgacgatagcatggaggcggacatttctgatagagaaatggctacaatcttgactagaaacagaaacaatttgggtaaggttgccattgataagaaaggcgttaataatcattgcatagatttgaatgagttgaaaaagggccttgtcgccaatgaacacaaattggataacgataactccacaagacaccagaacacatattctccagaggattccgtggaatttgataggttcgatgataaacaaagcagaatattgaagtgtagcactagaaggagctacttgagatacaagaaatga

SEQ ID NO: 969 - DNA, 1614 bp, Saccharomyces cerevisiae
atgcacttttctttgaagcaattggctgtcgctgcgttttacgctaccaatttaggctctgcctatgtcattcctcaattcttccaggaagcctttcaacaagaagagccaattgagaattatcttccgcaattaaacgacgatgatagctctgccgttgctgccaacattccgaagccacatattccttacttcatgaaaccacatgtagaaagtgaaaaattgcaagataaaatcaaagttgacgatttgaatgctactgcttgggacctctaccgtttagctaactattctactcctgactacggtcaccctacccgtgtgatcgggtccaagggtcataacaagactatggaatacatattgaatgttttcgatgacatgcaggactactatgatgtttctttgcaagagttcgaagctttatccggtaagatcatctctttcaacctctctgacgccgaaaccggtaaaagctttgctaacactacagctttcgcactttctccacctgtggacgggttcgtaggtaagctagtcgaaattcctaacttgggatgtgaagagaaggattacgcctctgtagtcccaccaagacacaacgaaaagcaaattgcccttatcgaaagaggtaagtgtccttttggcgataagagtaatttggccggtaagttcggtttcaccgctgtggtcatttacgacaacgaacctaaatctaaagaaggactacacggtacattaggcgaacctaccaagcacactgtcgccaccgtcggtgttccatataaagttggtaaaaaattgattgccaatattgcattgaacatcgattattcattatattttgccatggactcttatgtagaatttatcaagacccagaacatcattgccgacacaaaacacggtgatcctgataatattgttgcccttggtgctcattcagactctgttgaggagggcccaggtatcaacgacgatggttccggtactatttccctattgaacgtcgctaagcaattgacccatttcaagatcaataacaaggtccgttttgcatggtgggctgctgaagaagaaggtttgctaggctctaacttctacgcttataacttgaccaaagaagaaaactccaagatcagagtatttatggactatgacatgatggcttctccaaactatgaatacgaaatttatgatgcgaacaacaaggagaaccctaaggggtctgaagagttgaaaaacctgtacgtagactactacaaggctcatcacttgaactacactttggtcccatttgacggtagatccgattatgtcgggtttatcaacaacggaattccagccggtggtattgccactggtgccgaaaagaataacgtcaacaacggaaaggtcttagacagatgctaccatcaattatgtgatgatgtctctaacttatcctgggacgcattcattaccaacaccaagttgattgctcactctgtggccacctatgctgactctttcgagggtttcccaaaaagagaaacccaaaagcacaaagaggtggacatattgaatgctcaacaaccacaatttaagtacagggccgacttcttgattatttaa

SEQ ID NO: 970 - DNA, 1614 bp, Artificial Sequence
  Description of Artificial Sequence: Synthetic polynucleotide
atgcacttttctttgaagcaattggctgtcgctgcgttttacgctaccaatttaggctctgcctatgtcattcctcaattcttccaggaagcctttcaacaagaagagccaattgagaattatcttccgcaattaaacgacgatgatagctctgccgttgctgccaacattccgaagccacatattccttacttcatgaaaccacatgtagaaagtgaaaaattgcaagataaaatcaaagttgacgatttgaatgctactgcttgggacctctaccgtttagctaactattctactcctgactacggtcaccctacccgtgtgatcgggtccaagggtcataacaagactatggaatacatattgaatgttttcgatgacatgcaggactactatgatgtttctttgcaagagttcgaagctttatccggtaagatcatctctttcaacctctctgacgccgaaaccggtaaaagctttgctaacactacagctttcgcactttctccacctgtggacgggttcgtaggtaagttggtcgaaattcctaacttgggatgtgaagagaaggattacgcctctgtagtcccaccaagacacaacgaaaagcaaattgcccttatcgaaagaggtaagtgtccttttggcgataagagtaatttggccggtaagttcggtttcaccgctgtggtcatttacgacaacgaacctaaatctaaagaaggattgcacggtacattaggcgaacctaccaagcacactgtcgccaccgtcggtgttccatataaagttggtaaaaaattgattgccaatattgcattgaacatcgattattctttatattttgccatggactcttatgtagaatttatcaagacccagaacatcattgccgacacaaaacacggtgatcctgataatattgttgcccttggtgctcattctgactctgttgaggagggcccaggtatcaacgacgatggttccggtactatttccttattgaacgtcgctaagcaattgacccatttcaagatcaataacaaggtccgttttgcatggtgggctgctgaagaagaaggtttgttgggctctaacttctacgcttataacttgaccaaagaagaaaactccaagatcagagtatttatggactatgacatgatggcttctccaaactatgaatacgaaatttatgatgcgaacaacaaggagaaccctaaggggtctgaagagttgaaaaacctttacgtagactactacaaggctcatcacttgaactacactttggtcccatttgacggtagatccgattatgtcgggtttatcaacaacggaattccagccggtggtattgccactggtgccgaaaagaataacgtcaacaacggaaaggtcttagacagatgctaccatcaattatgtgatgatgtctctaacttatcctgggacgcattcattaccaacaccaagttgattgctcactctgtggccacctatgctgactctttcgagggtttcccaaaaagagaaacccaaaagcacaaagaggtggacatattgaatgctcaacaaccacaatttaagtacagggccgacttcttgattatttga

SEQ ID NO: 971 - DNA, 1284 bp, Saccharomyces cerevisiae
atggttgaaacatttagttttgctcatttggcttatttggtctttgagtccgttttacaggtagtcattatcgcactcgctggtttttggagcgctagttctggtctgctgcccaaacaaagtcaaaaaatcatttctctgttgaacgtggacctttttacaccatgtcttatttttagtaagttggccaaatccctgtccatggccaaaatctttgaaatagccatcattcctattttttttggtttgactactggtatttcatttatttccggaaagataatgagccgtatcctagacttggataaagatgaaactaattttgtggtggcaaactctgtctttggtaacagtaactctctacctgtgtccttgacattatctttggcttacactctgcccaacttaacttgggaccaaattcctaatgataacagagataacgttgcatcaaggggtattttatacttgctgatctttcaacaaatcggacaaatgctgaggtggagctggggttacaataagctaatgaagtggtctggagagaacactcagcatatgccaccttctcaagtgcaatctttgttggaaaggacgcccaacattgataacgaggaacttgtcaatgaggaacaagaggaacaagaattgcttgaagaagaaaataacagaatgaactcatcttttttgagttcgagttccatcggtgataagatttggcaaaaatcatgcactgtatttgagagaatcagagcgaaccttaatcctccgttatattccatgatttttgctgttgttgtggcagcaattggtccgttgcagagagagctatttatggaagatgggtttatcaataacacatttgccgaggctgttacgcagctgggttcagtttctatcccactgatcctggttgtcctcggttctaacttatatccttctgcggaagtcttccctaagacggttcaccatagcaagttattgatcggctccatcatcggaagaatgattttaccttcttgcttccttttgcctattattgctattgctgttaagtacataaacgtgagtattttggacgatccaattttccttgttgtcggttttcttttgactgtttcccctcctgccattcaattaactcaaatcactcaactgaatgaatttttcgaggcagaaatggccgatattctattttgggggtacgctgtcttaagtttgcctgtaagtattattgttgtctcaggtgcaatttacgttttacagtgggctaacccaacttaa

SEQ ID NO: 972 - DNA, 1284 bp, Artificial Sequence
  Description of Artificial Sequence: Synthetic polynucleotide
atggttgaaacatttagttttgctcatttggcttatttggtctttgagtccgttttacaggtagtcattatcgcactcgctggtttttggagcgctagttctggtttattgcccaaacaaagtcaaaaaatcatttctttgttgaacgtggacctttttacaccatgtcttatttttagtaagttggccaaatccttgtccatggccaaaatctttgaaatagccatcattcctattttttttggtttgactactggtatttcctttatttccggaaagataatgagccgtatcttggacttggataaagatgaaactaattttgtggtggcaaactctgtctttggtaacagtaactctttgcctgtgtccttgacattatctttggcttacactttacccaacttaacttgggaccaaattcctaatgataacagagataacgttgcaagcaggggtattttatacttgttgatctttcaacaaatcggacaaatgttaaggtggagctggggttacaataagttgatgaagtggtctggagagaacactcagcatatgccaccttctcaagtgcaatctttgttggaaaggacgcccaacattgataacgaggaacttgtcaatgaggaacaagaggaacaagaattgcttgaagaagaaaataacagaatgaactcttcttttttgagtagtagttccatcggtgataagatttggcaaaaaagttgcactgtatttgagagaatcagagcgaaccttaatcctccgttatattccatgatttttgctgttgttgtggcagcaattggtccgttgcagagagagttatttatggaagatgggtttatcaataacacatttgccgaggctgttacgcagttgggttctgtttctatcccattgatcttggttgtcctcggttctaacttatatccttctgcggaagtcttccctaagacggttcaccatagcaagttattgatcggctccatcatcggaagaatgattttaccttcttgcttccttttgcctattattgctattgctgttaagtacataaacgtgagtattttggacgatccaattttccttgttgtcggttttcttttgactgtttcccctcctgccattcaattaactcaaatcactcaattgaatgaatttttcgaggcagaaatggccgatattttattttgggggtacgctgtcttaagtttgcctgtaagtattattgttgtctctggtgcaatttacgttttacagtgggctaacccaacttga

SEQ ID NO: 973 - DNA, 1452 bp, Saccharomyces cerevisiae
atgtatttgtcattctatatcactgatacaaagaacaaacttattttccagtatcttttaggtgcaacagctccctccttcaagcacctgtggacccgcgttcagtccacatgtcctcaattgctcgaagatagcagtagtgatgattatttagaccattcaatggttggaagagatttagaggtctataagtatttctcagttataaataagctcaattattggtgcttagcctccacttcgaagtcaaaaggcccgcttgattgttttacctttttagagactatagatcgtatcctgttagaatattttgacaaggataaattaagtatcaagaaaattgttaataattatgatagaatcagtttgatttttaactgttgcgtcgaagcgggtgaaccaaatgtgagtgatatgctctatgttaataaaattaaagaagctgttcctgaaagatcggatttatcgaagttcataagttctacagcccataatttacagcaggctgtgcaactcccacaacaaaggcaacagcagctacaacaaaatcagatttctcgtggtagtaattcactaatcgaaaatgaagagattgttccctggagaacttcaagggctagcaaacatgagaataatgagctttatgtggatttgttagaaacattccatgttgtatttgaaaagaaaaaatcacatctaaggttgctcactggaagtatccatggaatagtggacgtgagatcttatttgaatgataatcctctagttgcagtaaaattaaacactatgggaaatgatataggtatacccagtttgcatgactgtgttgaaatcaatgatggtgtgttttctccctctaatataacgtttataccaccagatgggaagttcagattgctggagtattccgtcgatttaagttctcaagtaaagcaatccggagtaaggatgaattctattggcttgatgtctttacacttccaaaatggattgggtaaagattctgatgaatttgagttatccttaaatattgaaaatttcaaaaaagtttcacaagttgatgacctaaaaatagatttacagttcaatgttgagaatgctgatccaaatgaaatagcatataagataaaaatattgcgcaatactcatggccgttttgaaaatagcattatcatgggtcaaggacaatggatttttgataaatcaactgccactggaacggtacctgtactacgtggctgtattgagtatgaaaatactgggccaaattttacaaaaaaagttgatttacaaacagtctccttagaatattcttacataggacaatcggccagtggaatctatgtagaagccatcgatattgtatctggattaacaattggcaaaaatacaaagctgtacaagggtgcaaagtataagacccagacaggcaattttcaagtaaggctgtag

SEQ ID NO: 974 - DNA, 1452 bp, Artificial Sequence
  Description of Artificial Sequence: Synthetic polynucleotide
atgtatttgagtttctatatcactgatacaaagaacaaacttattttccagtatcttttaggtgcaacagctccctccttcaagcacctttggacccgcgttcagtccacatgtcctcaattgctcgaagatagcagtagtgatgattatttagaccattctatggttggaagagatttagaggtctataagtatttctctgttataaataagctcaattattggtgcttagcctccacttctaagagtaaaggcccgcttgattgttttacctttttagagactatagatcgtatcttattagaatattttgacaaggataaattaagtatcaagaaaattgttaataattatgatagaatcagtttgatttttaactgttgcgtcgaagcgggtgaaccaaatgtgagtgatatgctctatgttaataaaattaaagaagctgttcctgaaagaagtgatttatccaagttcataagttctacagcccataatttacagcaggctgtgcaactcccacaacaaaggcaacagcagttacaacaaaatcagatttctcgtggtagtaattctttgatcgaaaatgaagagattgttccctggagaacttctagggctagcaaacatgagaataatgagctttatgtggatttgttagaaacattccatgttgtatttgaaaagaaaaaatctcatttaaggttgctcactggaagtatccatggaatagtggacgtgagatcttatttgaatgataatcctttggttgcagtaaaattaaacactatgggaaatgatataggtatacccagtttgcatgactgtgttgaaatcaatgatggtgtgttttctccctctaatataacgtttataccaccagatgggaagttcagattgttggagtattccgtcgatttaagttctcaagtaaagcaatccggagtaaggatgaattctattggcttgatgtctttacacttccaaaatggattgggtaaagattctgatgaatttgagttatccttaaatattgaaaatttcaaaaaagtttctcaagttgatgacttgaaaatagatttacagttcaatgttgagaatgctgatccaaatgaaatagcatataagataaaaatattgcgcaatactcatggccgttttgaaaatagcattatcatgggtcaaggacaatggatttttgataaatctactgccactggaacggtacctgtattacgtggctgtattgagtatgaaaatactgggccaaattttacaaaaaaagttgatttacaaacagtctccttagaatattcttacataggacaatctgccagtggaatctatgtagaagccatcgatattgtatctggattaacaattggcaaaaatacaaagttgtacaagggtgcaaagtataagacccagacaggcaattttcaagtaaggttgtga

SEQ ID NO: 975 - DNA, 2718 bp, Saccharomyces cerevisiae
atgaataatcagccgcagggtaccaacagcgttccaaatagtattggaaatatatttagcaacattggaactccatcttttaacatggcgcaaattccgcaacagctgtatcagagcctcacaccacaacaattgcagatgattcagcaacgacaccaacagttactgaggagtcgtctacaacaacaacaacaacaacaacaacaaacttcaccgccaccgcaaacgcatcaatctccaccccctcctccgcaacaatctcaacccattgctaatcaatcagcgacttctacccctcctcctcctccagcaccacacaacttacatccccaaattggtcaagtgcccttagctccagcgcctattaatttgcctccacaaattgctcagttacctttggctacacagcaacaagttttgaacaagttgaggcagcaggccatagcaaaaaataatccacaggttgtgaatgcaattactgttgcacaacaacaagtgcaacgccaaattgagcagcaaaagggacagcaaacggcacaaactcagctagaacagcagaggcaattgctggttcagcagcaacagcagcagcaacttagaaaccaaatacagcgacaacagcaacaacagtttaggcatcatgtgcaaatacaacagcagcaacaaaagcaacaacaacagcagcagcagcatcagcaacaacaacaacaacaacagcaacagcagcaacagcaacagcaacagcagcagcaacaacaacagcaacaacaacaacaacagcagcagcagcagcagcagcagcaaggacaaataccgcaatctcagcaagttcctcaagttagatccatgagtggacaacctcccaccaatgttcagccaactattggccaacttcctcaacttccaaaattaaacttacccaagtaccaaactattcaatacgatccaccagaaaccaagctaccatatccaacctattggtcagacaaaaaagcagatacggatactttgttgtacgaacaaattatccagcgtgataaaattaacaaatattcgctaataagagaaaccaatggttacgatccgtttagcatttatggatttagtaataaagagtatattagtagactgtggcatacactgaagtattatcaagatttgaagaacactagaatgaaatctatcacaagcacttctcagaagattccttcggcaagtatttggggaaatggttactcagggtatggtaatgggattacgaatacaactaccagagttattccacaagtagaagttggaaataggaagcattacctagaggataaattaaaagtctataaacaggccatgaatgagacatcggaacagttagttcccataagattggagttcgatcaagatcgtgacagattcttcctcagggacactttgttatggaacaaaaatgacaagcttattaaaattgaagactttgtggacgacatgttgcgagattaccgatttgaggacgctacgagagagcaacacattgatactatttgtcaatctatacaagagcagattcaggagtttcaaggaaatccatatatagagttgaatcaggaccgtctaggcggtgatgacttgagaattagaatcaagctggatattgtcgtgggacaaaaccagttaatcgatcaatttgagtgggacatctctaatagtgataactgtccagaagagtttgcagagtccatgtgtcaagaattagaactaccaggtgagtttgtgactgccattgctcactccataagagagcaagttcatatgtatcataaatcactggcactgttaggttacaattttgatggatcagcgatagaagatgatgacattagaagcagaatgctcccaacgattactcttgatgatgtttataggcctgcagcggaaagcaaaatttttactccaaacctattacagatttcagctgcagagttagagagattggataaagataaggacagagacacaagaaggaaaagaagacaaggtagatctaatagacgtggtatgctcgcattgtccggcacatctgcaagtaatacatctatgaacggcgttcacaacacagtagcagcaggaaatgcttcatcgttgccaccaggagagattttactgccagatattgcagatattccaagaactttcaggactccagtacctagcactttaatgcctggtggtgttgacgtaggcccttctgtggaatcgtacgaattgagaaacacaaccacttataaaagcaggccagatagacctaagccagtttcacctccttgttatattattgaccatattccgggtcattcgctactactttctattaaactgcctgggaaagttaatacaaaagaagagttcgcagcagcgcccaatgacacaagtagtggcaccaatgcaatgcttccgagtccagaatcgctgaaaactaagctgaatagtaacattcgcgctggtgtgacgataccttcaatcccaaacccgattgccaatcacactgttactaattcacccaatcccacactgcagccagtaatcccaggtggggcagctagtaaatcggtacctacacctagtcttcctatagcacctccagtagcaccacatgatagcgaagcgacattgttgactaatagcaataatggtagcagtaacaataacacacagaatacatag

SEQ ID NO: 976 - DNA, 2718 bp, Artificial Sequence
  Description of Artificial Sequence: Synthetic polynucleotide
atgaataatcagccgcagggtaccaacagcgttccaaatagtattggaaatatatttagcaacattggaactccatcttttaacatggcgcaaattccgcaacagttatatcagagcctcacaccacaacaattgcagatgattcagcaaagacaccaacagttattgaggagtcgtttacaacaacaacaacaacaacaacaacaaacttctccgccaccgcaaacgcatcaatctccaccccctcctccgcaacaatctcaacccattgctaatcaaagtgcgacttctacccctcctcctcctccagcaccacacaacttacatccccaaattggtcaagtgcccttagctccagcgcctattaatttgcctccacaaattgctcagttacctttggctacacagcaacaagttttgaacaagttgaggcagcaggccatagcaaaaaataatccacaggttgtgaatgcaattactgttgcacaacaacaagtgcaacgccaaattgagcagcaaaagggacagcaaacggcacaaactcagttagaacagcagaggcaattgttggttcagcagcaacagcagcagcaacttagaaaccaaatacagagacaacagcaacaacagtttaggcatcatgtgcaaatacaacagcagcaacaaaagcaacaacaacagcagcagcagcatcagcaacaacaacaacaacaacagcaacagcagcaacagcaacagcaacagcagcagcaacaacaacagcaacaacaacaacaacagcagcagcagcagcagcagcagcaaggacaaataccgcaatctcagcaagttcctcaagttagatccatgagtggacaacctcccaccaatgttcagccaactattggccaacttcctcaacttccaaaattaaacttacccaagtaccaaactattcaatacgatccaccagaaaccaagttaccatatccaacctattggtctgacaaaaaagcagatacggatactttgttgtacgaacaaattatccagcgtgataaaattaacaaatattctttgataagagaaaccaatggttacgatccgtttagcatttatggatttagtaataaagagtatattagtagattatggcatacattgaagtattatcaagatttgaagaacactagaatgaaatctatcacaagcacttctcagaagattccttctgcaagtatttggggaaatggttactctgggtatggtaatgggattacgaatacaactaccagagttattccacaagtagaagttggaaataggaagcattacttggaggataaattaaaagtctataaacaggccatgaatgagacaagtgaacagttagttcccataagattggagttcgatcaagatcgtgacagattcttcctcagggacactttgttatggaacaaaaatgacaagcttattaaaattgaagactttgtggacgacatgttgagagattacagatttgaggacgctacgagagagcaacacattgatactatttgtcaatctatacaagagcagattcaggagtttcaaggaaatccatatatagagttgaatcaggaccgtttaggcggtgatgacttgagaattagaatcaagttggatattgtcgtgggacaaaaccagttaatcgatcaatttgagtgggacatctctaatagtgataactgtccagaagagtttgcagagtccatgtgtcaagaattagaattaccaggtgagtttgtgactgccattgctcactccataagagagcaagttcatatgtatcataaatctttggcattattaggttacaattttgatggaagtgcgatagaagatgatgacattagaagcagaatgctcccaacgattactcttgatgatgtttataggcctgcagcggaaagcaaaatttttactccaaacttattacagatttctgctgcagagttagagagattggataaagataaggacagagacacaagaaggaaaagaagacaaggtagatctaatagacgtggtatgctcgcattgtccggcacatctgcaagtaatacatctatgaacggcgttcacaacacagtagcagcaggaaatgcttcttctttgccaccaggagagattttattaccagatattgcagatattccaagaactttcaggactccagtacctagcactttaatgcctggtggtgttgacgtaggcccttctgtggaatcttacgaattgagaaacacaaccacttataaaagcaggccagatagacctaagccagtttctcctccttgttatattattgaccatattccgggtcattctttattactttctattaaattacctgggaaagttaatacaaaagaagagttcgcagcagcgcccaatgacacaagtagtggcaccaatgcaatgcttccgagtccagaatctttgaaaactaagttgaatagtaacattcgcgctggtgtgacgataccttccatcccaaacccgattgccaatcacactgttactaattctcccaatcccacattacagccagtaatcccaggtggggcagctagtaaatctgtacctacacctagtcttcctatagcacctccagtagcaccacatgatagcgaagcgacattgttgactaatagcaataatggtagcagtaacaataacacacagaatacatga

SEQ ID NO: 977 - DNA, 966 bp, Saccharomyces cerevisiae
atgccagagcaagaactacttatagggcaagaaatgaatacacttcatgcaggttcatctactgatggcataaatgtcggaaacgcaggacgaactagagacacacaaactggcgtagaaggggaaacggaaatagggtctgacgaggaagatagcatagaggacgagggaagcagcagtggaggaaatagtacgacagaaagactagtaccacaccagctgagggaacaagcagccagacatataggaaaaataggaagacattttaatattcttgatagactttttaagaaacgtacacaacagtcttcggatatacaacaaggtgccatgtttgatggtgtctttagcaatttaagcgcaaaaccagataccacagagactgaaggtaataacgaacaagacataccacctacatacgacgaagctgctgctgatatggccccctcgtattatggaatggatttgaacaattcagatatctactacgacgaaatatgcattgaggggcttcctgtaggaaatatagcaaatttattatggaatatcatcgtaagcacgagttttcagttcattggatttttaataacctacattttacacacatctcacgcagcaaagcaaggttcaaggtttggattagggttaacgttcattggatatggttattcaatgattcccaatgatgttacttcaaaagtcggcaaaaataaaagcttaaatagaatggaattagaggatccaaatgaattcgatgatgttcgtctaaattcacaatcaacgacacaagataaatttgaatcacatttgaatcacggtctggatgaagaaaaacaaaacataccatggttggctgtttttgtggcatttcttgggctatttatcaccctgaagagtatatacgactacattcaagtcaaaaaattggaaaagaaatacctcaaccaaagtcaaaatcaagcataa

SEQ ID NO: 978 - DNA, 966 bp, Artificial Sequence
  Description of Artificial Sequence: Synthetic polynucleotide
atgccagagcaagaattgcttatagggcaagaaatgaatacacttcatgcaggttcttctactgatggcataaatgtcggaaacgcaggaagaactagagacacacaaactggcgtagaaggggaaacggaaatagggtctgacgaggaagatagcatagaggacgagggaagcagcagtggaggaaatagtacgacagaaagattggtaccacaccagttgagggaacaagcagccagacatataggaaaaataggaagacattttaatattcttgatagactttttaagaaacgtacacaacagtcttctgatatacaacaaggtgccatgtttgatggtgtctttagcaatttaagcgcaaaaccagataccacagagactgaaggtaataacgaacaagacataccacctacatacgacgaagctgctgctgatatggccccctcttattatggaatggatttgaacaattctgatatctactacgacgaaatatgcattgaggggcttcctgtaggaaatatagcaaatttattatggaatatcatcgtaagcacgagttttcagttcattggatttttaataacctacattttacacacatctcacgcagcaaagcaaggttctaggtttggattagggttaacgttcattggatatggttattccatgattcccaatgatgttacttctaaagtcggcaaaaataaaagcttaaatagaatggaattagaggatccaaatgaattcgatgatgttcgtttgaattctcaatctacgacacaagataaatttgaaagtcatttgaatcacggtttggatgaagaaaaacaaaacataccatggttggctgtttttgtggcatttcttgggttgtttatcaccttgaagagtatatacgactacattcaagtcaaaaaattggaaaagaaatacctcaaccaaagtcaaaatcaagcatga

SEQ ID NO: 979 - DNA, 900 bp, Saccharomyces cerevisiae
atgtccagtaaagctaccaaaagtgacgtagatccattgcactcgtttctggcagggtccctagccggtgctgctgaagcatgtataacatatccttttgagtttgccaaaacaaggctgcagctgattgataaggcctccaaggcatcaagaaatcctctggtattgatatataaaactgcaaaaactcagggcattggttccatttatgtcggatgtcccgcatttattattggaaacaccgctaaggcgggtattagatttcttggctttgataccattaaagacatgctaagagatagtgaaactggagaactaagtggtacaagaggggtgatagctgggttaggtgcgggactattagaaagtgttgccgcagtgactccttttgaagcaatcaaaactgctttgatcgatgataaacaatctgctacaccaaaataccataataatgggcgcggtgtagtacgaaactattcatcattagtccgtgataaaggattttctggtctttatcgtggtgttttgccagtttccatgagacaggccgcaaaccaagccgttagattgggttgttacaataagattaagaccttgatccaagattatacggattcgccaaaagacaaacctttatcatccgggttaaccttcttagtgggtgcatttagtggtattgtgacggtctattccaccatgccccttgatactgtgaaaacaagaatgcaaagtttggattccaccaaatactcctctacaatgaattgttttgcaaccattttcaaagaagaagggttaaagacgttttggaaaggtgctacgcctagacttgggagattggtcttgagtggtggtattgttttcactatctatgaaaaggtcttagttatgctagcctga

SEQ ID NO: 980 - DNA, 900 bp, Artificial Sequence
  Description of Artificial Sequence: Synthetic polynucleotide
atgtccagtaaagctaccaaaagtgacgtagatccattgcacagttttttggcagggtccttggccggtgctgctgaagcatgtataacatatccttttgagtttgccaaaacaaggttacagttgattgataaggcctccaaggcatctagaaatcctttggtattgatatataaaactgcaaaaactcagggcattggttccatttatgtcggatgtcccgcatttattattggaaacaccgctaaggcgggtattagatttcttggctttgataccattaaagacatgttgagagatagtgaaactggagaattaagtggtacaagaggggtgatagctgggttaggtgcgggattattagaaagtgttgccgcagtgactccttttgaagcaatcaaaactgctttgatcgatgataaacaatctgctacaccaaaataccataataatgggcgcggtgtagtaagaaactattcttctttagtccgtgataaaggattttctggtctttatcgtggtgttttgccagtttccatgagacaggccgcaaaccaagccgttagattgggttgttacaataagattaagaccttgatccaagattatacggattctccaaaagacaaacctttatcttccgggttaaccttcttagtgggtgcatttagtggtattgtgacggtctattccaccatgccccttgatactgtgaaaacaagaatgcaaagtttggattccaccaaatactcctctacaatgaattgttttgcaaccattttcaaagaagaagggttaaagacgttttggaaaggtgctacgcctagacttgggagattggtcttgagtggtggtattgttttcactatctatgaaaaggtcttagttatgttggcctga

SEQ ID NO: 981 - DNA, 372 bp, Saccharomyces cerevisiae
atgaagttcccagccgattaccattatacgtcgccgtttcgttcatgtaaatattcaaatatactacactttatatctttgcttcttatattttcgcgcgtaggtttgcctaattacatttttatattcctcatcaataaagccgccaacaaagagcacagggtagaaactctgctgtctgggaactcggctaacgcttgtaagctatttaatattctcaaatcatttcaacacctcttttttttttttcaaatatgtactattttctctatttccattaagttagtcttactgaagagtcaagaatatggaagaattcctgcggaattttcaattattagaagtgaaaaaaaaaaaaaagaagaacaatga

SEQ ID NO: 982 - DNA, 372 bp, Artificial Sequence
  Description of Artificial Sequence: Synthetic polynucleotide
atgaagttcccagccgattaccattatacgtctccgtttcgttcctgtaaatattctaatatattacactttatatctttgcttcttatatttagccgcgtaggtttgcctaattacatttttatattcctcatcaataaagccgccaacaaagagcacagggtagaaactttattatctgggaactctgctaacgcttgtaagttatttaatattctcaaaagttttcaacacctcttttttttttttcaaatatgtactattttctctatttccattaagttagtcttattgaagagtcaagaatatggaagaattcctgcggaattttctattattagaagtgaaaaaaaaaaaaaagaagaacaatga

SEQ ID NO: 983 - DNA, 1425 bp, Saccharomyces cerevisiae
atgagtatttcaaattggatcaccactgcgtatttaattacatcaacatcttttcaacctctttatgggtcattttctgatgcacttggtcgaagaaactgccttttctttgctaatggggcttttaccattggatgtctagcctgtggtttctcgaaaaacatctacatgcttagttttatgagagcattgacaggcataggaggtggtggcttgatcacactttctacaatcgtaaattcagacgttattccaagttcgaaaagaggaatttttcaagcgtttcagaatttacttttgggatttggtgccatatgtggagcgtctttcggtggcacaatagcgtcgagcattggttggaggtggtgttttctcatccaagtacccatatctgtgattagttccatattaatgaattattatgtacctaatcagaaagaatataatcgtcaaaattctagcatattccaaaatcccggaaaaatactcagggacatagatgttatgggctcaattcttattataactggtctcacactacagcttctttacctgagcctggggtgttctacttctaaattatcatggaccagcccttctgtgctactgctattagttgggagtgtaataatcctcttactgttcatattgcacgaaaggaaaacaagtgctagagcgattattcctatggagctggtcaattcctcctacagtgtcgttgtactttcgataagtatacttgttggttttgccagctacgcgtatctttttactttaccattattctttcagattgtacttggagattccactgcaaaagcaggattacgtcttacgattccttccctatttactccggtaggcagtctcataacaggattttccatgagcaagtacaactgtctaagattattactctacattggtatttctttgatgtttttgggtaactttttattcctgtttattgaaaaaacttctccgaactggttgattggtctatttttgatacctgcaaatctaggacaaggtatcacttttcctacgaccttgtttactttcatatttatgttctctaagagtgaccaagctactgcgacatcaactttatatttattccgtagtattggatctgtatggggtgttgcaatttcagctggcgtcattcaattatctttcgcaggtttattgcgtagtaatttgaaaggtctactggatgaaaacaagataaagaaacttattgttcagcttagtgcaaactcctcatatattggatctttacatggcgaagttaaaaacacagtcataaagagttttgatgaggcaacaaagagggctcatctaatgtctacattactctcttcattggccctgatactctgcatccttaaagacaatctggcgaaacctaaaacaagaagataa

SEQ ID NO: 984 - DNA, 1425 bp, Artificial Sequence
  Description of Artificial Sequence: Synthetic polynucleotide
atgagtatttctaattggatcaccactgcgtatttaattacatctacatcttttcaacctctttatgggtctttttctgatgcacttggtagaagaaactgccttttctttgctaatggggcttttaccattggatgtttggcctgtggtttctccaaaaacatctacatgcttagttttatgagagcattgacaggcataggaggtggtggcttgatcacactttctacaatcgtaaatagtgacgttattccaagttctaaaagaggaatttttcaagcgtttcagaatttacttttgggatttggtgccatatgtggagcgtctttcggtggcacaatagcgtccagcattggttggaggtggtgttttctcatccaagtacccatatctgtgattagttccatattaatgaattattatgtacctaatcagaaagaatataatcgtcaaaattctagcatattccaaaatcccggaaaaatactcagggacatagatgttatgggctccattcttattataactggtctcacattacagcttctttacttgagcttagggtgttctacttctaaattatcttggaccagcccttctgtgttgttattattagttgggagtgtaataatcctcttattattcatattgcacgaaaggaaaacaagtgctagagcgattattcctatggagttggtcaattcctcctacagtgtcgttgtactttccataagtatacttgttggttttgccagctacgcgtatctttttactttaccattattctttcagattgtacttggagattccactgcaaaagcaggattacgtcttacgattccttccttatttactccggtaggcagtctcataacaggattttccatgagcaagtacaactgtttgagattattactctacattggtatttctttgatgtttttgggtaactttttattcttatttattgaaaaaacttctccgaactggttgattggtttatttttgatacctgcaaatttaggacaaggtatcacttttcctacgaccttgtttactttcatatttatgttctctaagagtgaccaagctactgcgacatctactttatatttattccgtagtattggatctgtatggggtgttgcaatttctgctggcgtcattcaattatctttcgcaggtttattgcgtagtaatttgaaaggtttattagatgaaaacaagataaagaaacttattgttcagcttagtgcaaactccagctatattggatctttacatggcgaagttaaaaacacagtcataaagagttttgatgaggcaacaaagagggctcatttaatgtctacattactctcttctttggccttaatactctgcatccttaaagacaatttggcgaaacctaaaacaagaagatga

SEQ ID NO: 985 - DNA, 2580 bp, Saccharomyces cerevisiae
atgtcacgtaagagctcgactgaatatgtgcataatcaggaggatgctgatatcgaagtatttgaatcagaataccgcacatatagggaatctgaggcggcagaaaacagagacggacttcacaatggtgatgaggaaaattggaaggttaatagtagtaagcagaaatttggggtaacgaaaaatgagctatcagatgtcctgtacgattccattccagcgtatgaagagagcacagtcactttgaaggagtactatgatcattctatcaaaaacaatctaactgcgaaatcggcaggaagttacctcgtatctctttttcctattataaaatggtttcctcattataactttacgtggggctatgctgatttagtggcaggaattacagttggctgcgtactcgtgccccaatctatgtcatacgcacaaatcgctagtttatctcctgaatatggtttgtattcctcctttattggtgcgtttatatattctttgtttgccacatcgaaagatgtttgtattggtccggtcgctgtaatgtcactacaaactgccaaagtcattgctgaagttctaaaaaaatatcccgaagaccagacagaagttacagctcctatcattgcaactaccctttgtttgctttgtgggattgtcgccactgggttgggtatactgcgtttaggctttttagtggaacttatttctctaaatgctgttgctggcttcatgaccggttccgcatttaacatcatctggggtcaaattccggctctcatgggatacaactcattagtgaataccagagaagcaacgtataaggttgtaattaacactctgaaacatttaccaaacacaaagttagacgccgtttttggcttgattccgttggtaatcctctatgtatggaaatggtggtgtggtacatttggtataactttggcagatagatattatcgaaatcaaccaaaggtagcaaatagactgaaatccttctatttctatgcacaagctatgagaaatgccgtcgtcatagtagtttttactgccatatcgtggagcataacaagaaacaaatcttcaaaagaccgtccaatcagtattctgggtacagttccctcgggcttaaatgaggtgggagttatgaaaatcccagacggtctgctatctaatatgagttcagaaatacctgcttcaattatcgttctggtgttagaacacatcgctatttcaaaatcctttggtagaattaacgactacaaggttgtccctgaccaagaacttattgcgattggtgtgacaaatttgatagggacattttttcactcatatccagcaactgggtcattttccagatctgctttgaaagcaaaatgtaacgtgcgcactccgttttctggggtattcactggcggttgcgttctattagcactttattgtttaactgacgccttctttttcattcctaaagcgacactatcggcggttattattcatgctgtttctgatttgctgacttcttacaaaaccacctggaccttctggaagaccaacccgttagattgtatctcatttatcgttacagtgttcatcacagtattttcatccattgaaaatggtatatattttgcaatgtgttggtcatgtgcaatgttactattgaaacaggctttccctgctggtaaattccttggtcgtgttgaggtggcagaagtattgaacccaacagtacaagaggatattgatgctgtgatatcatctaatgaattacctaatgaactgaataaacaggttaagtctactgttgaggttttaccagccccagagtataagtttagcgtaaagtgggttccgttcgatcatggatactcaagagaattgaatatcaataccacagttcggcctcctccaccaggtgtcatagtctatcgtttgggtgatagctttacttacgtgaactgctcaaggcattatgacattatatttgatcgtattaaggaagaaacaaggcgaggccaacttataaccttaaggaaaaagtcagaccgtccatggaatgatcctggtgaatggaaaatgccagattctttgaaatcactatttaaatttaaacgtcattcagcaacaacgaatagtgacctaccgatatcgaatggaagcagtaacggagaaacatatgaaaagccgctactgaaagtcgtctgcctggatttttcccaagttgctcaagtggattcaaccgctgttcaaagcctggttgatctgagaaaagctgtgaataggtatgcggatagacaagtcgaattccattttgccggaattatatctccatggatcaaaagaagtcttttgagtgttaaattcggaactacaaatgaggaatatagtgacgactctattatcgctggccattctagttttcacgttgcaaaagttttgaaggatgatgtggattatactgatgaagacagccgtataagcacatcttacagtaactatgaaacattatgtgctgcaactgggacaaatttaccgttttttcatatcgatatacccgatttttctaaatgggacgtttag

SEQ ID NO: 986 - DNA, 2580 bp, Artificial Sequence
  Description of Artificial Sequence: Synthetic polynucleotide
atgtcccgtaagagctctactgaatatgtgcataatcaggaggatgctgatatcgaagtatttgaaagtgaataccgcacatatagggaatctgaggcggcagaaaacagagacggacttcacaatggtgatgaggaaaattggaaggttaatagtagtaagcagaaatttggggtaacgaaaaatgagttaagtgatgtcttgtacgattccattccagcgtatgaagagagcacagtcactttgaaggagtactatgatcattctatcaaaaacaatttaactgcgaaatctgcaggaagttacctcgtatctctttttcctattataaaatggtttcctcattataactttacgtggggctatgctgatttagtggcaggaattacagttggctgcgtactcgtgccccaatctatgagttacgcacaaatcgctagtttatctcctgaatatggtttgtattcctcctttattggtgcgtttatatattctttgtttgccacaagtaaagatgtttgtattggtccggtcgctgtaatgtctttacaaactgccaaagtcattgctgaagttttgaaaaaatatcccgaagaccagacagaagttacagctcctatcattgcaactaccctttgtttgctttgtgggattgtcgccactgggttgggtatattacgtttaggctttttagtggaacttatttctttgaatgctgttgctggcttcatgaccggttccgcatttaacatcatctggggtcaaattccggctctcatgggatacaactctttagtgaataccagagaagcaacgtataaggttgtaattaacactttgaaacatttaccaaacacaaagttagacgccgtttttggcttgattccgttggtaatcctctatgtatggaaatggtggtgtggtacatttggtataactttggcagatagatattatagaaatcaaccaaaggtagcaaatagattgaaatccttctatttctatgcacaagctatgagaaatgccgtcgtcatagtagtttttactgccatatcttggagcataacaagaaacaaatcttctaaagaccgtccaatcagtattttgggtacagttccctctggcttaaatgaggtgggagttatgaaaatcccagacggtttattatctaatatgagttctgaaatacctgcttccattatcgttttggtgttagaacacatcgctatttccaaatcctttggtagaattaacgactacaaggttgtccctgaccaagaacttattgcgattggtgtgacaaatttgatagggacattttttcactcctatccagcaactgggtctttttccagatctgctttgaaagcaaaatgtaacgtgcgcactccgttttctggggtattcactggcggttgcgttttattagcactttattgtttaactgacgccttctttttcattcctaaagcgacattatctgcggttattattcatgctgtttctgatttgttgacttcttacaaaaccacctggaccttctggaagaccaacccgttagattgtatctcttttatcgttacagtgttcatcacagtattttcttccattgaaaatggtatatattttgcaatgtgttggtcttgtgcaatgttattattgaaacaggctttccctgctggtaaattccttggtcgtgttgaggtggcagaagtattgaacccaacagtacaagaggatattgatgctgtgatatcttctaatgaattacctaatgaattgaataaacaggttaagtctactgttgaggttttaccagccccagagtataagtttagcgtaaagtgggttccgttcgatcatggatactctagagaattgaatatcaataccacagttagacctcctccaccaggtgtcatagtctatcgtttgggtgatagctttacttacgtgaactgctctaggcattatgacattatatttgatcgtattaaggaagaaacaaggagaggccaacttataaccttaaggaaaaagagtgaccgtccatggaatgatcctggtgaatggaaaatgccagattctttgaaatctttatttaaatttaaacgtcattctgcaacaacgaatagtgacttgccgatatccaatggaagcagtaacggagaaacatatgaaaagccgttattgaaagtcgtctgcttagatttttcccaagttgctcaagtggattctaccgctgttcaaagcttagttgatttgagaaaagctgtgaataggtatgcggatagacaagtcgaattccattttgccggaattatatctccatggatcaaaagaagtcttttgagtgttaaattcggaactacaaatgaggaatatagtgacgactctattatcgctggccattctagttttcacgttgcaaaagttttgaaggatgatgtggattatactgatgaagacagccgtataagcacatcttacagtaactatgaaacattatgtgctgcaactgggacaaatttaccgttttttcatatcgatatacccgatttttctaaatgggacgtttga

SEQ ID NO: 987 - DNA, 3651 bp, Saccharomyces cerevisiae
atgaagccggaaaaactcttctccggtttaggtaccagcgatggcgagtatggagtggtaaatagcgagaacatatcaatagatgctatgcaagataatagaggcgagtgtcatcgtagatccatagaaatgcatgctaatgacaatctgggattggtctcccagcgagactgtaccaatcggcccaaaattactcctcaggaatgtttgagtgagactgagcagatatgccatcatggcgagaataggactaaggctgggttagatgtagacgatgctgaaaccggtggtgatcacaccaatgaatcccgtgtagatgaatgttgtgctgagaaagtgaacgacactgagactggcttggatgtggacagctgttgcggcgatgctcaaacaggtggtgaccacaccaatgaatcctgtgttgatggatgctgcgttagagattcttcagtgatggtcgaggaagttacaggcagctgcgaagctgtatcttctaaagaacaattgctgaccagctttgaagttgttccaagcaaatctgaaggtctgcaatctattcatgatattagagagacaactcgctgcaataccaattccaaccaacacacagggaagggtaggctttgcatcgaatcaagtgactctacactcaagaaaagaagttgtaaagttagcagacagaaaattgaggtttccagtaagcctgagtgctgcaacatttcatgtgttgagcggattgcatctcgtagctgtgaaaagaggacttttaaaggtagcaccaatgttggaatttctgggagtagctctaccgacagtttaagcgagaagttcttcagcgaacagtactctagaatgtacaatcgttactcctcaattttgaaaaatttaggttgtatctgtaactatttgcgtactttgggaaaagaatcttgttgtctcccaaaggtgcgtttttgtagcggggagggtgcttctaaaaagacaaaatactcctaccgcaacagttctggatgtttaacaaagaaaaagacccatggagacaaagaaaggttgagcaatgacaatggccatgctgattttgtttgttctaaaagttgttgcactaaaatgaaggattgtgctgttacctcaactatttctggacactcttcgagtgaaatttcaagaatcgtatcaatggaaccaattgaaaatcatcttaatcttgaggcaggatctaccggtaccgagcacattgttcttagtgtttcaggaatgtcctgtactggttgtgaatcaaaacttaagaaatcatttggcgcgctcaaatgtgttcacggtttgaagaccagtttaatattatcgcaagctgaatttaatctggatcttgctcagggatctgtcaaggatgttatcaagcacttgagcaaaactactgaattcaagtacgaacagatttcaaatcatggttcaactatagatgttgttgttccttatgcagcaaaagattttattaatgaggaatggccacaaggtgtcacagagctgaaaattgttgagagaaatatcattcgtatttactttgacccaaaggttataggtgccagagatcttgtcaatgaaggatggagcgtgcctgttagtattgctccattcagttgtcatccaaccattgaagtgggaaggaagcatttagttcgtgtaggctgcacgaccgctttatccataatattgacgatcccgattctcgtgatggcttgggctccacagcttcgtgaaaaaatttccactatctccgcgtcaatggtgctagcaactattattcaatttgttattgcaggaccgttttacttaaatgccttgaagagtttgatattttccaggctcattgaaatggatctactaatagttttaagcactagcgctgcctacatattttcgattgtatcatttggatatttcgttgttggacgcccgttatctacggagcagttttttgaaaccagctctttgcttgtaactctcatcatggttggtcgctttgtgagtgaactagctagacatagggctgtaaagtcaatatcagtacgttccttacaggcctcttctgctattctggtggataaaactggtaaagagacggaaattaatattagacttctccaatatggcgatatttttaaggttttacctgattcaagaatcccaactgatggaacagtcatttctgggtcttctgaagtcgacgaagcgttaatcacaggtgaatctatgccagtcccgaaaaagtgtcaatcaattgttgttgcaggatcggtgaatggcactggtactttgtttgtgaagctgagcaagcttccagggaacaatactattagtaccatagccacgatggttgatgaagcaaaattaactaagccaaagatccaaaatatcgctgataaaattgcaagttatttcgtgccaactatcattggaatcactgtcgtcaccttttgcgtttggatagcggttggaatccgtgtggaaaagcaatcccgctccgatgccgtaattcaggccattatatatgccattacggtacttatcgtttcgtgtccctgcgtgattggacttgccgttcctatcgtatttgttattgcaagtggcgtcgctgcgaaaagaggggtaatcttcaaatcagcagagagtatagaagttgctcacaacacttcgcatgttgtcttcgataaaacgggtaccctaactgaaggaaaacttactgtagtacatgaaactgttaggggtgatcgtcataattctcaatctttgttgcttggattaactgaaggaataaaacacccagtttccatggcaatagcatcctatctcaaagaaaaaggtgtttctgctcaaaatgtttctaatacaaaagctgtgactggtaagcgggtagaaggaacatcatactctggtttgaagttacaaggagggaactgtcgttggcttggtcataacaatgatcctgacgttcgaaaagcccttgaacaaggatattctgtattctgttttagtgttaatggttcagtcactgcagtttatgcattagaggactctttacgggcagatgctgtctccactattaacttgttacgccaaagagggatttcactacacattttatcaggggatgacgatggagccgttcgttctatggcagcccgtcttggaattgaaagctccaatattcgttctcacgcaacgcctgcagaaaagagtgaatatattaaggatattgtcgaaggaagaaattgcgatagttcttcgcagtcaaaaagaccggttgttgttttttgcggtgacggaacaaacgacgcaattggtttgactcaagcaacgattggagttcatatcaatgagggaagtgaggttgccaagctagctgctgatgtagttatgttaaagccaaagctcaacaatattttgactatgataactgtaagtcaaaaggccatgtttagggtcaaattgaatttcttatggagttttacttacaacttatttgctatccttttggcggctggtgcctttgttgactttcatattccaccagagtatgcgggtttaggggaactagttagtatcctccctgtaatttttgtagctatacttctgcgttatgcaaagatttag

SEQ ID NO: 988 - DNA, 3651 bp, Artificial Sequence
  Description of Artificial Sequence: Synthetic polynucleotide
atgaagccggaaaaactcttctccggtttaggtaccagcgatggcgagtatggagtggtaaatagcgagaacatatccatagatgctatgcaagataatagaggcgagtgtcatcgtagatccatagaaatgcatgctaatgacaatttaggattggtctcccagagagactgtaccaataggcccaaaattactcctcaggaatgtttgagtgagactgagcagatatgccatcatggcgagaataggactaaggctgggttagatgtagacgatgctgaaaccggtggtgatcacaccaatgaatcccgtgtagatgaatgttgtgctgagaaagtgaacgacactgagactggcttggatgtggacagctgttgcggcgatgctcaaacaggtggtgaccacaccaatgaatcctgtgttgatggatgctgcgttagagattcttctgtgatggtcgaggaagttacaggcagctgcgaagctgtatcttctaaagaacaattgttgaccagctttgaagttgttccaagcaaatctgaaggtttacaatctattcatgatattagagagacaactcgctgcaataccaattccaaccaacacacagggaagggtaggctttgcatcgaaagtagtgactctacactcaagaaaagaagttgtaaagttagcagacagaaaattgaggtttccagtaagcctgagtgctgcaacattagttgtgttgagagaattgcatctcgtagctgtgaaaagaggacttttaaaggtagcaccaatgttggaatttctgggagtagctctaccgacagtttaagcgagaagttcttcagcgaacagtactctagaatgtacaatcgttactccagtattttgaaaaatttaggttgtatctgtaactatttgcgtactttgggaaaagaatcttgttgtctcccaaaggtgcgtttttgtagcggggagggtgcttctaaaaagacaaaatactcctaccgcaacagttctggatgtttaacaaagaaaaagacccatggagacaaagaaaggttgagcaatgacaatggccatgctgattttgtttgttctaaaagttgttgcactaaaatgaaggattgtgctgttacctctactatttctggacactcttccagtgaaatttctagaatcgtatctatggaaccaattgaaaatcatcttaatcttgaggcaggatctaccggtaccgagcacattgttcttagtgtttctggaatgtcctgtactggttgtgaaagtaaacttaagaaaagttttggcgcgctcaaatgtgttcacggtttgaagaccagtttaatattatctcaagctgaatttaatttggatcttgctcagggatctgtcaaggatgttatcaagcacttgagcaaaactactgaattcaagtacgaacagatttctaatcatggttctactatagatgttgttgttccttatgcagcaaaagattttattaatgaggaatggccacaaggtgtcacagagttgaaaattgttgagagaaatatcattcgtatttactttgacccaaaggttataggtgccagagatcttgtcaatgaaggatggagcgtgcctgttagtattgctccattcagttgtcatccaaccattgaagtgggaaggaagcatttagttcgtgtaggctgcacgaccgctttatccataatattgacgatcccgattctcgtgatggcttgggctccacagcttcgtgaaaaaatttccactatctccgcgtccatggtgttggcaactattattcaatttgttattgcaggaccgttttacttaaatgccttgaagagtttgatattttccaggctcattgaaatggatttattgatagttttaagcactagcgctgcctacatattttctattgtatcctttggatatttcgttgttggacgcccgttatctacggagcagttttttgaaaccagctctttgcttgtaactctcatcatggttggtcgctttgtgagtgaattggctagacatagggctgtaaagagtatatctgtacgttccttacaggcctcttctgctattttggtggataaaactggtaaagagacggaaattaatattagacttctccaatatggcgatatttttaaggttttacctgattccagaatcccaactgatggaacagtcatttctgggtcttctgaagtcgacgaagcgttaatcacaggtgaatctatgccagtcccgaaaaagtgtcaatctattgttgttgcaggatctgtgaatggcactggtactttgtttgtgaagttgagcaagcttccagggaacaatactattagtaccatagccacgatggttgatgaagcaaaattaactaagccaaagatccaaaatatcgctgataaaattgcaagttatttcgtgccaactatcattggaatcactgtcgtcaccttttgcgtttggatagcggttggaatccgtgtggaaaagcaatcccgctccgatgccgtaattcaggccattatatatgccattacggtacttatcgtttcttgtccctgcgtgattggacttgccgttcctatcgtatttgttattgcaagtggcgtcgctgcgaaaagaggggtaatcttcaaatctgcagagagtatagaagttgctcacaacacttctcatgttgtcttcgataaaacgggtaccttaactgaaggaaaacttactgtagtacatgaaactgttaggggtgatcgtcataattctcaatctttgttgcttggattaactgaaggaataaaacacccagtttccatggcaatagcatcctatctcaaagaaaaaggtgtttctgctcaaaatgtttctaatacaaaagctgtgactggtaagagagtagaaggaacatcttactctggtttgaagttacaaggagggaactgtcgttggcttggtcataacaatgatcctgacgttagaaaagcccttgaacaaggatattctgtattctgttttagtgttaatggttctgtcactgcagtttatgcattagaggactctttaagagcagatgctgtctccactattaacttgttacgccaaagagggatttctttacacattttaagtggggatgacgatggagccgttcgttctatggcagcccgtcttggaattgaaagctccaatattcgttctcacgcaacgcctgcagaaaagagtgaatatattaaggatattgtcgaaggaagaaattgcgatagttcttctcagtccaaaagaccggttgttgttttttgcggtgacggaacaaacgacgcaattggtttgactcaagcaacgattggagttcatatcaatgagggaagtgaggttgccaagttggctgctgatgtagttatgttaaagccaaagctcaacaatattttgactatgataactgtaagtcaaaaggccatgtttagggtcaaattgaatttcttatggagttttacttacaacttatttgctatccttttggcggctggtgcctttgttgactttcatattccaccagagtatgcgggtttaggggaattggttagtatcctccctgtaatttttgtagctatacttttgcgttatgcaaagatttga

SEQ ID NO: 989 - DNA, 1725 bp, Saccharomyces cerevisiae
atggctttacatcaatttgactatatttttgccattgccatgttatttgcatttttggatgcctttaacatcggggcaaacgacgtggcgaactcattcgcgtcgtcgatctcttctagatctctaaaatactggcaagccatggttttggcgggtctctgtgagttcttgggtgctgtcttggcaggcgcaagagtttctggtactatcaagaacaacattatagattcctccatttttaccaacgaccccgctgttttaatgcttactatgaccagtgctttgattggctcgtcttgttggttaacatttgctactgcaatcggaatgccagtttctactacacattccattgttggtggtacaattggcgctgggattgcagccggtggagctaacggtgtcgtttggggttggagtggtgtttctcaaattattgcgtcatggttcattgctccgattttggcaggcgcgatcgcagctatagttttttcaatttctaggttttctgtccttgaagttaagtctttggaaagatcgattaagaatgctttactgctggttggtgttttagtattcgccactttctctatcttaacaatgttgattgtctggaagggttctccaaacctacacttggacgatttatctgaaactgaaactgccgtatctattgttctcacaggtgcaattgcttcgatcgtttacttcatctttttctacccattctacagaagaaaagttttggaccaagattggacactaaagttgattgatattttcagaggtccatctttttactttaagtccactgatgatatcccaccaatgccagaaggccatcaattaacaatcgattattacgagggcagaagaaatcttggaacaactgtttctgttgaagacgaagaaaataaggcagcgagtaattctaatgattccgtcaaaaacaaagaagacatccaggaagtggacctggttagaactgaaactgaaccagaaacaaagttgtcaacgaaacaatattggtggtcattattaaagcaaggacctaaaaaatggcccttattgttctggttagtaatctctcatggttggactcaagacgtcattcatgctcaagttaatgatagagatatgttatctggtgacctgaaaggaatgtacgaaagatctaaattttacgacaatagagtagaatatatctattcggttctccaagccattactgcagccactatgtcttttgctcatggagctaatgacgttgccaacgctactggtcctttgtctgctgtgtatgtgatctggaaaactaacactattggggcaaagtccgaagttcccgtgtgggttctggcttatggtggtgttgccttagttattggttgctggacttatggttacaatattatcaaaaatctaggtaataagatgattttgcagtcgccatcaagaggcttttcaattgaactagctgttgctattactactgtcatggctacccaattaggtattcctacctcaacaacccagatcgccgttggtggtattgtcgctgttggtttatgtaacaaggatctcaaatcagttaattggagaatggtagcctggtgttattctggttggtttttaactttaccaattgctggtttgattgccggtatcataaatggtatcattttgaatgctcctcgctttggtgtggaataccaaatgacataa

SEQ ID NO: 990 - DNA, 1725 bp, Artificial Sequence
  Description of Artificial Sequence: Synthetic polynucleotide
atggctttacatcaatttgactatatttttgccattgccatgttatttgcatttttggatgcctttaacatcggggcaaacgacgtggcgaactctttcgcgtcttctatctcttctagatctttgaaatactggcaagccatggttttggcgggtctctgtgagttcttgggtgctgtcttggcaggcgcaagagtttctggtactatcaagaacaacattatagattcctccatttttaccaacgaccccgctgttttaatgcttactatgaccagtgctttgattggctcttcttgttggttaacatttgctactgcaatcggaatgccagtttctactacacattccattgttggtggtacaattggcgctgggattgcagccggtggagctaacggtgtcgtttggggttggagtggtgtttctcaaattattgcgtcttggttcattgctccgattttggcaggcgcgatcgcagctatagttttttctatttctaggttttctgtccttgaagttaagtctttggaaagatctattaagaatgctttattattggttggtgttttagtattcgccactttctctatcttaacaatgttgattgtctggaagggttctccaaacttgcacttggacgatttatctgaaactgaaactgccgtatctattgttctcacaggtgcaattgcttctatcgtttacttcatctttttctacccattctacagaagaaaagttttggaccaagattggacattgaagttgattgatattttcagaggtccatctttttactttaagtccactgatgatatcccaccaatgccagaaggccatcaattaacaatcgattattacgagggcagaagaaatcttggaacaactgtttctgttgaagacgaagaaaataaggcagcgagtaattctaatgattccgtcaaaaacaaagaagacatccaggaagtggacttggttagaactgaaactgaaccagaaacaaagttgagcacgaaacaatattggtggtctttattaaagcaaggacctaaaaaatggcccttattgttctggttagtaatctctcatggttggactcaagacgtcattcatgctcaagttaatgatagagatatgttatctggtgacttgaaaggaatgtacgaaagatctaaattttacgacaatagagtagaatatatctattctgttctccaagccattactgcagccactatgtcttttgctcatggagctaatgacgttgccaacgctactggtcctttgtctgctgtgtatgtgatctggaaaactaacactattggggcaaagtccgaagttcccgtgtgggttttggcttatggtggtgttgccttagttattggttgctggacttatggttacaatattatcaaaaatttgggtaataagatgattttgcagtctccatctagaggcttttctattgaattggctgttgctattactactgtcatggctacccaattaggtattcctacctctacaacccagatcgccgttggtggtattgtcgctgttggtttatgtaacaaggatctcaaatctgttaattggagaatggtagcctggtgttattctggttggtttttaactttaccaattgctggtttgattgccggtatcataaatggtatcattttgaatgctcctcgctttggtgtggaataccaaatgacatga

SEQ ID NO: 991 - DNA, 120 bp, Saccharomyces cerevisiae
atgaaagtgctagatgattggttttcaaggaagttctcaaaagctgtacacggaaacaatcacggcaccatttccttgtcaactctgtcttatatcagagtccataaactagtaaaatga

SEQ ID NO: 992 - DNA, 120 bp, Artificial Sequence
  Description of Artificial Sequence: Synthetic polynucleotide
atgaaagtgttggatgattggtttagcaggaagttctccaaagctgtacacggaaacaatcacggcaccatttccttgtctactttatcttatatcagagtccataaattagtaaaatga

SEQ ID NO: 993 - DNA, 1407 bp, Saccharomyces cerevisiae
atgactttagtcaagtatgcatgcgactattgtcgtgtccgtcgagtaaagtgtgatggtaaaaaaccatgtagtcgctgtattgagcacaatttcgattgcacatatcagcaaccattaaaaaaaagaggctcaaagcctattggaactagaagcttaaagtatataccaaaggccaaaatgtttatagataataaaagttgtacggcagcggcagaaatattaatgaaggttcctaaaaaggtgattgatcagtgtttgaggctttatcacgacaatctatatgttatctggcctttactctcttatgatgaccttcacaagcttttggacgaagaatacaatgaccattacgtttattggtttctcgtagctctttcagcagccaatcttagcgatctacaaagcgaattagaatctgaggggggattttcgtttactggaaaacaattagccgttctctgtatgtcctcacgccaacaatttgatgaccttagcggcagagacattttccgaattatgacatattattgcttgctacgttgtttttcacagtcttctgatgtaagaaattcatacagactttgtcgtgaagctattggccttgttattgtagcagggttacatcgtgaaaaagcatacgaatcactatcatttcgtgagcaacagcttttacgcaaggtgtattatttgcttctcttgacggaaagatactattccgtatatgttcattgtgttacaagtttggataccacaatagctccacctcagccagagttcgtaacggaccctcgactttctttggatagcttttttgagatgattagagtatttactgtaccaggtaaatgcttttttgatgctttggctacggagtctactagcggttcttgcactgaagactcactgaaaaaaatatggaaagagcttcacacagcatcccttgaaatagaaccatggtcttatggctatgtggacatttcattttctcgacattggattagggcgctggcttggaagctagtgtttcagatgaatggtaccaagtttttctcaaacgccaataatgctcacatattggtcgaaattgcaaaggatatgctggacgacatattcttaactccaaacaacctgtatgatgtacatggtcctggaataccaatgaaatcattggaagtagccaatgcattggtagatatcgtaaataagtatgatcacaatatgaagttggaggcttggaatattttgtgcgatgtatccaagttcgttttctccctgaaacattgcaatcataaaatgtttcaaaggttttcaactaaatgtcagagtgctctaatcgatttgcctatctctagaccactgcgcctaaatgatgattccaaagatgaagacgacataattccttaa

SEQ ID NO: 994 - DNA, 1407 bp, Artificial Sequence
  Description of Artificial Sequence: Synthetic polynucleotide
atgactttagtcaagtatgcatgcgactattgtcgtgtccgtcgtgtaaagtgtgatggtaaaaaaccatgtagtcgctgtattgagcacaatttcgattgcacatatcagcaaccattaaaaaaaagaggctccaagcctattggaactagaagcttaaagtatataccaaaggccaaaatgtttatagataataaaagttgtacggcagcggcagaaatattaatgaaggttcctaaaaaggtgattgatcagtgtttgaggctttatcacgacaatttatatgttatctggcctttactctcttatgatgaccttcacaagcttttggacgaagaatacaatgaccattacgtttattggtttctcgtagctctttctgcagccaatcttagcgatttgcaaagcgaattagaatctgaggggggattttcttttactggaaaacaattagccgttctctgtatgtcctctcgccaacaatttgatgaccttagcggcagagacattttcagaattatgacatattattgcttgttacgttgtttttcccagtcttctgatgtaagaaattcttacagactttgtcgtgaagctattggccttgttattgtagcagggttacatcgtgaaaaagcatacgaatctttatcttttcgtgagcaacagcttttacgcaaggtgtattatttgcttctcttgacggaaagatactattccgtatatgttcattgtgttacaagtttggataccacaatagctccacctcagccagagttcgtaacggaccctcgtctttctttggatagcttttttgagatgattagagtatttactgtaccaggtaaatgcttttttgatgctttggctacggagtctactagcggttcttgcactgaagactctttgaaaaaaatatggaaagagcttcacacagcatcccttgaaatagaaccatggtcttatggctatgtggacatttccttttctagacattggattagggcgttagcttggaagttagtgtttcagatgaatggtaccaagtttttcagtaacgccaataatgctcacatattggtcgaaattgcaaaggatatgttggacgacatattcttaactccaaacaacttatatgatgtacatggtcctggaataccaatgaaatctttggaagtagccaatgcattggtagatatcgtaaataagtatgatcacaatatgaagttggaggcttggaatattttgtgcgatgtatccaagttcgttttctccttgaaacattgcaatcataaaatgtttcaaaggttttccactaaatgtcagagtgctttgatcgatttgcctatctctagaccattgcgcttgaatgatgattccaaagatgaagacgacataattccttga

SEQ ID NO: 995 - DNA, 1845 bp, Saccharomyces cerevisiae
atgaagggattatcctcattaataaacagaaaaaaagacaggaacgactcacacttagatgagatcgagaatggcgtgaacgctaccgaattcaactcgatagagatggaggagcaaggtaagaaaagtgattttgatctttcccatcttgagtacggtccaggttcactaataccaaacgataataatgaagaagtccccgaccttctcgatgaagctatgcaggacgccaaagaggcagatgaaagtgagaggggaatgccactcatgacagctttgaagacatatccaaaagctgctgcttggtcactattagtttccacaacattgattcaagagggttatgacacagccattctaggagctttctatgccctgcctgtttttcaaaaaaaatatggttctttgaatagcaatacaggagattatgaaatttcagtttcctggcaaatcggtctatgtctatgctacatggcaggtgagattgtcggtttgcaaatgactgggccttctgtagattacatgggcaaccgttacactctgatcatggcgttgttctttttagcggctttcattttcattctgtatttttgcaagagtttgggtatgattgccgtgggacaggcattgtgtggtatgccatggggttgtttccaatgtttgaccgtttcttatgcttctgaaatttgtcctttggccctaagatactatttgacgacttattctaatttatgttgggcgttcggtcaacttttcgctgctggtattatgaaaaattcccagaacaaatatgccaactcagaactaggatataagctaccttttgctttgcagtggatctggccccttcctttggcggtaggtattttttttgcaccagagtctccatggtggctggttaaaaaaggaaggattgatcaagcgaggagatcacttgaaagaacattaagtggtaaaggacccgagaaagaattactagtgagtatggaactcgataaaatcaaaactactatagaaaaggagcagaaaatgtctgatgaaggaacttactgggattgtgtgaaagatggtattaacaggagaagaacgagaatagcttgtttatgttggatcggtcaatgctcctgtggtgcatcattaattggttattcaacttacttttatgaaaaagctggtgttagcactgatacggcttttactttcagtattatccaatattgtcttggtattgctgcaacgtttatatcctggtgggcttcaaaatattgtggcagatttgacctttatgcttttgggctggcttttcaggctattatgttcttcattatcggtggtttaggatgttcagacactcatggcgctaaaatgggtagtggtgctcttctaatggttgtcgcgttcttttacaacctcggtattgcacctgttgttttttgcttagtgtctgaaataccgtcttcaaggctaagaaccaaaacaattattttggctcgtaatgcttacaatgtgatccaagttgtagttacagttttgatcatgtaccaattgaactcagagaaatggaattggggtgctaaatcaggctttttctggggaggattttgtctggccactttagcttgggctgttgtcgatttaccagaaaccgctggcaggacttttattgagataaatgaattgtttagacttggtgttccagcaagaaagttcaagtcgactaaagtcgacccttttgcagctgccaaagcagcagctgcagaaattaatgttaaagatccgaaggaagatttggaaacttctgtggtagatgaagggcgaaacacctcatctgttgtgaacaaatga

SEQ ID NO: 996 - DNA, 1845 bp, Artificial Sequence
  Description of Artificial Sequence: Synthetic polynucleotide
atgaagggattatcctctttaataaacagaaaaaaagacaggaacgactctcacttagatgagatcgagaatggcgtgaacgctaccgaattcaacagcatagagatggaggagcaaggtaagaaaagtgattttgatctttcccatcttgagtacggtccaggttctttgataccaaacgataataatgaagaagtccccgaccttctcgatgaagctatgcaggacgccaaagaggcagatgaaagtgagaggggaatgccactcatgacagctttgaagacatatccaaaagctgctgcttggtctttattagtttccacaacattgattcaagagggttatgacacagccattttaggagctttctatgccttgcctgtttttcaaaaaaaatatggttctttgaatagcaatacaggagattatgaaatttctgtttcctggcaaatcggtttgtgtctttgctacatggcaggtgagattgtcggtttgcaaatgactgggccttctgtagattacatgggcaaccgttacactttgatcatggcgttgttctttttagcggctttcattttcattctttatttttgcaagagtttgggtatgattgccgtgggacaggcattgtgtggtatgccatggggttgtttccaatgtttgaccgtttcttatgcttctgaaatttgtcctttggccttgagatactatttgacgacttattctaatttatgttgggcgttcggtcaacttttcgctgctggtattatgaaaaattcccagaacaaatatgccaactctgaattaggatataagttaccttttgctttgcagtggatctggccccttcctttggcggtaggtattttttttgcaccagagtctccatggtggttagttaaaaaaggaaggattgatcaagcgaggagatctcttgaaagaacattaagtggtaaaggacccgagaaagaattattggtgagtatggaactcgataaaatcaaaactactatagaaaaggagcagaaaatgtctgatgaaggaacttactgggattgtgtgaaagatggtattaacaggagaagaacgagaatagcttgtttatgttggatcggtcaatgctcctgtggtgcatctttaattggttattctacttacttttatgaaaaagctggtgttagcactgatacggcttttactttcagtattatccaatattgtcttggtattgctgcaacgtttatatcctggtgggcttccaaatattgtggcagatttgacctttatgcttttgggttggcttttcaggctattatgttcttcattatcggtggtttaggatgttctgacactcatggcgctaaaatgggtagtggtgctcttttgatggttgtcgcgttcttttacaacctcggtattgcacctgttgttttttgcttagtgtctgaaataccgtcttccaggttaagaaccaaaacaattattttggctcgtaatgcttacaatgtgatccaagttgtagttacagttttgatcatgtaccaattgaacagtgagaaatggaattggggtgctaaatctggctttttctggggaggattttgtttggccactttagcttgggctgttgtcgatttaccagaaaccgctggcaggacttttattgagataaatgaattgtttagacttggtgttccagcaagaaagttcaagtctactaaagtcgacccttttgcagctgccaaagcagcagctgcagaaattaatgttaaagatccgaaggaagatttggaaacttctgtggtagatgaagggagaaacacctcttctgttgtgaacaaatga

SEQ ID NO: 997 - DNA, 222 bp, Saccharomyces cerevisiae
atggaactttttataccttgcccagagcgcctcaagaaaatgatgctgaaagaagaattgaggaaggaactactcatcttacgttgtttgtatcatcccacgatccaaatcatgttacctacgttaggtacgctaggaactgaaaaaagaaaagaaaagtatgcgttatcactcttcgagccaattcttaattgtgtggggtccgcgaaaacttccggataa

SEQ ID NO: 998 - DNA, 222 bp, Artificial Sequence
  Description of Artificial Sequence: Synthetic polynucleotide
atggaactttttataccttgcccagagcgcctcaagaaaatgatgttgaaagaagaattgaggaaggaattactcatcttacgttgtttgtatcatcccacgatccaaatcatgttacctacgttaggtacgttgggaactgaaaaaagaaaagaaaagtatgcgttatctctcttcgagccaattcttaattgtgtggggtccgcgaaaacttccggatga

SEQ ID NO: 999 - DNA, 1755 bp, Saccharomyces cerevisiae
atgactatttctgatcatccagaaacagaaccaaagtggtggaaagaggccacaatctatcaaatttacccagcaagttttaaagactccaataacgatggctggggtgatttaaaaggtatcacttccaagttgcagtatattaaagatcttggcgttgatgctatttgggtttgtccgttttatgactctcctcaacaagatatggggtatgatatatctaactacgaaaaggtctggcccacatacggtaccaacgaggactgttttgagctaattgacaagactcataagctgggtatgaaattcatcaccgatttggttatcaaccactgttctacagaacacgaatggttcaaagagagcagatcctcgaagaccaatccgaagcgtgactggttcttctggagacctcctaaaggttatgacgccgaaggcaagccaattcctccaaacaattggaaatctttctttggtggttcagcttggacttttgatgaaactacaaatgaattttacctccgtttgtttgcgagtcgtcaagttgacttgaattgggagaatgaagactgcagaagggcaatctttgaaagtgctgttggattttggctggaccatggtgtagatggttttagaatcgataccgctggtttgtattcgaaacgtcctggtttaccagattccccaatttttgacaaaacctcgaaattacaacatccaaattgggggtctcacaatggtcctaggattcatgaatatcatcaagaactacacagatttatgaaaaacagggtgaaagatggtagagaaataatgacagtcggtgaagttgcccatggaagtgataatgctttatacaccagtgcagctagatacgaagtcagcgaagttttctccttcacgcacgttgaacttggtacctcgccatttttccgttataacatagtgcccttcaccttgaaacaatggaaagaagccattgcatcgaactttttgttcattaacggtactgatagttgggctaccacctacatcgagaatcacgatcaagcccggtcaattacgagatttgctgacgattcgccaaagtaccgtaaaatatctggtaagctgttaacattgctagaatgttcattgacaggtacgttgtatgtctatcaaggtcaggagataggccagatcaatttcaaggaatggcctattgaaaagtatgaggacgttgatgtgaaaaacaactacgagattatcaaaaaaagttttggtaaaaactcgaaggaaatgaaggatttttttaaaggaatcgccctactttctagagatcattcgagaactcccatgccatggacgaaagataagcccaatgctggatttactggcccagatgttaaaccttggtttttcttgaatgaatcttttgagcaaggaatcaatgttgagcaggaatccagagatgatgactcagttctcaatttttggaaaagggccttgcaagccagaaagaaatataaggaacttatgatttatggttacgatttccaattcattgatttagacagtgaccagatctttagcttcactaaagagtacgaagacaagacgctgtttgctgctttgaatttcagtggcgaagaaattgaattcagcctcccaagagaaggtgcttctttatcttttattcttggaaattatgatgatactgacgtttcctccagagttttgaaaccatgggaaggtagaatctacctcgtcaaataa

SEQ ID NO: 1000 - DNA, 1755 bp, Artificial Sequence
  Description of Artificial Sequence: Synthetic polynucleotide
atgactatttctgatcatccagaaacagaaccaaagtggtggaaagaggccacaatctatcaaatttacccagcaagttttaaagactccaataacgatggctggggtgatttaaaaggtatcacttccaagttgcagtatattaaagatcttggcgttgatgctatttgggtttgtccgttttatgactctcctcaacaagatatggggtatgatatatctaactacgaaaaggtctggcccacatacggtaccaacgaggactgttttgagttgattgacaagactcataagttgggtatgaaattcatcaccgatttggttatcaaccactgttctacagaacacgaatggttcaaagagagcagatcctccaagaccaatccgaagcgtgactggttcttctggagacctcctaaaggttatgacgccgaaggcaagccaattcctccaaacaattggaaatctttctttggtggttctgcttggacttttgatgaaactacaaatgaattttacctccgtttgtttgcgagtcgtcaagttgacttgaattgggagaatgaagactgcagaagggcaatctttgaaagtgctgttggattttggttagaccatggtgtagatggttttagaatcgataccgctggtttgtattctaaacgtcctggtttaccagattccccaatttttgacaaaacctccaaattacaacatccaaattgggggtctcacaatggtcctaggattcatgaatatcatcaagaattgcacagatttatgaaaaacagggtgaaagatggtagagaaataatgacagtcggtgaagttgcccatggaagtgataatgctttatacaccagtgcagctagatacgaagtcagcgaagttttctccttcacgcacgttgaacttggtacctctccatttttccgttataacatagtgcccttcaccttgaaacaatggaaagaagccattgcatctaactttttgttcattaacggtactgatagttgggctaccacctacatcgagaatcacgatcaagcccgttctattacgagatttgctgacgattctccaaagtaccgtaaaatatctggtaagcttttaacattgttggaatgttctttgacaggtacgttgtatgtctatcaaggtcaggagataggccagatcaatttcaaggaatggcctattgaaaagtatgaggacgttgatgtgaaaaacaactacgagattatcaaaaaaagttttggtaaaaactccaaggaaatgaaggatttttttaaaggaatcgccttactttctagagatcattccagaactcccatgccatggacgaaagataagcccaatgctggatttactggcccagatgttaaaccttggtttttcttgaatgaatcttttgagcaaggaatcaatgttgagcaggaatccagagatgatgactctgttctcaatttttggaaaagggccttgcaagccagaaagaaatataaggaacttatgatttatggttacgatttccaattcattgatttagacagtgaccagatctttagcttcactaaagagtacgaagacaagacgttgtttgctgctttgaatttcagtggcgaagaaattgaattcagcctcccaagagaaggtgcttctttatcttttattcttggaaattatgatgatactgacgtttcctccagagttttgaaaccatgggaaggtagaatctacctcgtcaaatga

SEQ ID NO: 1001 - DNA, 363 bp, Saccharomyces cerevisiae
atggtcaaactaacttcaatcgctgctggtgttgccgccatcgctgctactgcttccgcaaccaccactctagctcaatctgacgaaagagtcaacttggttgaattgggtgtctacgtctctgatatcagagctcacttggcccaatactactctttccaagtcgctcatccaactgaaacctacccagttgaaatcgctgaagccgttttcaactacggtgacttcaccaccatgttgaccggtattgccccagaccaagtgaccagaatgatcaccggtgtcccatggtactccagcagattaaagccagccatctctagtgctctatccaaggacggtatctacactatcgcaaactag

SEQ ID NO: 1002 - DNA, 363 bp, Artificial Sequence
  Description of Artificial Sequence: Synthetic polynucleotide
atggtcaaattaacttctatcgctgctggtgttgccgccatcgctgctactgcttccgcaaccaccactttggctcaatctgacgaaagagtcaacttggttgaattgggtgtctacgtctctgatatcagagctcacttggcccaatactactctttccaagtcgctcatccaactgaaacctacccagttgaaatcgctgaagccgttttcaactacggtgacttcaccaccatgttgaccggtattgccccagaccaagtgaccagaatgatcaccggtgtcccatggtactccagcagattaaagccagccatctctagtgctttgtccaaggacggtatctacactatcgcaaactga

SEQ ID NO: 1003 - DNA, 1140 bp, Saccharomyces cerevisiae
atgaaagagaatgaacttaaaaatgagaagagtgtagatgtattatccttcaaacagctcgaatcccaaaagattgttctacctcaagatcttttcagaagcagctttacctggttttgttatgaaatttacaagtccttagcgtttcgcatctggatgctattatggctaccacttagcgtctggtggaaactttccaacaattgtatttacccacttatagtttcacttctggtcctgtttctgggaccaatatttgtccttgttatttgtggactttctcgtaagcgttccttatcgaaacaactcattcagttttgcaaagagattactgaaaacacaccaagttctgatcctcatgattgggaagttgttgcagcaaatctaaattcgtacttatatgaaaataacgtttggaatactaagtacttttttttcaatgccatggtctgtcaagaagcgttcagaacaacccttctcgaaccattttctttgaaaaaagataaagctgccaaggttaagtcatttaaggattccgtcccttacattgaagaagcattgggagtttattttacagaagttgaaaaacaatggaaattgtttaatactgaaaaatcatggagccctgttggcctggaagatgctaaacttcccaaggaagcttaccgatttaagcttacttggtttttaaagaggatttccaatatttttatgttgataccattccttaattttttgtgctgcatatatgtgtcacggggaatgtgccttctattacgcaccttgtatctcgggtggattcttttcatgttggtacaaggtttccaaaatataagggttttgattatgagcatggaacacaagatgcagttcttgtcgactattataaatgagcaagaaagtggtgcgaatggatgggacgaaattgcaaggaaaatgaataggtacttgtttgagaaaaaagcctggaagaatgaagagtttttcttcgacgggattgactgtgaatggttttttaaccacttcttctaccgcgttctatctgcgaagaaatctatgtggcctttaccattgaatgtggaactatggccatacattaaagaagcgcaattatcccgcagtgaggtgctcttagtgtag

SEQ ID NO: 1004 - DNA, 1140 bp, Artificial Sequence
  Description of Artificial Sequence: Synthetic polynucleotide
atgaaagagaatgaacttaaaaatgagaagagtgtagatgtattatccttcaaacagctcgaatcccaaaagattgttttacctcaagatcttttcagaagcagctttacctggttttgttatgaaatttacaagtccttagcgtttcgcatctggatgcttttatggttaccacttagcgtctggtggaaactttccaacaattgtatttacccacttatagtttcccttttggtcttgtttttgggaccaatatttgtccttgttatttgtggactttctcgtaagcgttccttatccaaacaactcattcagttttgcaaagagattactgaaaacacaccaagttctgatcctcatgattgggaagttgttgcagcaaatttgaattcttacttatatgaaaataacgtttggaatactaagtacttttttttcaatgccatggtctgtcaagaagcgttcagaacaacccttctcgaaccattttctttgaaaaaagataaagctgccaaggttaagagctttaaggattccgtcccttacattgaagaagcattgggagtttattttacagaagttgaaaaacaatggaaattgtttaatactgaaaaaagttggagccctgttggccttgaagatgctaaacttcccaaggaagcttacagatttaagcttacttggtttttaaagaggatttccaatatttttatgttgataccattccttaattttttgtgctgcatatatgtgtccagaggaatgtgccttttattacgcaccttgtatctcgggtggattcttttcatgttggtacaaggtttccaaaatataagggttttgattatgagcatggaacacaagatgcagttcttgtctactattataaatgagcaagaaagtggtgcgaatggatgggacgaaattgcaaggaaaatgaataggtacttgtttgagaaaaaagcctggaagaatgaagagtttttcttcgacgggattgactgtgaatggttttttaaccacttcttctaccgcgttttatctgcgaagaaatctatgtggcctttaccattgaatgtggaattatggccatacattaaagaagcgcaattatcccgcagtgaggtgctcttagtgtga

SEQ ID NO: 1005 - DNA, 1848 bp, Saccharomyces cerevisiae
atgagttctagtgttgttggtgcctcaagtaataaaaaaagtggaattaggcagtcctgtgagattattgagcgagaacgtcactcaaacgatgacacgtactctatgacatcgaccttttttaagctcaaagaaaacgaaattatgtctgcacagtttgattccttgaaatataaaattctactgataagtaccgcgtttgtatgtgggtttggaattagtttagactacacacttagatcgacctatacgggctatgcgacgaactcatattcagaacactccttactttcaactgtccaagttatcaatgctgttgtaagtgtcggatcccaagttgtctactccagactctctgaccacttcggaagactaaggctttttttagttgcaactattttttatataatgggaaccatcattcaatcacaggcgacccgtctcacaatgtatgcagcaggatcggttttctataactgtggatacgtcggaacaaatctgctcctgacattaatactttctgatttctcctccttgaagtggagaatgttttaccagtacgcctcatattggccatatatcataataccatggatttcaggtaatattatcacagcagcaaatcctcagaaaaactggtcctggaatattgcaatgtgggcttttatttacccactctctgccttgccaattatatttcttattctttatatgaagtacaaatcttcaaagactgctgagtggagatctctcaaagaacaggctagaaaggaaagaacgggcggattatttgagaatttggtgtttctattctggaaactcgatattgttggcatattattaataactgtgtcgctagggtgtatccttgtccctttgacgttggctaatgagacatcacagaagtggcacaattcaaaaataattgccactttagtttcaggtggctgtttatttttcatttttttatattgggaggccaaatttgccaaatctcctcttctaccgttcaaattactaagtgatcgtggaatttgggcaccccttggtgttacttttttcaattttttcacctttttcatttcgtgtgactatctgtatcctgttttgctggtatcgatgaaagaatcgtccacttcggctgctcggatagtaaaccttcctgactttgttgctgctactgcatctccattctacagtttgttggtggcaaagacaaggaaactgaaactttctgtaatcggaggttgtgctgcatggatggtgtgcatgggccttttttacaaatacagaggaggatctgggtctcatgaaggtgttatcgctgcatctgttatcatgggtttgagtggtctcctatgcagcaattcagtgatcgtcatactgcaagccatgactacgcatagtaggatggctgtaataaccggcatccagtataccttttcaaagctaggcgctgctatcggtgcctccgtttctggtgccatatggacacaaaccatgcctaaccaactctacaagaaccttggaaacgatacattggcagaaatagcatatgcatcaccttatacattcattagtgattatccttggggctcacccgaaagagatgctgtggttgaatcttacagatatgttcaacgaataataatgacggttggcttggcatgtacggtaccgttctttgcgtttacaatgttcatgagagacccggaactaatagacaaggcgacacacgaagaattcactgaagatggtttggttgtcttgccagatgaggaaaatattttctctcaaatcaaggcactttttagacataatcgaagtaacaagaaattaggatgttga

SEQ ID NO: 1006 - DNA, 1848 bp, Artificial Sequence
  Description of Artificial Sequence: Synthetic polynucleotide
atgagttctagtgttgttggtgcctccagtaataaaaaaagtggaattaggcagtcctgtgagattattgagagagaacgtcactccaacgatgacacgtactctatgacatctaccttttttaagctcaaagaaaacgaaattatgtctgcacagtttgattccttgaaatataaaattttattgataagtaccgcgtttgtatgtgggtttggaattagtttagactacacacttagatctacctatacgggctatgcgacgaacagttattctgaacactccttactttctactgtccaagttatcaatgctgttgtaagtgtcggatcccaagttgtctactccagactctctgaccacttcggaagattaaggctttttttagttgcaactattttttatataatgggaaccatcattcaatctcaggcgacccgtctcacaatgtatgcagcaggatctgttttctataactgtggatacgtcggaacaaatttactccttacattaatactttctgatttctcctccttgaagtggagaatgttttaccagtacgcctcttattggccatatatcataataccatggatttctggtaatattatcacagcagcaaatcctcagaaaaactggtcctggaatattgcaatgtgggcttttatttacccactctctgccttgccaattatatttcttattctttatatgaagtacaaatcttccaagactgctgagtggagatctctcaaagaacaggctagaaaggaaagaacgggcggattatttgagaatttggtgtttcttttctggaaactcgatattgttggcatattattaataactgtgtctttagggtgtatccttgtccctttgacgttggctaatgagacatctcagaagtggcacaattctaaaataattgccactttagtttctggtggctgtttatttttcatttttttatattgggaggccaaatttgccaaatctcctcttttgccgttcaaattattaagtgatcgtggaatttgggcaccccttggtgttacttttttcaattttttcacctttttcattagttgtgactatttgtatcctgttttgttagtatctatgaaagaatcttccactagtgctgctagaatagtaaaccttcctgactttgttgctgctactgcatctccattctacagtttgttggtggcaaagacaaggaaattgaaactttctgtaatcggaggttgtgctgcatggatggtgtgcatgggccttttttacaaatacagaggaggatctgggtctcatgaaggtgttatcgctgcatctgttatcatgggtttgagtggtctcctttgcagcaattctgtgatcgtcatattgcaagccatgactacgcatagtaggatggctgtaataaccggcatccagtataccttttccaagttgggcgctgctatcggtgcctccgtttctggtgccatatggacacaaaccatgcctaaccaactctacaagaaccttggaaacgatacattggcagaaatagcatatgcatctccttatacattcattagtgattatccttggggctcccccgaaagagatgctgtggttgaatcttacagatatgttcaaagaataataatgacggttggcttggcatgtacggtaccgttctttgcgtttacaatgttcatgagagacccggaattgatagacaaggcgacacacgaagaattcactgaagatggtttggttgtcttgccagatgaggaaaatattttctctcaaatcaaggcactttttagacataatagaagtaacaagaaattaggatgttga

SEQ ID NO: 1007 - DNA, 1377 bp, Saccharomyces cerevisiae
atgaatatgctcattgtcggtagagttgttgctagtgttgggggaagcggacttcaaacgctttgctttgttattggttgtacgatggttggtgaaaggtcacgtccattggtgatttccatcctaagttgtgcatttgctgtagctgctatcgttggtcctataatcggaggtgcctttacaacccatgttacctggaggtggtgcttctatatcaatcttcctatcggtggtcttgccattattatgtttttactcacatataaggccgagaataagggtatacttcaacaaattaaagatgctataggaacaatctcgagctttacttttagtaagttcagacaccaagttaattttaaaagacttatgaatggcataatcttcaagtttgacttctttggttttgccctctgctctgcagggctggtccttttcctactggggctaacctttggtggtaataaatatagttggaactctggccaagtcatcgcatatttggttttgggtgtcttactttttattttttcattggtgtacgatttcttcttattcgataaattcaacccggaacctgataatatatcctacaggcctctccttctaagaagattggtagcaaaaccagccataataataataaacatggtaacatttctattatgtaccggttacaatgggcaaatgatatactctgtccagtttttccaacttatatttgcgtcgagtgcatggaaagccggtcttcacttgataccaatcgttattaccaacgttattgcggccattgcaagtggtgtgattaccaaaaagctcggtttagttaaaccactcttaatatttggaggcgttcttggggtaattggagcagggcttatgacacttatgacaaatacgtccacgaagtcaactcaaattggtgttttgctattaccggggttttcccttggatttgctctacaagcatcgctcatgagtgcacagcttcaaattaccaaagatcgtccagaagctgctatggactttattgaagtaacagctttcaatacattcatgaagtcattaggtacaactcttggtggtgtgctttcaaccactgttttttccgcctcctttcacaacaaagtatcacgagctcatctagagccttacgaaggaaaaacggttgatgacatgattttgtatcgtcttcaaaactacgacggttctcattcgactattggaaacattttaagcgactccattaagaacgtattttggatggatctagggttttatgccttaggatttttgttttgtagtttttcatccaataagaaattaatcataccaaaaaaggacgagacaccagaagataatttagaagacaagtag

SEQ ID NO: 1008 - DNA, 1377 bp, Artificial Sequence
  Description of Artificial Sequence: Synthetic polynucleotide
atgaatatgctcattgtcggtagagttgttgctagtgttgggggaagcggacttcaaacgctttgctttgttattggttgtacgatggttggtgaaaggtctcgtccattggtgatttccatcttaagttgtgcatttgctgtagctgctatcgttggtcctataatcggaggtgcctttacaacccatgttacctggaggtggtgcttctatatcaatcttcctatcggtggtcttgccattattatgtttttactcacatataaggccgagaataagggtatacttcaacaaattaaagatgctataggaacaatcagtagctttacttttagtaagttcagacaccaagttaattttaaaagacttatgaatggcataatcttcaagtttgacttctttggttttgccctctgctctgcagggttagtccttttcttattagggttaacctttggtggtaataaatatagttggaactctggccaagtcatcgcatatttggttttgggtgtcttactttttattttttctttggtgtacgatttcttcttattcgataaattcaacccggaacctgataatatatcctacaggcctctccttttgagaagattggtagcaaaaccagccataataataataaacatggtaacatttttattatgtaccggttacaatgggcaaatgatatactctgtccagtttttccaacttatatttgcgtccagtgcatggaaagccggtcttcacttgataccaatcgttattaccaacgttattgcggccattgcaagtggtgtgattaccaaaaagctcggtttagttaaaccactcttaatatttggaggcgttcttggggtaattggagcagggcttatgacacttatgacaaatacgtccacgaagtctactcaaattggtgttttgttattaccggggttttcccttggatttgctttacaagcaagtctcatgagtgcacagcttcaaattaccaaagatcgtccagaagctgctatggactttattgaagtaacagctttcaatacattcatgaagtctttaggtacaactcttggtggtgtgctttctaccactgttttttccgcctcctttcacaacaaagtatctagagctcatttagagccttacgaaggaaaaacggttgatgacatgattttgtatcgtcttcaaaactacgacggttctcattctactattggaaacattttaagcgactccattaagaacgtattttggatggatttagggttttatgccttaggatttttgttttgtagtttttcttccaataagaaattaatcataccaaaaaaggacgagacaccagaagataatttagaagacaagtga

SEQ ID NO: 1009 - DNA, 783 bp, Saccharomyces cerevisiae
atgtttgtactgatagataatgtcctcgcctaccttcttgaacaagacgacctatttgtaaccgcacgcttcgctatccagggccaaattgtctcaagaagagttaacaaaatacatatctccaacatcacagacgtccttctacaacaattcataagtcacacactgccctataatgacaatatcgtcccaaaaaaaatcctcgacagcatgagaacggccgtacggcagttgctggaagcaactgcctgtgtctctagagaatgccccctcgtcaaaagaagtcaggacataaaaagagcaagaaaacgtctactcagtgactggtataggctcggcgctgatgcaaacatggatgccgtattactagttgttaactccgcctggaggtttctggccgtctggcgacccttcgtaaactcaatccaacatgcaactcaggaattgtatcaaaatatcgcccattaccttcttcatggcaacgtaaatatacagagggtcacagcactactacagctcgtaatgggacaggacgatttactttttagtatggatgatgttctacaagaggtcttcagaatacagctctatttgaataagatgctgccgcacaactctcacaaatggcaaaagccatccccctttgactccgcaaacttactacttaacttcagagactggacaactgacaatgctctcctccaagagttgctactatcctatcccacaattaataaaaacaaacacaaaaatcactccgtccctcgtctaatacaagtttga

SEQ ID NO: 1010 - DNA, 783 bp, Artificial Sequence
  Description of Artificial Sequence: Synthetic polynucleotide
atgtttgtattaatagataatgtcctcgcctaccttcttgaacaagacgacttatttgtaaccgcacgcttcgctatccagggccaaattgtctctagaagagttaacaaaatacatatctccaacatcacagacgtccttttacaacaattcataagtcacacattaccctataatgacaatatcgtcccaaaaaaaatcctcgacagcatgagaacggccgtaagacagttgttggaagcaactgcctgtgtctctagagaatgccccctcgtcaaaagaagtcaggacataaaaagagcaagaaaacgtttgctcagtgactggtataggctcggcgctgatgcaaacatggatgccgtattattggttgttaactccgcctggaggtttttggccgtctggaggcccttcgtaaactctatccaacatgcaactcaggaattgtatcaaaatatcgcccattaccttcttcatggcaacgtaaatatacagagggtcacagcattattgcagctcgtaatgggacaggacgatttactttttagtatggatgatgttttgcaagaggtcttcagaatacagctctatttgaataagatgttaccgcacaactctcacaaatggcaaaagccatccccctttgactccgcaaacttattacttaacttcagagactggacaactgacaatgctctcctccaagagttgttattatcctatcccacaattaataaaaacaaacacaaaaatcactccgtccctcgtttaatacaagtttga

SEQ ID NO: 1011 - DNA, 633 bp, Saccharomyces cerevisiae
atgaataaaatacccattaaagaccttttaaatccacaaatcacagatgagtttaaatccagcatactagacataaataaaaagctcttttctatttgctgtaatttacctaagttaccagagagtgtaacaacagaagaagaagttgaattaagggatatattaggattcttatctagggccaacaaaaaccgtaagattagtgatgaggagaagaagttgttgcaaacaacatctcaactcactactaccattactgtattactcaaagaaatgcgcagcatagaaaacgatagaagtaattatcaacttacacagaaaaataaatcggcggatgggttggtatttaatgtggtaactcaagatatgataaacaaaagtactaaaccttacagaggacaccggtttacaaaagaaaatgtccgaatactagaaagttggtttgcaaagaacatcgagaacccatatctagataccaagggcctagagaatctaatgaagaataccagtttatctcgcattcaaatcaaaaactgggtttcgaatagaagaagaaaagaaaaaacaataacaatcgctccagaattagcggacctcttgagcggtgagcctctggcaaagaagaaagaatga

SEQ ID NO: 1012 - DNA, 633 bp, Artificial Sequence
  Description of Artificial Sequence: Synthetic polynucleotide
atgaataaaatacccattaaagaccttttaaatccacaaatcacagatgagtttaaatccagcatattggacataaataaaaagctcttttctatttgctgtaatttacctaagttaccagagagtgtaacaacagaagaagaagttgaattaagggatatattaggattcttatctagggccaacaaaaaccgtaagattagtgatgaggagaagaagttgttgcaaacaacatctcaactcactactaccattactgtattactcaaagaaatgcgcagcatagaaaacgatagaagtaattatcaacttacacagaaaaataaatctgcggatgggttggtatttaatgtggtaactcaagatatgataaacaaaagtactaaaccttacagaggacacagatttacaaaagaaaatgtcagaatattggaaagttggtttgcaaagaacatcgagaacccatatttggataccaagggcttagagaatttaatgaagaataccagtttatctcgcattcaaatcaaaaactgggtttctaatagaagaagaaaagaaaaaacaataacaatcgctccagaattagcggacctcttgagcggtgagcctttggcaaagaagaaagaatga

SEQ ID NO: 1013 - DNA, 528 bp, Saccharomyces cerevisiae
atgtttacttcgaagcctgctttcaaaattaagaacaaagcatccaaatcatacagaaacacagcggtttcaaaaaagctgaaagaaaaacgtctagctgagcatgtgaggccaagctgcttcaatattattcgaccactcaagaaagatatccagattcctgttccttcctctcgatttttaaataaaatccaaattcacaggatagcgtctggaagtcaaaatactcagtttcgacagttcaataagacatctataaaatcttcaaagaaatatttaaactcatttatggcttttagagcatattactcacagtttggctccggtgtaaaacaaaatgtcttgtcttctctgctcgctgaagaatggcacgcggacaaaatgcagcacggaatatgggactacttcgcgcaacagtataattttataaaccctggttttggttttgtagagtggttgacgaataattatgctgaagtacgtggtgacggatattgggaagatgtgtttgtacatttggccttatag

SEQ ID NO: 1014 - DNA, 528 bp, Artificial Sequence
  Description of Artificial Sequence: Synthetic polynucleotide
atgtttacttctaagcctgctttcaaaattaagaacaaagcatccaaatcttacagaaacacagcggtttccaaaaagttgaaagaaaaacgtttggctgagcatgtgaggccaagctgcttcaatattattagaccactcaagaaagatatccagattcctgttccttcctctagatttttaaataaaatccaaattcacaggatagcgtctggaagtcaaaatactcagtttagacagttcaataagacatctataaaatcttccaagaaatatttaaactcttttatggcttttagagcatattactctcagtttggctccggtgtaaaacaaaatgtcttgtcttctttactcgctgaagaatggcacgcggacaaaatgcagcacggaatatgggactacttcgcgcaacagtataattttataaaccctggttttggttttgtagagtggttgacgaataattatgctgaagtacgtggtgacggatattgggaagatgtgtttgtacatttggccttatga

SEQ ID NO: 1015 - DNA, 1083 bp, Saccharomyces cerevisiae
atgtcgatagtctacaataaaacaccattattacgtcaattcttccccggaaaggcttctgcacaatttttcttgaaatatgaatgccttcaaccaagtggctccttcaaaagtagaggaatcggtaatctcatcatgaaaagtgccattcgaattcaaaaggacggtaaaagatctcctcaggttttcgctagttctggcggtaatgccggttttgctgctgcaacagcatgtcaaagactgtctctaccatgtacagtcgtggttcctacagcgacaaagaagagaatggtagataaaatcaggaacaccggtgcccaggttatcgtgagtggtgcctactggaaagaagcagatacttttttaaaaacaaatgtcatgaataaaatagactctcaggtcattgagcccatttatgttcatcccttcgataatccggatatttgggaaggacattcatctatgatagatgaaatagtacaagatttgaaatcgcaacatatttccgtgaataaggttaaaggcatagtatgcagcgttggtggaggtggtttatacaatggtattattcaaggtttggaaaggtatggtttagctgataggatccctattgtgggggtggaaacgaatggatgtcatgttttcaatacttctttgaaaataggccaaccagttcaattcaagaagataacaagtattgctacttctctaggaacggccgtgatctctaatcaaactttcgaatacgctcgcaaatacaacaccagatccgttgtaatagaggacaaagatgttattgaaacctgtcttaaatatacacatcaattcaatatggtgattgaaccggcatgtggcgccgcattgcatttgggttacaacactaagatcctagaaaatgcactgggctcaaaattagctgcggatgacattgtgataattattgcttgtggcggctcctctaatactataaaggacttggaagaagcgttggatagcatgagaaaaaaagacactcctgtaatagaagtcgctgacaatttcatatttccagaaaaaaatattgtgaatttaaaaagtgcttga

SEQ ID NO: 1016 - DNA, 1083 bp, Artificial Sequence
  Description of Artificial Sequence: Synthetic polynucleotide
atgagtatagtctacaataaaacaccattattacgtcaattcttccccggaaaggcttctgcacaatttttcttgaaatatgaatgccttcaaccaagtggctccttcaaaagtagaggaatcggtaatctcatcatgaaaagtgccattagaattcaaaaggacggtaaaagatctcctcaggttttcgctagttctggcggtaatgccggttttgctgctgcaacagcatgtcaaagattatctttaccatgtacagtcgtggttcctacagcgacaaagaagagaatggtagataaaatcaggaacaccggtgcccaggttatcgtgagtggtgcctactggaaagaagcagatacttttttaaaaacaaatgtcatgaataaaatagactctcaggtcattgagcccatttatgttcatcccttcgataatccggatatttgggaaggacattcttctatgatagatgaaatagtacaagatttgaaatctcaacatatttccgtgaataaggttaaaggcatagtatgcagcgttggtggaggtggtttatacaatggtattattcaaggtttggaaaggtatggtttagctgataggatccctattgtgggggtggaaacgaatggatgtcatgttttcaatacttctttgaaaataggccaaccagttcaattcaagaagataacaagtattgctacttctttgggaacggccgtgatctctaatcaaactttcgaatacgctcgcaaatacaacaccagatccgttgtaatagaggacaaagatgttattgaaacctgtcttaaatatacacatcaattcaatatggtgattgaaccggcatgtggcgccgcattgcatttgggttacaacactaagatcttggaaaatgcattgggctctaaattagctgcggatgacattgtgataattattgcttgtggcggctcctctaatactataaaggacttggaagaagcgttggatagcatgagaaaaaaagacactcctgtaatagaagtcgctgacaatttcatatttccagaaaaaaatattgtgaatttaaaaagtgcttga

SEQ ID NO: 1017 - DNA, 1272 bp, Saccharomyces cerevisiae
atggcaacccaagccctagaggatatcacggagaggcttttaataaggtcgcaagaggctatcttgcaattagatctgtggatacaacgtcagcagagatcatcaatatgccagacaacagatcaagagtcattggataagttatcccaacagtacaaccagtatatgtctcaactgaactctttgtatgttagatcggaatctgttcgagacaagttgagcaaggaacaacaacgcagattgatcacagaggataatgagcatcaacgcatagaagacttggttcgtgaattccaggatatcactttgaggttgaacgagctggccaccgtcccaaatgaagcgcctaatgattctccacaatcgcaatccaccagaagtagtttagggtcatttcaacctcgaccattgaaaataattgagaggcaacgtctgtgtatggtaactccatcgaaaccaccaaaaaaatcggtaggctttaaccccatcaatgaagtcgattgtccttcgaaaactaactctttaccgtgctcacctaaaaaacaacctgcaagaaatcgcactttacgtgcagccaaatcacatgatactggcttgaacaaaagtaagaaaccgtcttcctcggatacgtatgagtctttcttcaaaaatagacaaagactttcgttgaccttctttgatgaaatggatgatgaagattttgattctgatcaagatactatcattctaccaaacataagtacccctccacatgttggtgtgaccgcaaagggtgctgaattcgaacctttaaggagatataactctcacgaaagtatactatctaacaaaccagcaccttctaagtcgctcaatctgggaagtttctccgcctcattcttcaggccatctaatccgacgtttggaacttcgatatcaaatgtccaagtgaactgtcatccaactgttgcagcgacaatggctcctagtcgtaatggtcctcgtatttcaagttctaaggcgttgttatcatcattcattgcacgatcagatacacatacggtaaaagagaacaacacaaatcttaagcatgcatcttttatggataagtttaattcatcgttaagcacaatatcagaatcttttcaaagtaagagggggagaaagaataagggcatgaatgaagaacgaatatcaaatcataatgtagcacaggaacaaaaaaataatatggatataagcgtctctatagaagaattgcaagatgctttgaatacagaactgctgttttaa

SEQ ID NO: 1018 - DNA, 1272 bp, Artificial Sequence
  Description of Artificial Sequence: Synthetic polynucleotide
atggcaacccaagccttagaggatatcacggagaggcttttaataaggtctcaagaggctatcttgcaattagatttatggatacaacgtcagcagagaagtagtatatgccagacaacagatcaagagtctttggataagttatcccaacagtacaaccagtatatgtctcaattgaactctttgtatgttagaagtgaatctgttagagacaagttgagcaaggaacaacaacgcagattgatcacagaggataatgagcatcaacgcatagaagacttggttcgtgaattccaggatatcactttgaggttgaacgagttggccaccgtcccaaatgaagcgcctaatgattctccacaatctcaatccaccagaagtagtttagggtcttttcaacctaggccattgaaaataattgagaggcaacgtctttgtatggtaactccatctaaaccaccaaaaaaatctgtaggctttaaccccatcaatgaagtcgattgtccttccaaaactaactctttaccgtgctctcctaaaaaacaacctgcaagaaatcgcactttacgtgcagccaaatctcatgatactggcttgaacaaaagtaagaaaccgtcttccagtgatacgtatgagtctttcttcaaaaatagacaaagactttctttgaccttctttgatgaaatggatgatgaagattttgattctgatcaagatactatcattttaccaaacataagtacccctccacatgttggtgtgaccgcaaagggtgctgaattcgaacctttaaggagatataactctcacgaaagtatattatctaacaaaccagcaccttctaagtctctcaatttaggaagtttctccgcctctttcttcaggccatctaatccgacgtttggaacttccatatccaatgtccaagtgaactgtcatccaactgttgcagcgacaatggctcctagtcgtaatggtcctcgtatttccagttctaaggcgttgttatcttctttcattgcaagaagtgatacacatacggtaaaagagaacaacacaaatcttaagcatgcatcttttatggataagtttaattcttctttaagcacaatatctgaatcttttcaaagtaagagggggagaaagaataagggcatgaatgaagaaagaatatccaatcataatgtagcacaggaacaaaaaaataatatggatataagcgtctctatagaagaattgcaagatgctttgaatacagaattacttttttga

SEQ ID NO: 1019 - DNA, 3291 bp, Saccharomyces cerevisiae
atggatgatgccttgcatgctttgtcctcgttgactgcaaagaagagaactaccacctacaaaaaagttgctgttcccatactagatgagaacgataatactaatggaaatgggcccaatgacatagacaatccgccagagttgactgggaacgggtttttatttgccaatgccacattaaatcgtgttaagaacagattagaaggcaagaaagcacccgaacagaatcacaataatggaaaagataggagtgagaattcgttaccaactcaattaatctctaatctttacgatggtggtgaagagctggagaaatccgaagttaaagataatagttacagtgagaaaaatgtctcttcttcattcacgcagacgcaaagaatacctgtcagcatccaacaagacaaggtgtttaacgtacctatccattccgttaatgacgggaaacccacccaattaatcaaagaagatggtctcgtcaacgaaacttctcaagcgctgaaaacacctctcacgacaggacggccaggggctacacagcgtatagatagcagcggtgcaacctcacaaactcagcctataaaatcaattgaaccacaatcccaaataattacgacttccagcaatcattctaatgctctgtcgccgaaaattcctataattccaacggaacttattggaactagtcctttatttcagtccattcaaaatcgtggtcctgacacccaaatggatgtaccaccacagactgcgcatgatgaggataagacacaagcaattggtattccacaggctacgcatcaggaacagaaaacccaaatagatacagtcgcacaaacacttcaagatgaagtaccacacacattaaaaattcgggaaatacaaagcgaattggcttcagaagattctaaaagggaaaaagctagaaatgtcgaatacaaaaaaccgcaaaagccaataccaaccaaaaaatttttttctaaagagtcttttcttgctgattttgacgattcgtcctcaaatgaggacgatgatataaagctggaaaatgcacatccaaaaccagtacagaatgacgatgaactgcatgagaacaaaagtgttgaattaaatctaactgatgagacaagaataaatgagaaaagggttccactattgagctcctatgctaataatttgaaacgggaaattgactcctcgaaatgcataacactggacctcgacagcgacagtgacgaatatggagatgatgatatggatagcattaaattatccaaagatgaaagcgttttgccaatctctcagttatcaaaggcgactatattaaacctgaaggcaagactctctaaacaaaatcaaaagttgtctcaaaggccgaataaaagtaaagacccaaaagttgatcataatgtactattaaataccttaaggaaagctagcaggaaacaaattctggatcatcagaaagaagtgattgaaacgaaaggtctgaagctggaggatatggccaaagaaaaggaaatagtagagaacttgctagaacaagaaattcttagaaataaaagaatcagacaaaaagagaagagaagggaaaaacttgaagaaaatgactttcaattgaacgcccatgattccggttctgactcagggtcagagtcttctggatttgcattgagtggtaatgaaattgccgattatgaatcatctggtagtgaaaatgacaatcgtagagaatccgatagtgaaaaggaagatgatgaaattattctaaagcaaaaaaaatcccaccacgtgaaacatatcattaacgaatcagactctgataccgaagtcgaagccaaacccaaagagaaagctgatgaaagtctaccgaaaaggatcgccattaatctgggccattacggtgataatatcggagaggataccgacaaatttcaagaaaccaatgttctagatacacaaaacattgaagaggtgatggccgaaagaaatacaatcgaaaatgaagtcaaagatgatgtatacgtcaatgaagaagctgatgaagcaattcgccgtcagctgattgacaaagagaaattgcaactaaaacagaaagaaaaggagcacgaggctaagataaaagagttgaagaaaagaggtgtcacaaacttctttgaaatggaagccgaagaatccgaggatgaatggcatggtatcggtggtgcagatggagaaggatctgacgactatgattctgacctagaaaaaatgatcgatgattattccaagaacaatttcaatcctcatgaaatcagagaaatgcttgccgcagaaaataaggaaatggatatcaaaatgataaacaaaattctttatgacattaaaaatggaggatttcgtaataaaagagcaaaaaatagcttagagctagaactaagtgatgatgatgaagacgacgtactacaacaatatcgtctcaaaaggagagaattgatgagaaaaaggagattagaaattggcgatgatgcaaagcttgttaaaaacccaaagtcgagcgcattttttgaaagtatggtggaagatattatcgaatataaaaaccccttcggggctgaagaggaatataacctagacattacaagtacggctactgacctagatactcaggacaatagcattaatgtaggtgataatacgggaaataatgaacagaaacctgtagatcaaaagaacaaaaaggttatcatatctgaagactttgtgcagaaaagcttatccttcctaaaaagtaataattatgaggattttgaaacggataaggagctatcaaggatacaacatggcaatgatgaagcaattgaagatttatataccctaaaacagaatagttcgataaagtcattcacaaattctcaaactgattcgaccacttcaaaaacagtaaacacaataattgacttagaaaagcgcccagaggatgaagatgaggtggaaaatggagatacatcactagttggcgttttcaaacatccatcaataatcaaatcctttgcgtccagaacagacataaatgataagtttaaagaaggtaacaagacagtcaagattctaaagtcttacaagacagtggggagttcaaaagcttctatcacatatatggggaaaacgagaaaattaatagcaccaaagaggaaaactgaagggagccaccgctaccaccatgaccatcataataaaaaaatgaaaatgaaaacgaaaacaaaatcgaataaactttttgaaagcggacaagatagctttgataattag

SEQ ID NO: 1020 - DNA, 3291 bp, Artificial Sequence
  Description of Artificial Sequence: Synthetic polynucleotide
atggatgatgccttgcatgctttgtcctctttgactgcaaagaagagaactaccacctacaaaaaagttgctgttcccatattggatgagaacgataatactaatggaaatgggcccaatgacatagacaatccgccagagttgactgggaacgggtttttatttgccaatgccacattaaatcgtgttaagaacagattagaaggcaagaaagcacccgaacagaatcacaataatggaaaagataggagtgagaattctttaccaactcaattaatctctaatctttacgatggtggtgaagagttagagaaatccgaagttaaagataatagttacagtgagaaaaatgtctcttcttctttcacgcagacgcaaagaatacctgtcagcatccaacaagacaaggtgtttaacgtacctatccattccgttaatgacgggaaacccacccaattaatcaaagaagatggtctcgtcaacgaaacttctcaagcgttgaaaacacctctcacgacaggaagaccaggggctacacagcgtatagatagcagcggtgcaacctctcaaactcagcctataaaatccattgaaccacaatcccaaataattacgacttccagcaatcattctaatgctttatctccgaaaattcctataattccaacggaacttattggaactagtcctttatttcagtccattcaaaatcgtggtcctgacacccaaatggatgtaccaccacagactgcgcatgatgaggataagacacaagcaattggtattccacaggctacgcatcaggaacagaaaacccaaatagatacagtcgcacaaacacttcaagatgaagtaccacacacattaaaaattagagaaatacaaagcgaattggcttctgaagattctaaaagggaaaaagctagaaatgtcgaatacaaaaaaccgcaaaagccaataccaaccaaaaaatttttttctaaagagtcttttcttgctgattttgacgattcttcctctaatgaggacgatgatataaagttggaaaatgcacatccaaaaccagtacagaatgacgatgaattacatgagaacaaaagtgttgaattaaatttaactgatgagacaagaataaatgagaaaagggttccattgttgagctcctatgctaataatttgaaaagagaaattgactcctctaaatgcataacattagacctcgacagcgacagtgacgaatatggagatgatgatatggatagcattaaattatccaaagatgaaagcgttttgccaatctctcagttatccaaggcgactatattaaacttgaaggcaagactctctaaacaaaatcaaaagttgtctcaaaggccgaataaaagtaaagacccaaaagttgatcataatgtattgttaaataccttaaggaaagctagcaggaaacaaattttagatcatcagaaagaagtgattgaaacgaaaggtttgaagttggaggatatggccaaagaaaaggaaatagtagagaacttgttggaacaagaaattcttagaaataaaagaatcagacaaaaagagaagagaagggaaaaacttgaagaaaatgactttcaattgaacgcccatgattccggttctgacagtgggagtgagtcttctggatttgcattgagtggtaatgaaattgccgattatgaaagctctggtagtgaaaatgacaatcgtagagaatccgatagtgaaaaggaagatgatgaaattattttgaagcaaaaaaaatcccaccacgtgaaacatatcattaacgaaagtgactctgataccgaagtcgaagccaaacccaaagagaaagctgatgaaagtttaccgaaaaggatcgccattaatttgggccattacggtgataatatcggagaggataccgacaaatttcaagaaaccaatgttttggatacacaaaacattgaagaggtgatggccgaaagaaatacaatcgaaaatgaagtcaaagatgatgtatacgtcaatgaagaagctgatgaagcaattcgccgtcagttgattgacaaagagaaattgcaattgaaacagaaagaaaaggagcacgaggctaagataaaagagttgaagaaaagaggtgtcacaaacttctttgaaatggaagccgaagaatccgaggatgaatggcatggtatcggtggtgcagatggagaaggatctgacgactatgattctgacttggaaaaaatgatcgatgattattccaagaacaatttcaatcctcatgaaatcagagaaatgcttgccgcagaaaataaggaaatggatatcaaaatgataaacaaaattctttatgacattaaaaatggaggatttcgtaataaaagagcaaaaaatagcttagagttagaattaagtgatgatgatgaagacgacgtattacaacaatatcgtctcaaaaggagagaattgatgagaaaaaggagattagaaattggcgatgatgcaaagcttgttaaaaacccaaagagcagcgcattttttgaaagtatggtggaagatattatcgaatataaaaaccccttcggggctgaagaggaatataacttggacattacaagtacggctactgacttggatactcaggacaatagcattaatgtaggtgataatacgggaaataatgaacagaaacctgtagatcaaaagaacaaaaaggttatcatatctgaagactttgtgcagaaaagcttatccttcttgaaaagtaataattatgaggattttgaaacggataaggagttatctaggatacaacatggcaatgatgaagcaattgaagatttatataccttgaaacagaatagtagtataaagagtttcacaaattctcaaactgattctaccacttctaaaacagtaaacacaataattgacttagaaaagcgcccagaggatgaagatgaggtggaaaatggagatacatctttggttggcgttttcaaacatccaagtataatcaaatcctttgcgtccagaacagacataaatgataagtttaaagaaggtaacaagacagtcaagattttgaagtcttacaagacagtggggagttctaaagcttctatcacatatatggggaaaacgagaaaattaatagcaccaaagaggaaaactgaagggagccaccgctaccaccatgaccatcataataaaaaaatgaaaatgaaaacgaaaacaaaatctaataaactttttgaaagcggacaagatagctttgataattga

SEQ ID NO: 1021 - DNA, 951 bp, Saccharomyces cerevisiae
atggtgtctacacataacagagataaaccttgggatacggatgatattgataaatggaagatagaggagtttaaggaagaggataacgcatccggtcaaccttttgctgaagagtccagttttatgactttgtttcctaaatacagagaaagttacttgaagacgatttggaatgatgtaacaagggctctagacaaacacaacatagcgtgtgttctagatttagtcgaaggttctatgacagtaaaaacaactagaaaaacatacgatcccgctatcattttgaaagccagagatttgatcaaattattggcgagatccgttcctttcccgcaagccgttaagatcctacaagatgacatggcatgcgacgttattaaaattggtaatttcgttactaacaaagaaaggtttgtcaagagaagacaacgtcttgtaggccctaacggtaatactttaaaggctttggaacttctaactaaatgttacattctagtacaaggtaacacagtaagtgccatgggtcccttcaagggcttgaaggaggtccgtcgagtagtagaagattgtatgaaaaatattcaccctatctatcatatcaaggaattaatgataaaaagagaattggcaaaaaggccagagttagccaatgaagattggtcaagattcttgcccatgtttaagaagaggaatgtggccagaaagaaacccaagaagatcagaaacgtcgaaaagaaggtctatactccatttcctcctgcccaattgcctagaaaggttgatttggaaattgaaagtggtgagtatttcttaagcaagagagaaaagcaaatgaagaaattaaatgagcaaaaggaaaagcaaatggaaagagaaatcgaaaggcaggaagagagagcaaaagatttcatagctccggaagaagaagcatacaagccaaaccaaaattag

SEQ ID NO: 1022 - DNA, 951 bp, Artificial Sequence
  Description of Artificial Sequence: Synthetic polynucleotide
atggtgtctacacataacagagataaaccttgggatacggatgatattgataaatggaagatagaggagtttaaggaagaggataacgcatccggtcaaccttttgctgaagagtccagttttatgactttgtttcctaaatacagagaaagttacttgaagacgatttggaatgatgtaacaagggctttggacaaacacaacatagcgtgtgttttggatttagtcgaaggttctatgacagtaaaaacaactagaaaaacatacgatcccgctatcattttgaaagccagagatttgatcaaattattggcgagatccgttcctttcccgcaagccgttaagatcttgcaagatgacatggcatgcgacgttattaaaattggtaatttcgttactaacaaagaaaggtttgtcaagagaagacaacgtcttgtaggccctaacggtaatactttaaaggctttggaacttttgactaaatgttacattttagtacaaggtaacacagtaagtgccatgggtcccttcaagggcttgaaggaggtccgtcgtgtagtagaagattgtatgaaaaatattcaccctatctatcatatcaaggaattaatgataaaaagagaattggcaaaaaggccagagttagccaatgaagattggtccagattcttgcccatgtttaagaagaggaatgtggccagaaagaaacccaagaagatcagaaacgtcgaaaagaaggtctatactccatttcctcctgcccaattgcctagaaaggttgatttggaaattgaaagtggtgagtatttcttaagcaagagagaaaagcaaatgaagaaattaaatgagcaaaaggaaaagcaaatggaaagagaaatcgaaaggcaggaagagagagcaaaagatttcatagctccggaagaagaagcatacaagccaaaccaaaattga

SEQ ID NO: 1023 - DNA, 459 bp, Saccharomyces cerevisiae
atgcagtaccattccgctctatatgtatatatttacgtaactttcaccactattccctataaggaaaagccggatatcatttcgatctgcttcagcatgctgtcgtttgtttttgatttttctgtccgaatttgctctcgtaccttggagtccttttcctggtccttgatcagctcctcggctttcaaagtagtctcagctttcagtttagctggctcttgtgtacttgcctcccgcagcagcgtcggtatcattgtttcactacttttgtttaacttttccacttgtaactttgttctcttcctttcagcggtgctgatcgacctctttttttgtactttcttgccaacaccaacattcttgcccacacctttctttttcatgctacacttgcccattttttccttgctaaatgcccttgagttattgtaccttattatagcaggcttgcacatctga

SEQ ID NO: 1024 - DNA, 459 bp, Artificial Sequence
  Description of Artificial Sequence: Synthetic polynucleotide
atgcagtaccattccgctttgtatgtatatatttacgtaactttcaccactattccctataaggaaaagccggatatcatttccatctgcttcagcatgctttcttttgtttttgatttttctgtcagaatttgctctcgtaccttggagtccttttcctggtccttgatcagctcctctgctttcaaagtagtctctgctttcagtttagctggctcttgtgtacttgcctcccgcagcagcgtcggtatcattgtttctttacttttgtttaacttttccacttgtaactttgttctcttcctttctgcggtgttaatcgacctctttttttgtactttcttgccaacaccaacattcttgcccacacctttctttttcatgttgcacttgcccattttttccttgttgaatgcccttgagttattgtaccttattatagcaggcttgcacatctga

SEQ ID NO: 1025 - DNA, 342 bp, Saccharomyces cerevisiae
atgggcaagtgtagcatgaaaaagaaaggtgtgggcaagaatgttggtgttggcaagaaagtacaaaaaaagaggtcgatcagcaccgctgaaaggaagagaacaaagttacaagtggaaaagttaaacaaaagtagtgaaacaatgataccgacgctgctgcgggaggcaagtacacaagagccagctaaactgaaagctgagactactttgaaagccgaggagctgatcaaggaccaggaaaaggactccaaggtacgagagcaaattcggacagaaaaatcaaaaacaaacgacagcatgctgaagcagatcgaaatgatatccggcttttccttatag

SEQ ID NO: 1026 - DNA, 342 bp, Artificial Sequence
  Description of Artificial Sequence: Synthetic polynucleotide
atgggcaagtgtagcatgaaaaagaaaggtgtgggcaagaatgttggtgttggcaagaaagtacaaaaaaagaggtctatcagcaccgctgaaaggaagagaacaaagttacaagtggaaaagttaaacaaaagtagtgaaacaatgataccgacgttattaagagaggcaagtacacaagagccagctaaattgaaagctgagactactttgaaagccgaggagttgatcaaggaccaggaaaaggactccaaggtaagagagcaaattagaacagaaaaatctaaaacaaacgacagcatgttgaagcagatcgaaatgatatccggcttttccttatga

SEQ ID NO: 1027 - DNA, 294 bp, Saccharomyces cerevisiae
atgtccgaacaagcacaaacacaacaaccagcgaaaagcactccctccaaggattctaacaagaatggcagctccgtgtccacgatcctcgacactaagtgggatattgtcctgtccaacatgctggtcaagactgccatgggttttggcgtgggtgtgttcacctcagtattattcttcaagcgccgtgcatttcctgtatggctaggcattggatttggtgttggaagaggctacgccgagggcgacgccatctttagatccagcgctggcctcagatcctcgaaggtttag

SEQ ID NO: 1028 - DNA, 294 bp, Artificial Sequence
  Description of Artificial Sequence: Synthetic polynucleotide
atgtccgaacaagcacaaacacaacaaccagcgaaaagcactccctccaaggattctaacaagaatggcagctccgtgtccacgatcctcgacactaagtgggatattgtcttgtccaacatgcttgtcaagactgccatgggttttggcgtgggtgtgttcacctctgtattattcttcaagcgccgtgcatttcctgtatggttaggcattggatttggtgttggaagaggctacgccgagggcgacgccatctttagatccagcgctggcctcagatcctccaaggtttga

SEQ ID NO: 1029 - DNA, 2139 bp, Saccharomyces cerevisiae
atgcgattgttgctgtgcaagaattggtttgcgtcacctgtaatctcaccactactgtatacccgctccttatattcaatggctaacactactagtttccctattgctccccaggccccgcctaattggtcgttcactcccagcgatattagtgggaaaaccaacgaaatcatcaacaacagcaacaatttctatgattctatgagtaaggtagagagcccttccgtgagtaattttgtggagcctttcatgaagtttgaaaatgaattgggcccaataattaaccaattaactttcttacagcatgtgtcgtctgataaagaaattagggacgcatctgtgaactcctcaatgaaactggatgagttgaacatcgatctatctctgcgtcacgacatctttttgcaattcgcccgcgtctggcaggatgttcaatcgaaggcagattctgtggaaagagaaactttcaaatacgttgagaagtcttacaaggactacattcattctggtttggaacttgacgagggaaaccgattgaaaatcaaagagatcaaaaagaagatctccgttaactctattaatttttcgaagaatctgggagaacaaaaggaatacatcactttcaccaaagaacaattggaaggtgtgccggattctattttgacgcagttcgagacaataaaatctgacaaagatagcaatgaaaccttgtataaagtcaccttcaaatatccggacatttttcccgtgatgaaattggcatcctcagctcagactagaaagcaggcctttttggccgaccaaaataaggtccctgaaaatgaagctatactgttggatacattgaagctgcgtgacgaattggcctcgttattgggctatgacacgtatgcgaactacaacctgtatgataaaatggctgaagatagcactacggtaatgaactttttgaatgatttgaaggacaagctaattccgctgggcagaaaggaactacaggtcttgcaagatatgaaagccgaagatgttaagaaacttaaccagggtgcagatccaaactactacatttgggaccaccgttactacgataacaaatatttgttagaaaacttcaatgtggacctagaaaagatttctgaatattttccactagaggctacgattactggtatgctggaaatatacgaaacattgtttaatttgaagtttatcgagacgaaagattctcaaaacaaatctgtttggcatgacgacgtcaaacaaatcgccgtttggaatatggatgatccaaagtctccaaactttgttggttggatttatttcgatttacatcctcgtgatggtaaatatggccacgctgccaattttggtttatcgtcatcattcatgattgatgacaccacaagatcgtatccggttactgcgttggtttgcaatttctccaaatctacgaaggataaaccttctctactgaagcataacgaaatagtgacctttttccatgaattgggccatggtatccatgacctggtgggacaaaacaaggaatcgaggtttaatggccccggatctgttccatgggattttgtggaggcaccttcccaaatgttagaattttggacttggaataagaatgaattaatcaacctctcatcacattacaaaacgggcgaaaaaattccagaatctttgatcaattcattgatcaaaactaaacacgtaaatggtgctttattcactctaagacaattacattttgggttatttgatatgaaagtacatacttgtaaagacttgcaaaacctgtcaatttgcgatacctggaaccaattgagacaggatatttctttgatttctaatggtggtacgttatccaagggttatgattcatttggccatataatgtcagactcttactctgccggttattacggttatctatgggcggaagtctttgcaactgatatgtatcacaccaaattcgctaaggatccgttaaatgccaagaatgggatacaataccgtgatattgtgttggctcgtggtggcctttatgatattaatgataatctgaaagaatttttgggtagggaaccttctaaggatgctttcttgaaggagctgggcttacagaactaa

SEQ ID NO: 1030 - DNA, 2139 bp, Artificial Sequence
  Description of Artificial Sequence: Synthetic polynucleotide
atgagattgttgctttgcaagaattggtttgcgtcccctgtaatctctccattattatatacccgctccttatattccatggctaacactactagtttccctattgctccccaggccccgcctaattggagtttcactcccagcgatattagtgggaaaaccaacgaaatcatcaacaacagcaacaatttctatgattctatgagtaaggtagagagcccttccgtgagtaattttgtggagcctttcatgaagtttgaaaatgaattgggcccaataattaaccaattaactttcttacagcatgtgtcttctgataaagaaattagggacgcatctgtgaactcctctatgaaattggatgagttgaacatcgatttatctttacgtcacgacatctttttgcaattcgcccgcgtctggcaggatgttcaatccaaggcagattctgtggaaagagaaactttcaaatacgttgagaagtcttacaaggactacattcattctggtttggaacttgacgagggaaacagattgaaaatcaaagagatcaaaaagaagatctccgttaactctattaatttttccaagaatttaggagaacaaaaggaatacatcactttcaccaaagaacaattggaaggtgtgccggattctattttgacgcagttcgagacaataaaatctgacaaagatagcaatgaaaccttgtataaagtcaccttcaaatatccggacatttttcccgtgatgaaattggcatcctctgctcagactagaaagcaggcctttttggccgaccaaaataaggtccctgaaaatgaagctatattattggatacattgaagttgcgtgacgaattggcctctttattgggctatgacacgtatgcgaactacaacttatatgataaaatggctgaagatagcactacggtaatgaactttttgaatgatttgaaggacaagttgattccgttgggcagaaaggaattacaggtcttgcaagatatgaaagccgaagatgttaagaaacttaaccagggtgcagatccaaactactacatttgggaccaccgttactacgataacaaatatttgttagaaaacttcaatgtggacttggaaaagatttctgaatattttccattggaggctacgattactggtatgttggaaatatacgaaacattgtttaatttgaagtttatcgagacgaaagattctcaaaacaaatctgtttggcatgacgacgtcaaacaaatcgccgtttggaatatggatgatccaaagtctccaaactttgttggttggatttatttcgatttacatcctcgtgatggtaaatatggccacgctgccaattttggtttatcttcttctttcatgattgatgacaccacaagatcttatccggttactgcgttggtttgcaatttctccaaatctacgaaggataaaccttctttattgaagcataacgaaatagtgacctttttccatgaattgggccatggtatccatgacttggtgggacaaaacaaggaaagtaggtttaatggccccggatctgttccatgggattttgtggaggcaccttcccaaatgttagaattttggacttggaataagaatgaattaatcaacctctcttctcattacaaaacgggcgaaaaaattccagaatctttgatcaattctttgatcaaaactaaacacgtaaatggtgctttattcactttgagacaattacattttgggttatttgatatgaaagtacatacttgtaaagacttgcaaaacttatccatttgcgatacctggaaccaattgagacaggatatttctttgatttctaatggtggtacgttatccaagggttatgattcttttggccatataatgtctgactcttactctgccggttattacggttatttatgggcggaagtctttgcaactgatatgtatcacaccaaattcgctaaggatccgttaaatgccaagaatgggatacaataccgtgatattgtgttggctcgtggtggcctttatgatattaatgataatttgaaagaatttttgggtagggaaccttctaaggatgctttcttgaaggagttgggcttacagaactga

SEQ ID NO: 1031 - DNA, 435 bp, Saccharomyces cerevisiae
atggtttcgaagaaaaatacggctgaaatcagtgcaaaagatatatgggagaatatatggagtggtgtaagttcgctgcttgatttcttcgcagtattggaaaacctaggcgtggtcaacgataagttatatgtaagtgggctattacggaaagtttggctgtgttactcgtgcatttcagtgataaaatgtgtatggaaattaataaaattatgcaaggtgaaatttaaaatcgatcaacgattggatggggagggaaatggtctagtaaaggataagttgataaacttcaagaaaaaatataacgaacatatcagacatattactgctgctttactccaagatttgagctatttaatggttttaatctatccagggacgaggttatttaaaagattatctaacataataacactttgtagaataattgtataa

SEQ ID NO: 1032 - DNA, 435 bp, Artificial Sequence
  Description of Artificial Sequence: Synthetic polynucleotide
atggtttccaagaaaaatacggctgaaatcagtgcaaaagatatatgggagaatatatggagtggtgtaagttctttacttgatttcttcgcagtattggaaaacttgggcgtggtcaacgataagttatatgtaagtgggttattaagaaaagtttggttatgttactcttgcatttctgtgataaaatgtgtatggaaattaataaaattatgcaaggtgaaatttaaaatcgatcaaagattggatggggagggaaatggtttagtaaaggataagttgataaacttcaagaaaaaatataacgaacatatcagacatattactgctgctttactccaagatttgagctatttaatggttttaatctatccagggacgaggttatttaaaagattatctaacataataacactttgtagaataattgtatga

SEQ ID NO: 1033 - DNA, 1008 bp, Saccharomyces cerevisiae
atggcattccaagatccaacttacgaccagaataaaagcagacacatcaacaacagtcacttgcaagggccaaaccaggaaacaatagaaatgaaatctaaacacgtatcattcaaaccctctagagacttccatacaaacgattactcgaataactacattcatgggaagtcgctaccgcaacagcatgttactaatattgagaatagggttgatggctatccaaaacttcagaaattatttcaggcgaaagctaaacaaataaatcaatttgccactacgccatttgggtgtaaaatcggaatagattccattgttccaacgttgaatcactggatacagaacgaaaatttgactttcgacgtggtgatgattggctgcttaacagaaaatcagtttatttacccaattttaacccaattgccattggatagattgatctccaaaccaggtttcctgttcatctgggccaattctcaaaaaatcaatgaacttactaaacttttgaataatgaaatatgggctaaaaagtttagaagaagtgaagaattggtttttgttcctattgacaagaaatcaccgttttatccaggtttagatcaggacgatgaaacgttgatggaaaaaatgcaatggcactgttggatgtgtatcacaggtacagtaaggaggtctacagatggacatcttattcattgtaacgtagacactgacttgagtatcgaaacgaaggacaccactaatggtgctgtaccatcccatttgtatcgtattgcagaaaacttctctaccgcgactagacgattacatattattcctgcaaggactggttacgagacacccgtcaaagtaagacctggctgggttatagtgagcccagatgttatgttggataacttctcacccaagagatataaagaagagatagctaatttaggttcgaatatcccattaaaaaatgagattgagctgttaagaccaagaagtccagtacaaaaagcacaataa

SEQ ID NO: 1034 - DNA, 1008 bp, Artificial Sequence
  Description of Artificial Sequence: Synthetic polynucleotide
atggcattccaagatccaacttacgaccagaataaaagcagacacatcaacaacagtcacttgcaagggccaaaccaggaaacaatagaaatgaaatctaaacacgtatctttcaaaccctctagagacttccatacaaacgattactctaataactacattcatgggaagtctttaccgcaacagcatgttactaatattgagaatagggttgatggctatccaaaacttcagaaattatttcaggcgaaagctaaacaaataaatcaatttgccactacgccatttgggtgtaaaatcggaatagattccattgttccaacgttgaatcactggatacagaacgaaaatttgactttcgacgtggtgatgattggctgcttaacagaaaatcagtttatttacccaattttaacccaattgccattggatagattgatctccaaaccaggtttccttttcatctgggccaattctcaaaaaatcaatgaacttactaaacttttgaataatgaaatatgggctaaaaagtttagaagaagtgaagaattggtttttgttcctattgacaagaaatctccgttttatccaggtttagatcaggacgatgaaacgttgatggaaaaaatgcaatggcactgttggatgtgtatcacaggtacagtaaggaggtctacagatggacatcttattcattgtaacgtagacactgacttgagtatcgaaacgaaggacaccactaatggtgctgtaccatcccatttgtatcgtattgcagaaaacttctctaccgcgactagaagattacatattattcctgcaaggactggttacgagacacccgtcaaagtaagacctggctgggttatagtgagcccagatgttatgttggataacttctctcccaagagatataaagaagagatagctaatttaggtagtaatatcccattaaaaaatgagattgagttattaagaccaagaagtccagtacaaaaagcacaatga

SEQ ID NO: 1035 - DNA, 87 bp, Saccharomyces cerevisiae
atgatacgacagaagatttttgtttttatagttaagtcaagaagaaattctatttgtccagcaatccggcgcaaagaagactactaa

SEQ ID NO: 1036 - DNA, 87 bp, Artificial Sequence
  Description of Artificial Sequence: Synthetic oligonucleotide
atgataagacagaagatttttgtttttatagttaagtctagaagaaattctatttgtccagcaatcagacgcaaagaagactactga

SEQ ID NO: 1037 - DNA, 2526 bp, Saccharomyces cerevisiae
atgggtaagacacaaaagaagaatagtaagggacgtttagatagatactattatctagcaaaggagaaaggttatcgtgctcgttcatcctttaagattattcagattaatgaaaagtatggccacttcttagaaaaatcgaaggttgttattgatctgtgtgctgctcctggttcatggtgtcaagttgcatccaaactctgtcctgtcaactccttaattattggtgttgatattgttccaatgaagccgatgcccaatgttataacttttcaaagtgatattacaacagaagattgtagatcaaaattgaggggttatatgaagacttggaaagctgatacagtgttgcatgatggtgctcctaatgttggtttgggttgggttcaggatgctttcacccaatctcaattaaccttacaagctttgaagttggccgtcgaaaatttggtggtgaacggtacttttgttactaaaattttcagatccaaggattataataaattgatttgggttttccaacaattgtttgagaaagttgaagccacaaaaccacccgcatcaagaaatgtttctgcagaaatttttgtagtgtgtaaaggtttcaaggcaccaaagaggctggacccaagattactggatccaaaagaagtttttgaagaattgccagatgggcaacagaatatggagtccaagatttataatcccgaaaaaaaagttagaaaaagacaaggttatgaggaaggtgataatttactgtatcatgaaacctcaattttggattttgtcaggacggaagacccaataagcatgcttggagaaatgaataagtttacaattgatgagaatgaccatgaatggaagatcttgaagaaattgaaacaaaccacagacgagttccgttcctgtattgaagatttaaaagtcttgggtaaaaaggattttaaaatgatcctaagatggagaaagattgcaagggaaatcttgggcatcgaagttaaggacgacgctaaaacagaaattgaagtagtaccgttaacagaagaggagcaaattgaaaaagatttgcaaggtttacaggagaagcagcgtctaaatgtcaagcgcgaaagaagaaggaagaacgaaatgaagcaaaaggaactacagagaatgcaaatgaacatgataacccccactgatattggtattgaagccgcaagtttgggtaaagaatcgttgtttaatttgaaaactgcagaaaagactggtatcttgaacgacttggcgaagggtaagaaaagaatgatttttacagacgatgaattagccaaagataatgatatttacattgatgaaaacatcatgatcaaagataaggattctgccgctgatgcggacgatttagaaagcgagttgaatgccatgtatagtgattataaaactagaaggtcggaaagggatgccaagtttagagctaagcaagcacgtggtggcgataatgaggaagaatggaccggttttaatgagggaagtctagaaaagaaagaagaggaaggtaaagattatatcgaagacaatgacgatgaaggtgtcgaaggagactccgatgatgatgaagccatcaccaatttgattagcaaattgaagggacaagaaggtgatcacaaattgagtagtaaggcacgtatgattttcaatgatccgatatttaataacgttgaacctgatttgccagtaaataccgtcaatgatggcataatgagttccgagtctgttggtgatatttctaaattaaataagaaaagaaaacatgaagaaatgcaccagaaacaagatgaagcagattcttcggatgagagttcaagtgatgactccgatttcgaaattgtggccaacgataatgcatcagaagaattcgattctgattatgattcagaggaagaaaaaaatcaaacaaagaaagaaaagcattccagagacattgatattgctactgttgaagccatgactttggcacatcagttagcattgggtcagaaaaacaagcatgatcttgttgatgaaggtttcaatagatacaccttccgtgacaccgaaaatttgccagattggtttttagaagatgaaaaggaacattcaaagataaataagccgattactaaggaggcagcgatggcaattaaagaaaaaataaaggcaatgaacgcccgtcctattaagaaggttgctgaagctaaggcaagaaagaggatgcgtgccgtagctcggttagaaaagatcaagaagaaggcgggcttgattaacgatgattcagacaagacagagaaggacaaggctgaagaaatttctagattgatgcgtaaggttaccaaaaaaccaaagaccaagccaaaggttactttggttgttgcctcaggtaggaacaaaggtttggcaggtagaccaaagggcgttaagggtaagtataagatggttgatggtgtcatgaagaatgaacaaagagccctaagacgtatcgcaaagaagcatcacaagaaaaagtag

SEQ ID NO: 1038 - DNA, 2526 bp, Artificial Sequence
  Description of Artificial Sequence: Synthetic polynucleotide
atgggtaagacacaaaagaagaatagtaagggacgtttagatagatactattatttggcaaaggagaaaggttatcgtgctcgttcttcctttaagattattcagattaatgaaaagtatggccacttcttagaaaaatccaaggttgttattgatttatgtgctgctcctggttcttggtgtcaagttgcatccaaactctgtcctgtcaactccttaattattggtgttgatattgttccaatgaagccgatgcccaatgttataacttttcaaagtgatattacaacagaagattgtagaagtaaattgaggggttatatgaagacttggaaagctgatacagtgttgcatgatggtgctcctaatgttggtttgggttgggttcaggatgctttcacccaatctcaattaaccttacaagctttgaagttggccgtcgaaaatttggtggtgaacggtacttttgttactaaaattttcagatccaaggattataataaattgatttgggttttccaacaattgtttgagaaagttgaagccacaaaaccacccgcatctagaaatgtttctgcagaaatttttgtagtgtgtaaaggtttcaaggcaccaaagaggttggacccaagattattagatccaaaagaagtttttgaagaattgccagatgggcaacagaatatggagtccaagatttataatcccgaaaaaaaagttagaaaaagacaaggttatgaggaaggtgataatttattatatcatgaaacctctattttggattttgtcaggacggaagacccaataagcatgcttggagaaatgaataagtttacaattgatgagaatgaccatgaatggaagatcttgaagaaattgaaacaaaccacagacgagttccgttcctgtattgaagatttaaaagtcttgggtaaaaaggattttaaaatgatcttaagatggagaaagattgcaagggaaatcttgggcatcgaagttaaggacgacgctaaaacagaaattgaagtagtaccgttaacagaagaggagcaaattgaaaaagatttgcaaggtttacaggagaagcagcgtttgaatgtcaagcgcgaaagaagaaggaagaacgaaatgaagcaaaaggaattacagagaatgcaaatgaacatgataacccccactgatattggtattgaagccgcaagtttgggtaaagaatctttgtttaatttgaaaactgcagaaaagactggtatcttgaacgacttggcgaagggtaagaaaagaatgatttttacagacgatgaattagccaaagataatgatatttacattgatgaaaacatcatgatcaaagataaggattctgccgctgatgcggacgatttagaaagcgagttgaatgccatgtatagtgattataaaactagaaggtctgaaagggatgccaagtttagagctaagcaagcacgtggtggcgataatgaggaagaatggaccggttttaatgagggaagtttagaaaagaaagaagaggaaggtaaagattatatcgaagacaatgacgatgaaggtgtcgaaggagactccgatgatgatgaagccatcaccaatttgattagcaaattgaagggacaagaaggtgatcacaaattgagtagtaaggcacgtatgattttcaatgatccgatatttaataacgttgaacctgatttgccagtaaataccgtcaatgatggcataatgagttccgagtctgttggtgatatttctaaattaaataagaaaagaaaacatgaagaaatgcaccagaaacaagatgaagcagattcttctgatgagagtagtagtgatgactccgatttcgaaattgtggccaacgataatgcatctgaagaattcgattctgattatgattctgaggaagaaaaaaatcaaacaaagaaagaaaagcattccagagacattgatattgctactgttgaagccatgactttggcacatcagttagcattgggtcagaaaaacaagcatgatcttgttgatgaaggtttcaatagatacaccttccgtgacaccgaaaatttgccagattggtttttagaagatgaaaaggaacattctaagataaataagccgattactaaggaggcagcgatggcaattaaagaaaaaataaaggcaatgaacgcccgtcctattaagaaggttgctgaagctaaggcaagaaagaggatgcgtgccgtagctagattagaaaagatcaagaagaaggcgggcttgattaacgatgattctgacaagacagagaaggacaaggctgaagaaatttctagattgatgcgtaaggttaccaaaaaaccaaagaccaagccaaaggttactttggttgttgcctctggtaggaacaaaggtttggcaggtagaccaaagggcgttaagggtaagtataagatggttgatggtgtcatgaagaatgaacaaagagccttgagacgtatcgcaaagaagcatcacaagaaaaagtga

SEQ ID NO: 1039 - DNA, 1251 bp, Saccharomyces cerevisiae
atggtgacaagacatagagtgactgtactctacaatgcccctgaggatatcggtaatcatatgcgccaaaatgacactcatttgactgttcgtggaggttctggtgtggttttacaacaaaggtggctattagagaggactggaagcttggataaatcctttacgagaatcacttggaggcccagagcggacttggctagaagtttaagcgttatagaaaatgaactgagtgctggcttttcagtttactcaaattcttcggatgtgccggaaaggtttattactaacccagtctacaattcatttcacagtgagaagtttgacatagagcagtacttgcctcccgaagtagatttgaatctgtcatggaatccagaagattttacatatgatatatcagtggagcccacacaaatccaaattgttgaatatcgtctgttgaaacagggtgaagaatttacaattgcaagagtgaaagatgagaaactcgaagtaggtgtattctttgtggatgcaagtgatgaaagtgatgtcgatattggtggaatacgttgtaattggaggatggacgatggtaaaatggaaagatgtcagaaaacatccttattgtataaacagggccatatcgcatacaatcactcgacgactacgacatcactatatctgaatgaacctatcggtttgcatccaaaaatcatgattgatctcacagatttcgaagaacgccctaaatgcatgtatctaatgcacctgcaattgccgttagaattatttatcgataaattccaatcctctcccttactactttttggagaagacgacttagaattaccagaatactctcttcgagataaggcatggggttctgaaagtatctttgaattgaaagccggcacaatgaatgaagtgacattgcatactagatatattgagccttctaataataaaggggataaattagaagtttcatttgatccagaagttatattagcctgcgacacaggtgacaataaagtttcccgtaatccattttataaaaaaggtctaggatatgaatctctctttacagacgatactacattccgccatttgaactcgacaactcttctagtaccaattccaaggcctgacacaaaggattattccaagatcaaaaatggtacgttactatgcttactcatctccatcatatacattttctccaaggtatttggtaacaacaagaagaaaagatcagtaaaacgggaataa

SEQ ID NO: 1040 - DNA, 1251 bp, Artificial Sequence
  Description of Artificial Sequence: Synthetic polynucleotide
atggtgacaagacatagagtgactgtactctacaatgcccctgaggatatcggtaatcatatgcgccaaaatgacactcatttgactgttcgtggaggttctggtgtggttttacaacaaaggtggttgttagagaggactggaagcttggataaatcctttacgagaatcacttggaggcccagagcggacttggctagaagtttaagcgttatagaaaatgaattaagtgctggcttttctgtttactctaattcttctgatgtgccggaaaggtttattactaacccagtctacaattcttttcacagtgagaagtttgacatagagcagtacttgcctcccgaagtagatttgaatttatcttggaatccagaagattttacatatgatatatctgtggagcccacacaaatccaaattgttgaatatcgtttattgaaacagggtgaagaatttacaattgcaagagtgaaagatgagaaactcgaagtaggtgtattctttgtggatgcaagtgatgaaagtgatgtcgatattggtggaatacgttgtaattggaggatggacgatggtaaaatggaaagatgtcagaaaacatccttattgtataaacagggccatatcgcatacaatcactccacgactacgacatctttgtatttgaatgaacctatcggtttgcatccaaaaatcatgattgatctcacagatttcgaagaacgccctaaatgcatgtatttaatgcacttgcaattgccgttagaattatttatcgataaattccaatcctctcccttattactttttggagaagacgacttagaattaccagaatactctcttagagataaggcatggggttctgaaagtatctttgaattgaaagccggcacaatgaatgaagtgacattgcatactagatatattgagccttctaataataaaggggataaattagaagtttcttttgatccagaagttatattagcctgcgacacaggtgacaataaagtttcccgtaatccattttataaaaaaggtttgggatatgaatctctctttacagacgatactacattccgccatttgaactccacaactcttttggtaccaattccaaggcctgacacaaaggattattccaagatcaaaaatggtacgttattatgcttactcatctccatcatatacattttctccaaggtatttggtaacaacaagaagaaaagatctgtaaaaagagaatga

SEQ ID NO: 1041 - DNA, 1752 bp, Saccharomyces cerevisiae
atgcccaatacgcatactcaacatgtgcaaatatcagagccaaatcctgtaaatactttgtctacaccatccaaaagaggtcaccgccatcgcagatcgctagcaatatcaggagattttgattttttgaaacagcctgcagcaattgtgaatttaccacctccacaggcggctgaaaattgtccttcaactgccccaactgctgtatcaagtacattatcgccaatacgctacaatagatttccttgcaaaaccaatgaagacgctggaacgttagatttgcctgaaccaagattttatccgttatcaccaaagaacaatctgcaaacaccaagtccacgatttttcattagtgaagagccaagtttttcatcgccagttaaaggcgtcccagatgccattattaaccttgacgatgcgttgaagacaaggcctaggtcatttaaatcacatagaagatctgaatccgctcctcctgatttggaggttatggtagataagggcaattgtgcagccggttctaactctatgattaaagaagaagaggactccttaattgaaccagaatcgaaaaatgaatattatgagcaaaagcttccaacagcactattatccccactgcggccttccctttgtgtatctgaacaggccattgatgtagatgattcagctctcaatgggtcaccgacccatcacaaccatgggatgcaaaacgccaatgcacggaattccaacacattcaattcgttgaagatcaaaggccaaaagcaaagatattatcattatacgaagcagctacctttgaccgtaggctgtgactcgcaatctccaaaagaacaaaggtcggctgcttcaatgacaatcaatcaggcaatgacaccttcttccctggcctataccccttctaaactagcatctactcccgcaacaccagtatccttttatgacagcaatgcggacattaacttagaaagtgataattttccactaaaagataaccctagatatgccaaggatggttatcctaaaaagtgcggcaattcacagcttaatcgtgtgctggatagcgataaaagacaggattttagtggagaatcgagaagaagaagatcgggcagtcctatctcccacatgcaacaccgcaacctgattgataatatgaaaggtagacgaaacagtaacacgataaactcaatcttcaactacaagagtcaacattatgaaatgccatatgatgatatgatgaaaaatgaaaacattaatgcacagtccatgcccttttcagtcaacggtgtcaacaatgaaaatagtatcggaggggttattacgagagcggacgatgcaccccttcaacactctgtggtcaaatcctgtacgcctgatggcaaggaagaaatgaataggcttaaaagtaatgacagtaatgaatattccaagtctgaagggcagatcagaaccaattcgcaactaagtaaggacattctcatgggtgaaccaggtgatatggttgatctgtcctcttttgtcaacgcgcagagaaaagcctcaaatgaaactggtgacttagtctttagtttatcccaggatgatgacgcactgaaaacgttccatgcgagcaacagcgcagcaacaagcaatgaaagctggtgtattagcgatgatgcgttaggaaagcaggcgcaggacagtgaagttaggaggaaaagaaaatccaaattaggactctttagacatattttttcaaggaagtaa

SEQ ID NO: 1042 - DNA, 1752 bp, Artificial Sequence
  Description of Artificial Sequence: Synthetic polynucleotide
atgcccaatacgcatactcaacatgtgcaaatatctgagccaaatcctgtaaatactttgtctacaccatccaaaagaggtcaccgccatcgcagatccttggcaatatctggagattttgattttttgaaacagcctgcagcaattgtgaatttaccacctccacaggcggctgaaaattgtccttccactgccccaactgctgtatctagtacattatctccaatacgctacaatagatttccttgcaaaaccaatgaagacgctggaacgttagatttgcctgaaccaagattttatccgttatctccaaagaacaatttacaaacaccaagtccaagatttttcattagtgaagagccaagtttttcttctccagttaaaggcgtcccagatgccattattaaccttgacgatgcgttgaagacaaggcctaggtcttttaaatctcatagaagatctgaatccgctcctcctgatttggaggttatggtagataagggcaattgtgcagccggttctaactctatgattaaagaagaagaggactccttaattgaaccagaaagtaaaaatgaatattatgagcaaaagcttccaacagcattattatccccattaagaccttccctttgtgtatctgaacaggccattgatgtagatgattctgctctcaatgggtctccgacccatcacaaccatgggatgcaaaacgccaatgcaagaaattccaacacattcaattctttgaagatcaaaggccaaaagcaaagatattatcattatacgaagcagttgcctttgaccgtaggctgtgactctcaatctccaaaagaacaaaggtctgctgcttccatgacaatcaatcaggcaatgacaccttcttccttggcctataccccttctaaattggcatctactcccgcaacaccagtatccttttatgacagcaatgcggacattaacttagaaagtgataattttccattgaaagataaccctagatatgccaaggatggttatcctaaaaagtgcggcaattctcagcttaatcgtgtgttggatagcgataaaagacaggattttagtggagaatctagaagaagaagaagcggcagtcctatctcccacatgcaacaccgcaacttgattgataatatgaaaggtagaagaaacagtaacacgataaactctatcttcaactacaagagtcaacattatgaaatgccatatgatgatatgatgaaaaatgaaaacattaatgcacagtccatgcccttttctgtcaacggtgtcaacaatgaaaatagtatcggaggggttattacgagagcggacgatgcaccccttcaacactctgtggtcaaatcctgtacgcctgatggcaaggaagaaatgaataggcttaaaagtaatgacagtaatgaatattccaagtctgaagggcagatcagaaccaattctcaattgagtaaggacattctcatgggtgaaccaggtgatatggttgatttatcctcttttgtcaacgcgcagagaaaagcctctaatgaaactggtgacttagtctttagtttatcccaggatgatgacgcattgaaaacgttccatgcgagcaacagcgcagcaacaagcaatgaaagctggtgtattagcgatgatgcgttaggaaagcaggcgcaggacagtgaagttaggaggaaaagaaaatccaaattaggactctttagacatatttttagcaggaagtga

SEQ ID NO: 1043 - DNA, 966 bp, Saccharomyces cerevisiae
atgagtatccccgctgacattgcatctttaattagtgacaagtacaaaagtgccttcgataatggtaacttaaaatttatccagactgaaacaacgaaaacaaaggacccaaaaaccagcatgccatacttgattagtcacatgccaagtctgatcgaaaagccagagcgtggccaaactccagaaggagaggatccactaggcaaacctgaggaagaattaacggttatcccagaatttggtggtgccgataacaaagcgtataaattgctattaaacaaattccctgtaatccctgaacacactttattggtaactaacgaataccaacatcaaactgatgccttgaccccaaccgatttattgactgcttataagttgctgtgtgccttggacaatgaagaatccgacaagagacacatggtcttttacaattctggtccagccagtggttcttcattggaccacaaacatttgcaaattctgcaaatgcctgaaaagttcgtcactttccaagatagactatgtaatggtaaagaacatttcctaccaactttcaatactgaacctttgcaagatgctaaagtctcgttcgctcattttgtcttgccaatgccggagtctgaagaaactgttgatgaagacctattagctatgtgttacatctccatattgcaaagagctttgacctttttccaggactggttgaacgaaaatccagaactaaagaaatcctacaatcttatgttaaccaaggaatggatctgtgtcgttccacgctcgaaggccttttctgatgaaatgaagataggtttcaactccacaggttattgtggtatgatcttaaccaaaaatgatgaagttttctccaagattactgaaaaacctgaattgattaacgatatcttattggaatgtggtttcccaaacacttctggtcaaaaaccaaacgaatacaactattga

SEQ ID NO: 1044 - DNA, 966 bp, Artificial Sequence
  Description of Artificial Sequence: Synthetic polynucleotide
atgagtatccccgctgacattgcatctttaattagtgacaagtacaaaagtgccttcgataatggtaacttaaaatttatccagactgaaacaacgaaaacaaaggacccaaaaaccagcatgccatacttgattagtcacatgccaagtttaatcgaaaagccagagcgtggccaaactccagaaggagaggatccattaggcaaacctgaggaagaattaacggttatcccagaatttggtggtgccgataacaaagcgtataaattgttattaaacaaattccctgtaatccctgaacacactttattggtaactaacgaataccaacatcaaactgatgccttgaccccaaccgatttattgactgcttataagttgttatgtgccttggacaatgaagaatccgacaagagacacatggtcttttacaattctggtccagccagtggttcttctttggaccacaaacatttgcaaattttacaaatgcctgaaaagttcgtcactttccaagatagattatgtaatggtaaagaacatttcttaccaactttcaatactgaacctttgcaagatgctaaagtctctttcgctcattttgtcttgccaatgccggagtctgaagaaactgttgatgaagacttattagctatgtgttacatctccatattgcaaagagctttgacctttttccaggactggttgaacgaaaatccagaattgaagaaatcctacaatcttatgttaaccaaggaatggatctgtgtcgttccacgctctaaggccttttctgatgaaatgaagataggtttcaactccacaggttattgtggtatgatcttaaccaaaaatgatgaagttttctccaagattactgaaaaacctgaattgattaacgatatcttattggaatgtggtttcccaaacacttctggtcaaaaaccaaacgaatacaactattga

SEQ ID NO: 1045 - DNA, 939 bp, Saccharomyces cerevisiae
atgtttagtaaatacctcgtaactgcatcttccctctttgtggctttgacctctgcagcatctaccgttgatctagatgctctgcttcttctaccaggggtcgagtcccacgacggcgttgatactgtattttcgaccaaagacttttatcaagtgtcattcgtcaaatccattgctcctgctatcgtaaacagctccgtaatcttccacgatgtttctcgtggtgtggctatgggcaatgtcaagagcagagcaagtatcttcaacccagaggaaacgtattacgattgggaacagtaccaagtagtaaataacggagactggcgaaccgaatgggcacctgcctctgactgcatttggagggaggagaaggataacagcgacgaaacaccggacagattccccatctcggtgccatataattggacgtcacagtactcaattgtagattatgacacagacgctaacgaagacaatttagatttcaggtttattaaatcattgctagataagaaaaattggttgaaaaaaattaaccagactgtttcccaatccagtattatggtagcaccaatgattaggccatacaatgtggtccagctttggtattcaaaagatatggtttgggcaaacgtccaaagacaatattgtagcggtgtttatccaggagggactcaatgtagcgcttggtccaggtactaccatgttgatgcacccacctgcgatgagcctgtcgcctcttacatgaccaaaatgttggaaaatgaggttcagtgtcccaatgagagaaacgcaactaccctagagcctctccgcctgaataagcagggagactctgatttttctttgactttcgaggaagaggaagaggaagagacaggatctaaatctctttggagtacattgaaaaaaattttctctaaaagaagtataagttga

SEQ ID NO: 1046 - DNA, 939 bp, Artificial Sequence
  Description of Artificial Sequence: Synthetic polynucleotide
atgtttagtaaatacctcgtaactgcatcttccctctttgtggctttgacctctgcagcatctaccgttgatttggatgctttacttcttttaccaggggtcgagtcccacgacggcgttgatactgtattttccaccaaagacttttatcaagtgtctttcgtcaaatccattgctcctgctatcgtaaacagctccgtaatcttccacgatgtttctcgtggtgtggctatgggcaatgtcaagagcagagcaagtatcttcaacccagaggaaacgtattacgattgggaacagtaccaagtagtaaataacggagactggagaaccgaatgggcacctgcctctgactgcatttggagggaggagaaggataacagcgacgaaacaccggacagattccccatcagtgtgccatataattggacgagccagtactctattgtagattatgacacagacgctaacgaagacaatttagatttcaggtttattaaatctttgttggataagaaaaattggttgaaaaaaattaaccagactgtttcccaatccagtattatggtagcaccaatgattaggccatacaatgtggtccagctttggtattctaaagatatggtttgggcaaacgtccaaagacaatattgtagcggtgtttatccaggagggactcaatgtagcgcttggtccaggtactaccatgttgatgcacccacctgcgatgagcctgtcgcctcttacatgaccaaaatgttggaaaatgaggttcagtgtcccaatgagagaaacgcaactaccttagagcctctccgcttgaataagcagggagactctgatttttctttgactttcgaggaagaggaagaggaagagacaggatctaaatctctttggagtacattgaaaaaaattttctctaaaagaagtataagttga

SEQ ID NO: 1047 - DNA, 240 bp, Saccharomyces cerevisiae
atgcaaatcaaaaacattgtcgctgttctagctacagtcactgctatcaacgcccaagttggcattgaacctaacgccactactccaaatgctacgcagccaaatgctacgcagccaaatactactcttcctaccgcttcggtgactacgacagtttcgattggcgaagccgtagttaataccatggcggcgggtgcctttggagcagcaatcgctgccggtgttgccttcttattctag

SEQ ID NO: 1048 - DNA, 240 bp, Artificial Sequence
  Description of Artificial Sequence: Synthetic polynucleotide
atgcaaatcaaaaacattgtcgctgttttggctacagtcactgctatcaacgcccaagttggcattgaacctaacgccactactccaaatgctacgcagccaaatgctacgcagccaaatactactcttcctaccgcttctgtgactacgacagtttctattggcgaagccgtagttaataccatggcggcgggtgcctttggagcagcaatcgctgccggtgttgccttcttattctga

SEQ ID NO: 1049 - DNA, 1392 bp, Saccharomyces cerevisiae
atgaaccgtattactaggaaaagttgtttattcgcgattatatttgcatcattatttgtgacacatgcattgggtgccgctattgatccgccaaggcgaccacataatgtgaagccttttcataacggtaatctcgaacttcaaagaagagcaaatgaaccgttttttgaaatagatgtcaagagtctgaacacaaactcaccgatatcagagttgtgtaaaaaagatttgcacgtcattgaatcgtctcatgatctttttcatttacaaaaccaatgtgaattcatcttggggtcattaaaagtcacaaactatgattctaacattttggatttgaacagcttgagggccattggtggtgacctgattattcaggattcacctgaactgatcagaatccaagccgggaacttgaataaaatcgaagggctcttccaattacagggactaacctctttggtttctgttgaaattccaactttgaaattttgtcagtcactggagtggaaagttgttcccatcttgaactacgtctccatggattctcagaatattgagattataaaggatattgtcatatcggatacttcattagcaaacatcgagaatttcaacaaggttcaggaaattgatactttcaatatcaataataacagatttttagaaactattcattcgaacgttaaaaccattaggggacaattcagtgtacatgcgaacgctaaggagctagaacttgaaatgccacacttgagagaagtggaaaacataacgattagggacacatcattggtctaccttccacaattaacaaaagtgaaaagctctttagagttcatcgaaaattacttttacgaattgaacctgaacaatttgcagaagattggtggaacattaggaattatcaacaatgtaaatttaataaaagttaatttggagaacttaacagacattcaaggtggcttgatgatcgccgataacgaatccctcgaggatattactttcctgccaaacttgaagcagattggaggtgctattttctttgaaggttcgttcaaagatatcatgttcgatagcttgaaactggtgaaaggtagcgcttttattaagagttcatcaaacgtgttggattgcaataaatggacaaacccatcaaatggaagatcaatcatcaggggtgggaaattcacttgtatttctggtaagaaggaaaatacgctgaatgttaaacaggatggtacaatcatagaaaaagggtacaaagatttaacgcaagaaggtgaagactccaagaaaagagtgatttcaaaatacgcgaactcagcaaatccaagcatgcaattggacccccttctttttggtacatgccttgttgctatgttattgttttaa

SEQ ID NO: 1050 - DNA, 1392 bp, Artificial Sequence
  Description of Artificial Sequence: Synthetic polynucleotide
atgaaccgtattactaggaaaagttgtttattcgcgattatatttgcatctttatttgtgacacatgcattgggtgccgctattgatccgccaaggagaccacataatgtgaagccttttcataacggtaatctcgaacttcaaagaagagcaaatgaaccgttttttgaaatagatgtcaagagtttgaacacaaactctccgatatctgagttgtgtaaaaaagatttgcacgtcattgaaagctctcatgatctttttcatttacaaaaccaatgtgaattcatcttggggtctttaaaagtcacaaactatgattctaacattttggatttgaacagcttgagggccattggtggtgacttgattattcaggattctcctgaattgatcagaatccaagccgggaacttgaataaaatcgaagggctcttccaattacagggattaacctctttggtttctgttgaaattccaactttgaaattttgtcagtctttggagtggaaagttgttcccatcttgaactacgtctccatggattctcagaatattgagattataaaggatattgtcatatctgatacttctttagcaaacatcgagaatttcaacaaggttcaggaaattgatactttcaatatcaataataacagatttttagaaactattcattccaacgttaaaaccattaggggacaattcagtgtacatgcgaacgctaaggagttagaacttgaaatgccacacttgagagaagtggaaaacataacgattagggacacatctttggtctaccttccacaattaacaaaagtgaaaagctctttagagttcatcgaaaattacttttacgaattgaacttgaacaatttgcagaagattggtggaacattaggaattatcaacaatgtaaatttaataaaagttaatttggagaacttaacagacattcaaggtggcttgatgatcgccgataacgaatccctcgaggatattactttcttaccaaacttgaagcagattggaggtgctattttctttgaaggttctttcaaagatatcatgttcgatagcttgaaattagtgaaaggtagcgcttttattaagagttcttccaacgtgttggattgcaataaatggacaaacccatccaatggaagatctatcatcaggggtgggaaattcacttgtatttctggtaagaaggaaaatacgttgaatgttaaacaggatggtacaatcatagaaaaagggtacaaagatttaacgcaagaaggtgaagactccaagaaaagagtgatttccaaatacgcgaactctgcaaatccaagcatgcaattggacccccttctttttggtacatgccttgttgctatgttattgttttga

SEQ ID NO: 1051 - DNA, 777 bp, Saccharomyces cerevisiae
atgaagaagacgttcgagcagtttcgaaaaagcaatttactatttcaggttctcaaaggaccccagcatctagaatgtcagaagttatttgtccttgattcttcattcaatccaccacatctggcccattttcaactactatcgcagactattaaaaacttcaaattgaaggacacccgttcgcatgttttattactgttagcggtgaataatgcagataagttgcctaagccggcatcttttccaactcgtctggaaatgatgtgcttattcgctgactaccttcaggagaagctcccccaatctgtagtatctgtcgggttgactgttttctcgaaattcatcgacaaggacaaaatattacatgagcaatttgttaaaggatgcagtgcagatataggctacttagttggttttgatacaattgctaggatctttgatgaaaaatattatcatcctttaaaaatcagtgatgtaatggagagcttcatgtcgggatctcaattatattgcttggcgagaggcgattgccatctcagtgctgaatcgcaactaagatacgccagtgacatccttgagggaaaattcgaaccggtaataccaagagaatggggcgctaggattcatgttatgcaaaatgattatccagcattaagaaatgtttcatcatccgagattaggaacaaactgaagaatgggcaagtggagagtttgaaagacgagttgccattgtgcatatacgattatttgatcaataataagacaatatttgattga

SEQ ID NO: 1052 - DNA, 777 bp, Artificial Sequence
  Description of Artificial Sequence: Synthetic polynucleotide
atgaagaagacgttcgagcagtttagaaaaagcaatttactttttcaggttctcaaaggaccccagcatttggaatgtcagaagttatttgtccttgattcttctttcaatccaccacatttggcccattttcaattattatctcagactattaaaaacttcaaattgaaggacacccgttctcatgttttattattattagcggtgaataatgcagataagttgcctaagccggcatcttttccaactcgtttagaaatgatgtgcttattcgctgactaccttcaggagaagctcccccaatctgtagtatctgtcgggttgactgttttctccaaattcatcgacaaggacaaaatattacatgagcaatttgttaaaggatgcagtgcagatataggctacttagttggttttgatacaattgctaggatctttgatgaaaaatattatcatcctttaaaaatcagtgatgtaatggagagcttcatgtctggatctcaattatattgcttggcgagaggcgattgccatctcagtgctgaatctcaattgagatacgccagtgacatccttgagggaaaattcgaaccggtaataccaagagaatggggcgctaggattcatgttatgcaaaatgattatccagcattaagaaatgtttcttcttccgagattaggaacaaattgaagaatgggcaagtggagagtttgaaagacgagttgccattgtgcatatacgattatttgatcaataataagacaatatttgattga

SEQ ID NO: 1053 - DNA, 2283 bp, Saccharomyces cerevisiae
atgaagataacgtgtacagacttggtgtacgtcttcattttactcttcctaaacacgagttgtgtccaagccgttttttcagatgatgcatttatcactgattggcaactggctaacttaggtccttgggagaaagtcatccctgattctcgagaccgcaacagggttctcatcttatcgaaccctaccgaaacttcctgcttagtttcttcgtttaacgtttcttccggacagattcttttcagaaacgttttaccctttaccattgatgagattcaactggatagtaatgaccataacgcaatggtttgtgtgaactcttcaagcaaccattggcagaaatatgatttacacgattggtttttactagaggaaggcgtagataatgccccttctacgaccattttacctcaatcctcatatttaaacgatcaagtatctattaagaacaatgaactacatattctcgatgagcagtcaaaactggcagaatggaaattggagttacctcaagggttcaataaagtggaatattttcatcgtgaagatcccctggcgttagtgttgaacgttaatgatacccaatatatgggattctctgccaatggcacagaattgatccccgtttggcaaagagatgaatggttgactaacgtggtagactatgctgtattggacgtcttcgattctagggatgtggagttgaacaaagatatgaaagcggaacttgattcaaattcgctttggaatgcttactggcttagattgacaactaattggaatcgccttatcaacttattgaaagaaaaccaattctcaccaggacgtgtcttcactaaactcctagctctagacgctaaggataccacggtatcagatttgaagttcggattcgccaaaatcttaattgttttgacgcatgatggctttatcggcggccttgatatggtcaataagggccaacttatctggaaactcgatttagaaattgatcagggcgtcaaaatgttctggacggataaaaaccatgacgaacttgttgttttttcgcatgatgggcattatttgacaattgaagttactaaagatcaaccgattatcaaatcaagatcccccctatctgaaaggaaaactgttgattccgttattaggctgaatgaacatgatcaccagtatctgattaagtttgaggataaggatcatttactgttcaaattgaatcccggcaagaatacggatgtaccaatagttgccaacaaccattctagttcccacatattcgtcacagagcatgacacgaatggcatttatggctacataatcgaaaacgatacggtaaaacaaacttggaaaaaagccgtaaattcgaaagagaaaatggtggcatatagcaagagggaaacaacaaacctaaacactcttggtattacactaggtgacaaatcggttctttataaatatttgtaccccaacctagcggcttatctgatcgctaatgaagaacatcatacaatcacttttaacttaattgataccattacaggagaaatcctcattacccaagagcacaaggattctccggattttaggtttccaatggatattgttttcggtgaatattgggtcgtttattcctatttcagttctgaacctgttccagaacaaaagttagtagtggtggaattatatgagtcactaaccccagatgagcgtttgtctaactcaagcgacaatttttcttatgatccattgactggacacattaacaaacctcaatttcaaactaaacaattcatttttcccgagattatcaaaacaatgtccatttccaagacaacggatgatattaccacaaaggcaatcgttatggaattagaaaatggacaaatcacctacataccaaagcttttattgaatgcaagaggtaaaccagcagaagaaatggccaaggataagaaaaaagagtttatggctaccccatacacgccagttatcccaattaatgataatttcattatcactcatttcagaaatctattgccaggatccgattcgcagttgatctccatcccaaccaatctggaatccacaagcattatatgtgatctaggccttgatgtattttgtacaaggatcacaccttcgggccaatttgatttaatgagtcctactttcgaaaagggtaaattgcttattactatattcgtcttgttggtgatcacgtattttatccgtccttctgtttcaaacaagaagttgaaatcccaatggctaattaaatag

SEQ ID NO: 1054 - DNA, 2283 bp, Artificial Sequence
  Description of Artificial Sequence: Synthetic polynucleotide
atgaagataacgtgtacagacttggtgtacgtcttcattttactcttcttgaacacgagttgtgtccaagccgttttttctgatgatgcatttatcactgattggcaattggctaacttaggtccttgggagaaagtcatccctgattctagagaccgcaacagggttctcatcttatctaaccctaccgaaacttcctgcttagtttcttcttttaacgtttcttccggacagattcttttcagaaacgttttaccctttaccattgatgagattcaattggatagtaatgaccataacgcaatggtttgtgtgaactcttctagcaaccattggcagaaatatgatttacacgattggtttttattggaggaaggcgtagataatgccccttctacgaccattttacctcaatccagctatttaaacgatcaagtatctattaagaacaatgaattacatattctcgatgagcagtccaaattggcagaatggaaattggagttacctcaagggttcaataaagtggaatattttcatcgtgaagatcccttagcgttagtgttgaacgttaatgatacccaatatatgggattctctgccaatggcacagaattgatccccgtttggcaaagagatgaatggttgactaacgtggtagactatgctgtattggacgtcttcgattctagggatgtggagttgaacaaagatatgaaagcggaacttgattctaattctctttggaatgcttactggcttagattgacaactaattggaatcgccttatcaacttattgaaagaaaaccaattctctccaggacgtgtcttcactaaactcttggctttggacgctaaggataccacggtatctgatttgaagttcggattcgccaaaatcttaattgttttgacgcatgatggctttatcggcggccttgatatggtcaataagggccaacttatctggaaactcgatttagaaattgatcagggcgtcaaaatgttctggacggataaaaaccatgacgaacttgttgttttttctcatgatgggcattatttgacaattgaagttactaaagatcaaccgattatcaaatctagatcccccttatctgaaaggaaaactgttgattccgttattaggttgaatgaacatgatcaccagtatttgattaagtttgaggataaggatcatttattattcaaattgaatcccggcaagaatacggatgtaccaatagttgccaacaaccattctagttcccacatattcgtcacagagcatgacacgaatggcatttatggctacataatcgaaaacgatacggtaaaacaaacttggaaaaaagccgtaaattctaaagagaaaatggtggcatatagcaagagggaaacaacaaacttgaacactcttggtattacattaggtgacaaatctgttctttataaatatttgtaccccaacttggcggcttatttgatcgctaatgaagaacatcatacaatcacttttaacttaattgataccattacaggagaaatcctcattacccaagagcacaaggattctccggattttaggtttccaatggatattgttttcggtgaatattgggtcgtttattcctatttcagttctgaacctgttccagaacaaaagttagtagtggtggaattatatgagtctttaaccccagatgagcgtttgtctaactccagcgacaatttttcttatgatccattgactggacacattaacaaacctcaatttcaaactaaacaattcatttttcccgagattatcaaaacaatgtccatttccaagacaacggatgatattaccacaaaggcaatcgttatggaattagaaaatggacaaatcacctacataccaaagcttttattgaatgcaagaggtaaaccagcagaagaaatggccaaggataagaaaaaagagtttatggctaccccatacacgccagttatcccaattaatgataatttcattatcactcatttcagaaatttattgccaggatccgattctcagttgatctccatcccaaccaatttggaatccacaagcattatatgtgatttgggccttgatgtattttgtacaaggatcacaccttccggccaatttgatttaatgagtcctactttcgaaaagggtaaattgcttattactatattcgtcttgttggtgatcacgtattttatccgtccttctgtttctaacaagaagttgaaatcccaatggttgattaaatga

SEQ ID NO: 1055 - DNA, 1254 bp, Saccharomyces cerevisiae
atggctgtatttactcctccatcaggtaatagcaattccaccgaccatactcacacacaagatgaccacgacaaagatgataatgatatcaagaaattctacataaggccaagtttaggcttaaaactgtggggtccgctcgtacccgctcctgataacctaccgggactatacactctaatcactatccaatctgcagtgggtttctttgccctttggagactgagaaggctctacaaactaccgccaccgcgccgcattgccactggcactcactcggatttatcctttggcgaactacccagtgaaatgattgtcaatggcaagactaaaatcaaaaaggatattgctgactttccaactttgaaccgcttctccaccacccatggtgacattgtgctcgcccctcctcccatcatacctcgccaatctcgattcgtcagcgtcagaaagctcttatgggggttgtttggctctttgctactttctcagtcactgttggagcttactcgcctgaactttcttaaatacgacccctggtgcgacgaaatgaaatccgtacgtgacaagaagtttttcaacaatattgtcaaatattatcacgagggcatagaccccaccaaaataaaagtcaaggatgctatgaacggtactcctctctcgacaaatatccctgaggtcaaacaaagcgtcgctctcgctagagcgcaagttgaggcgcagaatcccattattaaatggttcggacccttggaatacaagcccatgtctttcaacgagtacctcaatcgcatggaatttcacttggacatgttcgagttttttcaaaataaaagaaacattagagaaaattccattgaactcatcaattccatatcccacaatccgcagtcttcttctactggccttgaaggtctttccgagtccaaaaaactccatctacaaaatgtggaaaaaagactgcatttcttagcatcttcgggagattccatttccgcaccagtaaagaagagatccagcaccacactctcccgaggtgtcattttgccccatgacacgaaaggcccgcaagatattgatctcgatacaataagatcgctttatgatccatggatgactttggccttagaaacttcgctaagcatcaaattcataccaactaccatgccctcccataccaagacacccactagcacggaccagccgttaccagggcctacccccaaggctctcactaatgaaaagacacattag

SEQ ID NO: 1056 - DNA, 1254 bp, Artificial Sequence
  Description of Artificial Sequence: Synthetic polynucleotide
atggctgtatttactcctccatctggtaatagcaattccaccgaccatactcacacacaagatgaccacgacaaagatgataatgatatcaagaaattctacataaggccaagtttaggcttaaaattatggggtccgctcgtacccgctcctgataacttaccgggattatacactttgatcactatccaatctgcagtgggtttctttgccctttggagattgagaaggctctacaaattaccgccaccgcgccgcattgccactggcactcacagtgatttatcctttggcgaattgcccagtgaaatgattgtcaatggcaagactaaaatcaaaaaggatattgctgactttccaactttgaaccgcttctccaccacccatggtgacattgtgctcgcccctcctcccatcatacctcgccaatctagattcgtcagcgtcagaaagctcttatgggggttgtttggctctttgttactttctcagtctttgttggagcttactcgcttgaactttcttaaatacgacccctggtgcgacgaaatgaaatccgtacgtgacaagaagtttttcaacaatattgtcaaatattatcacgagggcatagaccccaccaaaataaaagtcaaggatgctatgaacggtactcctctctccacaaatatccctgaggtcaaacaaagcgtcgctctcgctagagcgcaagttgaggcgcagaatcccattattaaatggttcggacccttggaatacaagcccatgtctttcaacgagtacctcaatcgcatggaatttcacttggacatgttcgagttttttcaaaataaaagaaacattagagaaaattccattgaactcatcaattccatatcccacaatccgcagtcttcttctactggccttgaaggtctttccgagtccaaaaaactccatttacaaaatgtggaaaaaagattacatttcttagcatcttctggagattccatttccgcaccagtaaagaagagatccagcaccacactctccagaggtgtcattttgccccatgacacgaaaggcccgcaagatattgatctcgatacaataagatctctttatgatccatggatgactttggccttagaaacttctttaagcatcaaattcataccaactaccatgccctcccataccaagacacccactagcacggaccagccgttaccagggcctacccccaaggctctcactaatgaaaagacacattga

SEQ ID NO: 1057 - DNA, 1569 bp, Saccharomyces cerevisiae
atgaagttttctgctggtgccgtcctgtcatggtcctccctgctgctcgcctcctctgttttcgcccaacaagaggctgtggcccctgaagactccgctgtcgttaagttggccaccgactccttcaatgagtacattcagtcgcacgacttggtgcttgcggagttttttgctccatggtgtggccactgtaagaacatggctcctgaatacgttaaagccgccgagactttagttgagaaaaacattaccttggcccagatcgactgtactgaaaaccaggatctgtgtatggaacacaacattccagggttcccaagcttgaagattttcaaaaacagcgatgttaacaactcgatcgattacgagggacctagaactgccgaggccattgtccaattcatgatcaagcaaagccaaccggctgtcgccgttgttgctgatctaccagcttaccttgctaacgagacttttgtcactccagttatcgtccaatccggtaagattgacgccgacttcaacgccaccttttactccatggccaacaaacacttcaacgactacgactttgtctccgctgaaaacgcagacgatgatttcaagctttctatttacttgccctccgccatggacgagcctgtagtatacaacggtaagaaagccgatatcgctgacgctgatgtttttgaaaaatggttgcaagtggaagccttgccctactttggtgaaatcgacggttccgttttcgcccaatacgtcgaaagcggtttgcctttgggttacttattctacaatgacgaggaagaattggaagaatacaagcctctctttaccgagttggccaaaaagaacagaggtctaatgaactttgttagcatcgatgccagaaaattcggcagacacgccggcaacttgaacatgaaggaacaattccctctatttgccatccacgacatgactgaagacttgaagtacggtttgcctcaactctctgaagaggcgtttgacgaattgagcgacaagatcgtgttggagtctaaggctattgaatctttggttaaggacttcttgaaaggtgatgcctccccaatcgtgaagtcccaagagatcttcgagaaccaagattcctctgtcttccaattggtcggtaagaaccatgacgaaatcgtcaacgacccaaagaaggacgttcttgttttgtactatgccccatggtgtggtcactgtaagagattggccccaacttaccaagaactagctgatacctacgccaacgccacatccgacgttttgattgctaaactagaccacactgaaaacgatgtcagaggcgtcgtaattgaaggttacccaacaatcgtcttatacccaggtggtaagaagtccgaatctgttgtgtaccaaggttcaagatccttggactctttattcgacttcatcaaggaaaacggtcacttcgacgtcgacggtaaggccttgtacgaagaagcccaggaaaaagctgctgaggaagccgatgctgacgctgaattggctgacgaagaagatgccattcacgatgaattgtaa

SEQ ID NO: 1058 - DNA, 1569 bp, Artificial Sequence
  Description of Artificial Sequence: Synthetic polynucleotide
atgaagttttctgctggtgccgtcctttcttggtcctccttacttctcgcctcctctgttttcgcccaacaagaggctgtggcccctgaagactccgctgtcgttaagttggccaccgactccttcaatgagtacattcagtctcacgacttggtgcttgcggagttttttgctccatggtgtggccactgtaagaacatggctcctgaatacgttaaagccgccgagactttagttgagaaaaacattaccttggcccagatcgactgtactgaaaaccaggatttatgtatggaacacaacattccagggttcccaagcttgaagattttcaaaaacagcgatgttaacaactctatcgattacgagggacctagaactgccgaggccattgtccaattcatgatcaagcaaagccaaccggctgtcgccgttgttgctgatttaccagcttaccttgctaacgagacttttgtcactccagttatcgtccaatccggtaagattgacgccgacttcaacgccaccttttactccatggccaacaaacacttcaacgactacgactttgtctccgctgaaaacgcagacgatgatttcaagctttctatttacttgccctccgccatggacgagcctgtagtatacaacggtaagaaagccgatatcgctgacgctgatgtttttgaaaaatggttgcaagtggaagccttgccctactttggtgaaatcgacggttccgttttcgcccaatacgtcgaaagcggtttgcctttgggttacttattctacaatgacgaggaagaattggaagaatacaagcctctctttaccgagttggccaaaaagaacagaggtttgatgaactttgttagcatcgatgccagaaaattcggcagacacgccggcaacttgaacatgaaggaacaattccctttatttgccatccacgacatgactgaagacttgaagtacggtttgcctcaactctctgaagaggcgtttgacgaattgagcgacaagatcgtgttggagtctaaggctattgaatctttggttaaggacttcttgaaaggtgatgcctccccaatcgtgaagtcccaagagatcttcgagaaccaagattcctctgtcttccaattggtcggtaagaaccatgacgaaatcgtcaacgacccaaagaaggacgttcttgttttgtactatgccccatggtgtggtcactgtaagagattggccccaacttaccaagaattggctgatacctacgccaacgccacatccgacgttttgattgctaaattagaccacactgaaaacgatgtcagaggcgtcgtaattgaaggttacccaacaatcgtcttatacccaggtggtaagaagtccgaatctgttgtgtaccaaggttccagatccttggactctttattcgacttcatcaaggaaaacggtcacttcgacgtcgacggtaaggccttgtacgaagaagcccaggaaaaagctgctgaggaagccgatgctgacgctgaattggctgacgaagaagatgccattcacgatgaattgtga

SEQ ID NO: 1059 - DNA, 360 bp, Saccharomyces cerevisiae
atggaaaaaaaaaaaattttagacgcggcgcttgcaccccgcattataagtggtgtgccgacggacggtcaacccctttcagggggccccctatcttgggcgtggtgtcacaccacgctcaaacggtgggcactaatgaaaacgcgcccatataaatatccgctatcaacagaacccccaacccccccatcagtgcccaactcagcttccgtaaaccacaacaccaccactaatacaactctatcatacacaagatgtcattcgacgacttacacaaagccactgagagagcggtcatccaggccgtggaccagatctgcgacgatttcgaggttacccccgagaagctggacgaattaa

SEQ ID NO: 1060 - DNA, 360 bp, Artificial Sequence
  Description of Artificial Sequence: Synthetic polynucleotide
atggaaaaaaaaaaaattttagacgcggcgcttgcaccccgcattataagtggtgtgccgacggacggtcaacccctttccgggggccccttatcttgggcgtggtgtcacaccacgctcaaaagatgggcattaatgaaaacgcgcccatataaatatccgttatctacagaacccccaacccccccatctgtgcccaactctgcttccgtaaaccacaacaccaccactaatacaactttatcttacacaagatgtcattctacgacttacacaaagccattgagagagagaagttccaggccgtggaccagatctgcgacgatttctaggttacccccgagaagctggacgaattga

SEQ ID NO: 1061 - DNA, 1503 bp, Saccharomyces cerevisiae
atgtcattcgacgacttacacaaagccactgagagagcggtcatccaggccgtggaccagatctgcgacgatttcgaggttacccccgagaagctggacgaattaactgcttacttcatcgaacaaatggaaaaaggtctagctccaccaaaggaaggccacacattggcctcggacaaaggtcttcctatgattccggcgttcgtcaccgggtcacccaacgggacggagcgcggtgttttactagccgccgacctgggtggtaccaatttccgtatatgttctgttaacttgcatggagatcatactttctccatggagcaaatgaagtccaagattcccgatgatttgctagacgatgagaacgtcacatctgacgacctgtttgggtttctagcacgtcgtacactggcctttatgaagaagtatcacccggacgagttggccaagggtaaagacgccaagcccatgaaactggggttcactttctcataccctgtagaccagacctctctaaactccgggacattgatccgttggaccaagggtttccgcatcgcggacaccgtcggaaaggatgtcgtgcaattgtaccaggagcaattaagcgctcagggtatgcctatgatcaaggttgttgcattaaccaacgacaccgtcggaacgtacctatcgcattgctacacgtccgataacacggactcaatgacgtccggagaaatctcggagccggtcatcggatgtattttcggtaccggtaccaatgggtgctatatggaggagatcaacaagatcacgaagttgccacaggagttgcgtgacaagttgataaaggagggtaagacacacatgatcatcaatgtcgaatgggggtccttcgataatgagctcaagcacttgcctactactaagtatgacgtcgtaattgaccagaaactgtcaacgaacccgggatttcacttgtttgaaaaacgtgtctcagggatgttcttgggtgaggtgttgcgtaacattttagtggacttgcactcgcaaggcttgcttttgcaacagtacaggtccaaggaacaacttcctcgccacttgactacacctttccagttgtcatccgaagtgctgtcgcatattgaaattgacgactcgacaggtctacgtgaaacagagttgtcattattacagagtctcagactgcccaccactccaacagagcgtgttcaaattcaaaaattggtgcgcgcgatttctaggagatctgcgtatttagccgccgtgccgcttgccgcgatattgatcaagacaaatgctttgaacaagagatatcatggtgaagtcgagatcggttgtgatggttccgttgtggaatactaccccggtttcagatctatgctgagacacgccttagccttgtcacccttgggtgccgagggtgagaggaaggtgcacttgaagattgccaaggatggttccggagtgggtgccgccttgtgtgcgcttgtagcatga

SEQ ID NO: 1062 - DNA, 1503 bp, Artificial Sequence
  Description of Artificial Sequence: Synthetic polynucleotide
atgagtttcgacgacttacacaaagccactgagagagcggtcatccaggccgtggaccagatctgcgacgatttcgaggttacccccgagaagttggacgaattaactgcttacttcatcgaacaaatggaaaaaggtttagctccaccaaaggaaggccacacattggccagtgacaaaggtcttcctatgattccggcgttcgtcaccgggtctcccaacgggacggagcgcggtgttttattagccgccgacttgggtggtaccaatttccgtatatgttctgttaacttgcatggagatcatactttctccatggagcaaatgaagtccaagattcccgatgatttgttggacgatgagaacgtcacatctgacgacttatttgggtttttggcacgtcgtacattggcctttatgaagaagtatcacccggacgagttggccaagggtaaagacgccaagcccatgaaattggggttcactttctcttaccctgtagaccagacctctttgaactccgggacattgatccgttggaccaagggtttccgcatcgcggacaccgtcggaaaggatgtcgtgcaattgtaccaggagcaattaagcgctcagggtatgcctatgatcaaggttgttgcattaaccaacgacaccgtcggaacgtacttatctcattgctacacgtccgataacacggactccatgacgtccggagaaatctctgagccggtcatcggatgtattttcggtaccggtaccaatgggtgctatatggaggagatcaacaagatcacgaagttgccacaggagttgcgtgacaagttgataaaggagggtaagacacacatgatcatcaatgtcgaatgggggtccttcgataatgagctcaagcacttgcctactactaagtatgacgtcgtaattgaccagaaattatctacgaacccgggatttcacttgtttgaaaaacgtgtcagtgggatgttcttgggtgaggtgttgcgtaacattttagtggacttgcactctcaaggcttgcttttgcaacagtacaggtccaaggaacaacttcctcgccacttgactacacctttccagttgtcttccgaagtgttatctcatattgaaattgacgactctacaggtttacgtgaaacagagttgtctttattacagagtctcagattacccaccactccaacagagcgtgttcaaattcaaaaattggtgcgcgcgatttctaggagatctgcgtatttagccgccgtgccgcttgccgcgatattgatcaagacaaatgctttgaacaagagatatcatggtgaagtcgagatcggttgtgatggttccgttgtggaatactaccccggtttcagatctatgttgagacacgccttagccttgagccccttgggtgccgagggtgagaggaaggtgcacttgaagattgccaaggatggttccggagtgggtgccgccttgtgtgcgcttgtagcatga

SEQ ID NO: 1063 - DNA, 2238 bp, Saccharomyces cerevisiae
atgtcacacactaataagatcgcatacgtgttgaacaatgacacggaggaaacagcctcgccctcttccgttggttgttttgacaagaaacagctcactaaattactgatacatactctaaaggagctgggctacgactccgccgctaaccagttactgctagagagcggcggatatcaaaatgagtctaaccacatccagactttcttcaaactcatcaagaccggccaattccatcttattaattggcagattgtttgctcgctgccccttgcccatagctctccgctaaggtccgaatggcttcaaaggctgctcattcccacgccgacgcccgccacgacttcacttttcgaccacatgctcctgcaactgcaatacctgcaacagctgatgagctctgtaaattcatctacttgttcggacgcagagatcgccacgctcagaaattacgtagagatcatgattctagttaatagacaaatattcctcgaattcttccatccagtcacaaattccgcctctcacaagggccctcacactgcactgcccgtcctgtatttgcgcaaaatcctcaaaaacttcatcgagatatgggattccctgctggtgtctaacgatcagttcctaaatgaagaaaacatcttcaatccggaaacgaccttgagagaactgtcgacgtacctgaccaacccaaaactaaccgcgcagttgaacctcgagcgagaccatctgattgacgccatctccaaatatatcgatccgaacgaactcgttcccaagggtcgtctcttgcatctcttgaaacaggccatcaagtatcaacaatcacaagacatttttaatatcatcgatccggatgatgacgcctctttctcctctccaccccaccggatcaaccttttgcaggataacttctcacacgatctgactgtgacctttcaagaatggaagactatccaagacaccacagacgaaatttggtttttgacattttcgcccaatggcaagtatttggcttctgcgacttccgagtcttcaagaggctacttcattactgtttatgatgtggaacaagacttcaaaatttataagacttgcgtgagcttgtcacaatccgtattgtacctcatgttttctcctgatagccggtatctggttgcttgccctttcagcgaagatgttaccatttacgacatgaatgccacctccctgcccgatgcgtctgccacagactcgttcctactatacccttctaccaggctctcgcccatggactcgtttaaactggacaccaccacgtacccagatgataccgaatcatcagcatcatcttcctcgaggccggcaaacgcgaattctaatcaatcaagagtatggtgctgcgatgccttccacactgcggaacgtgcgggctggatggtggttggatcgcccgacagagaagctattgtacactcactcaccacgaaagagtcactttttagcttaaaaggcaggacttgtatcgcgttgggccacgatgaaaacatctctgggagaaaatcaatcgatcctgcaaaagtcctttacaaaccaacaagtagcaatggtaactggcaatatgtggaggacgacgaaacctttccacgtgtgcacgacgtgaaaatcagctatgacgataaatacgtgcttttaatgacccaccagggcgttatagatgtctacgatttcagtgggttcccctccaaagaggagctatctaagcaaacagtggatcccaaaaactttctgattccaaggatcgcaagattggacgtgggcaaaaacatgacttgtatctcattaccgctaaataccacgcatcaaggcttccataggcaacaaatatccgagtctcaacatttggtattagttagccttcaagataacgaattacaaatgtgggactataaagaaaatattctcatacaaaagtactttggacagaagcaacagcactttattatcagatcttgcttcgcctacggtaataagcttgtcatgagcggatcagaagatggtaaaatttacatttgggatagaattagaggtaacctagtatctgttttatccggtcattccacggtaatgagtaattccacaaaacccatggggaaaaattgtaacgtagttgcatcaaaccctgcagataaagaaatgtttgcttctggcggtgatgacggtaagataaaaatctggaaaatttcaagaaattaa

SEQ ID NO: 1064 - DNA, 2238 bp, Artificial Sequence
  Description of Artificial Sequence: Synthetic polynucleotide
atgtctcacactaataagatcgcatacgtgttgaacaatgacacggaggaaacagcctctccctcttccgttggttgttttgacaagaaacagctcactaaattattgatacatactttgaaggagttgggctacgactccgccgctaaccagttattattggagagcggcggatatcaaaatgagtctaaccacatccagactttcttcaaactcatcaagaccggccaattccatcttattaattggcagattgtttgctctttaccccttgcccatagctctccgttaaggtccgaatggcttcaaaggttactcattcccacgccgacgcccgccacgacttctcttttcgaccacatgctcttacaattacaatacttacaacagttgatgagctctgtaaattcttctacttgttctgacgcagagatcgccacgctcagaaattacgtagagatcatgattttggttaatagacaaatattcctcgaattcttccatccagtcacaaattccgcctctcacaagggccctcacactgcattgcccgtcctttatttgcgcaaaatcctcaaaaacttcatcgagatatgggattccttattggtgtctaacgatcagttcttgaatgaagaaaacatcttcaatccggaaacgaccttgagagaattatctacgtacttgaccaacccaaaattgaccgcgcagttgaacctcgagagagaccatttgattgacgccatctccaaatatatcgatccgaacgaactcgttcccaagggtcgtctcttgcatctcttgaaacaggccatcaagtatcaacaatctcaagacatttttaatatcatcgatccggatgatgacgcctctttctcctctccaccccacagaatcaaccttttgcaggataacttctctcacgatttgactgtgacctttcaagaatggaagactatccaagacaccacagacgaaatttggtttttgacattttctcccaatggcaagtatttggcttctgcgacttccgagtcttctagaggctacttcattactgtttatgatgtggaacaagacttcaaaatttataagacttgcgtgagcttgtctcaatccgtattgtacctcatgttttctcctgatagcagatatttggttgcttgccctttcagcgaagatgttaccatttacgacatgaatgccacctccttgcccgatgcgtctgccacagactctttcttattgtacccttctaccaggctctctcccatggactcttttaaattagacaccaccacgtacccagatgataccgaatcttctgcatcttcttccagcaggccggcaaacgcgaattctaatcaatctagagtatggtgctgcgatgccttccacactgcggaacgtgcgggctggatggtggttggaagtcccgacagagaagctattgtacacagtctcaccacgaaagagtctctttttagcttaaaaggcaggacttgtatcgcgttgggccacgatgaaaacatctctgggagaaaatctatcgatcctgcaaaagtcctttacaaaccaacaagtagcaatggtaactggcaatatgtggaggacgacgaaacctttccacgtgtgcacgacgtgaaaatcagctatgacgataaatacgtgcttttaatgacccaccagggcgttatagatgtctacgatttcagtgggttcccctccaaagaggagctttctaagcaaacagtggatcccaaaaactttttgattccaaggatcgcaagattggacgtgggcaaaaacatgacttgtatctctttaccgttaaataccacgcatcaaggcttccataggcaacaaatatccgagtctcaacatttggtattagttagccttcaagataacgaattacaaatgtgggactataaagaaaatattctcatacaaaagtactttggacagaagcaacagcactttattatcagatcttgcttcgcctacggtaataagcttgtcatgagcggatctgaagatggtaaaatttacatttgggatagaattagaggtaacttggtatctgttttatccggtcattccacggtaatgagtaattccacaaaacccatggggaaaaattgtaacgtagttgcatctaaccctgcagataaagaaatgtttgcttctggcggtgatgacggtaagataaaaatctggaaaatttctagaaattga

SEQ ID NO: 1065 - DNA, 1587 bp, Saccharomyces cerevisiae
atgagctatggaactataaatgatatgaatgaatcggtaacgaactatcgaataaaaaaagcccaaaacaatatcaagggatggtacgcttactcattttctagcgaaccatttgtcgtttctgcggtttcaacgtatattcccttactactgcagcaatttgcgagtataaatggtgtaaaagttcacgatcactccataccctgcctgtcagaaacgggtagtgattcagataagtgtgttcttggtttgttcaacaatcggatcttcgtagatacttcaagttttgcattatatgtcttttcccttagcgttttattccaaactataatagtcatttccgtttcagggatagtagatctctgggggagcgttaaattcaaaggcagaattctggtttggtttggtattgtgggcgcattgtcgactgttgcgatttcaaaattgaatgatacccagatttattctctggctgggctttatatagtggccaatggttgttttggcgttatcaatgttgttgggaattctcttctgcccatttttgtcaaggattctttgaaatgtcaaagtcaaggagcttatgaacctgataaggtagactcgttaactactgttattagcggtagaggtgcatctttaggttattcaagtgccctcattgttcagattgtatctatgttcttagtcgcatctaaaaagggcagtaagcaggatgttcaagtggctgttcttttcgttgggatttggtggtttgtgtggcaactgcccatgatctggttgattgacgatgtgacaataccgataagagttgacgattctacattagcatccgcccgcagtccgtatcccggtgagcaagacgccttgggtcaactaaactggaagaattacctttcatatggttgggtttcgcttttcgaatcgtttaaacatgccagactattgaaagatgtgatgatttttcttattgcgtggtttattattagtgattccattacaactataaattctacagcggttttgttctccaaggcagaactgcacatgagtaccctcaatttaatcatgataagtgttttgaccgttgtaaatgcaatgctgggtgcctttatgattccacaatttcttgccacaaagtttcggtggacttctagtcaaactttgatgtacattatcatttgggcaagtttcataccattttatggtattcttggatttttcttcaatgcgttcggtttaaagcataagtttgaaatgttcttattggccatttggtatggattatcactaggtggcctgtccgcggtttcaagatcagttttcagtttgattgtacctccaggaaaagaatccacgttttttagtatgttcagtatcacagataaggggtcgtccatcctgggacccttccttgttggactgcttaccgataaaacgcataatattcgctattcgttttatttcttctttttgcttttgatgctatcattgcctgtgctaaactgtttggatgtcaagagaggtagaagagaggctgaagaactcagtcaagttttacctgaaagtgaaagaaggttggattag

SEQ ID NO: 1066 - DNA, 1587 bp, Artificial Sequence
  Description of Artificial Sequence: Synthetic polynucleotide
atgagctatggaactataaatgatatgaatgaaagtgtaacgaactatagaataaaaaaagcccaaaacaatatcaagggatggtacgcttactctttttctagcgaaccatttgtcgtttctgcggtttccacgtatattcccttattattgcagcaatttgcgagtataaatggtgtaaaagttcacgatcactccataccctgcttatctgaaacgggtagtgattctgataagtgtgttcttggtttgttcaacaatagaatcttcgtagatacttctagttttgcattatatgtcttttcccttagcgttttattccaaactataatagtcatttccgtttctgggatagtagatctctgggggagcgttaaattcaaaggcagaattttggtttggtttggtattgtgggcgcattgtctactgttgcgatttccaaattgaatgatacccagatttattctttggctgggctttatatagtggccaatggttgttttggcgttatcaatgttgttgggaattctcttttgcccatttttgtcaaggattctttgaaatgtcaaagtcaaggagcttatgaacctgataaggtagactctttaactactgttattagcggtagaggtgcatctttaggttattctagtgccctcattgttcagattgtatctatgttcttagtcgcatctaaaaagggcagtaagcaggatgttcaagtggctgttcttttcgttgggatttggtggtttgtgtggcaattgcccatgatctggttgattgacgatgtgacaataccgataagagttgacgattctacattagcatccgcccgcagtccgtatcccggtgagcaagacgccttgggtcaattgaactggaagaattacctttcctatggttgggtttcccttttcgaaagttttaaacatgccagattattgaaagatgtgatgatttttcttattgcgtggtttattattagtgattccattacaactataaattctacagcggttttgttctccaaggcagaattgcacatgagtaccctcaatttaatcatgataagtgttttgaccgttgtaaatgcaatgttgggtgcctttatgattccacaatttcttgccacaaagtttagatggacttctagtcaaactttgatgtacattatcatttgggcaagtttcataccattttatggtattcttggatttttcttcaatgcgttcggtttaaagcataagtttgaaatgttcttattggccatttggtatggattaagtttgggtggcttatccgcggtttctagatctgttttcagtttgattgtacctccaggaaaagaatccacgttttttagtatgttcagtatcacagataaggggtcttccatcttgggacccttccttgttggattgcttaccgataaaacgcataatattcgctattctttttatttcttctttttgcttttgatgctttctttgcctgtgttgaactgtttggatgtcaagagaggtagaagagaggctgaagaactcagtcaagttttacctgaaagtgaaagaaggttggattga

SEQ ID NO: 1067 - DNA, 1305 bp, Saccharomyces cerevisiae
atgtctgctgaaaccgccgccgcaaacactgctactgccccagtcccagaagtgcaagaacaagagagctccaagagcaagcaagtcaacttgacgccggcaccattgcccacatcttccccatggaaacttgctcctactgagatccctgtttctactatctcaatagaagacttggatgccacaagaaagaagaagaacagaacacccactccgaaatcatcgactgctaccaagtgggttcccatcaaggcctccattaccgtctctggcaccaaaagatccggttccaagaatggtgcaagtaatggcaacagcaacaagagcaaaaacaacaaaactgcagcatcgtcgacatcgtcgagtaatgctaacaggaaaaagaagcatcaccaacataatgctaagaagcaacaacaaatgaagaaagatggctttgaatcggcagtaggtgaggaagattcaaaagacgctacctctcaagaaaatggtcaatctacacaacagcaacaaccacctcaccaccgtaatcatcaccacagtcatcaccataacagcaatggtcctcaaaggagaaagttccacaacagtaataacgccggtatgcctcagaaccaaggcttcccaccacagtttaaaccttaccaaggacgcaacgctcgtaataacaacaacaaccgctctaaataccacaaccacttccatcacaaccaacaacatcctcaacaacctatggtcaaattacagcaacagttttatccagtccaaccagtgttaatggccatcaacaacattgctagacaaattgaatactatttcagcgaagaaaacttgaccgtcgacaattacttaaggtccaaactctccaaggatggttttgctccattgtctttaatctctaagttttacagagttgttaacatgtccttcggaggtgacactaacctgattttagccgcattgagagaaattgtcgctaacgaagccgctaccgtcaatgttgcagaaggtactttggccgccaaggaaggtgataacgttaccggtgaagccaaagaaccatctccattggataagtacttcgttcgttccaagagctggtcaaactggttaccagaaacttttgaaactgaaattaatattgaaaaagaactggtcggcgatgcattggaccaattcatgatatccctaccacctgttcctcaacaagaagaggaatcatccactgaactcgcttctcaagaacaagaaaccaaagaagactctgcgccggttgctgccggtgaatccgagtcttccttataa

SEQ ID NO: 1068 - DNA, 1305 bp, Artificial Sequence
  Description of Artificial Sequence: Synthetic polynucleotide
atgtctgctgaaaccgccgccgcaaacactgctactgccccagtcccagaagtgcaagaacaagagagctccaagagcaagcaagtcaacttgacgccggcaccattgcccacatcttccccatggaaacttgctcctactgagatccctgtttctactatctccatagaagacttggatgccacaagaaagaagaagaacagaacacccactccgaaaagctctactgctaccaagtgggttcccatcaaggcctccattaccgtctctggcaccaaaagatccggttccaagaatggtgcaagtaatggcaacagcaacaagagcaaaaacaacaaaactgcagcatcttctacatcttccagtaatgctaacaggaaaaagaagcatcaccaacataatgctaagaagcaacaacaaatgaagaaagatggctttgaaagtgcagtaggtgaggaagattctaaagacgctacctctcaagaaaatggtcaatctacacaacagcaacaaccacctcaccaccgtaatcatcaccacagtcatcaccataacagcaatggtcctcaaaggagaaagttccacaacagtaataacgccggtatgcctcagaaccaaggcttcccaccacagtttaaaccttaccaaggacgcaacgctcgtaataacaacaacaaccgctctaaataccacaaccacttccatcacaaccaacaacatcctcaacaacctatggtcaaattacagcaacagttttatccagtccaaccagtgttaatggccatcaacaacattgctagacaaattgaatactatttcagcgaagaaaacttgaccgtcgacaattacttaaggtccaaactctccaaggatggttttgctccattgtctttaatctctaagttttacagagttgttaacatgtccttcggaggtgacactaacttgattttagccgcattgagagaaattgtcgctaacgaagccgctaccgtcaatgttgcagaaggtactttggccgccaaggaaggtgataacgttaccggtgaagccaaagaaccatctccattggataagtacttcgttcgttccaagagctggagcaactggttaccagaaacttttgaaactgaaattaatattgaaaaagaattggtcggcgatgcattggaccaattcatgatatccttgccacctgttcctcaacaagaagaggaatcttccactgaactcgcttctcaagaacaagaaaccaaagaagactctgcgccggttgctgccggtgaatccgagtcttccttatga

SEQ ID NO: 1069 - DNA, 1701 bp, Saccharomyces cerevisiae
atgcaggttcaaaaaatggtgagagataacagtaataacggtagcgataaaagcgtccattgggagaggaggaataataacggcgcaggcccccgttatcgttccagaagcggtaataccggtgctttggcaacaaaactaagtaatgggacgctctctgtcagaggattagtgaaggaccgaacaggaagcggcaagatcgcgggctgtgtggaggcgtttctggatgccaggacccaattgaatacgccctgggaccgtgctaagtgcaattggctggaccagatagattactatgtacagttgagaaagaccgcgttttctaaggaattggaccaactaaggaagcccatgatcgatgcatatgtggcggagatgaggcagaagtttgatgcctcctatggacaatccagggcgcaattggaagccaaactggcgcaggtggacagtgaatggcatatggtacatggtgatgtgcatgcaaaactggaaaaactcgtggaagaacgccggtttttgaaaagattaagcgacacgatcgtaccacccaggtccaaaagatcacagcggctgtctccattgaccaaagaggaccgagccaactgtatctgtccgcagcccaaaggaatgagcgacaccgcttggttcgaagccattcagaagaaaatgttaggaatgaatggtaccatcaagctcctagagacagaacagaaactactggctgacgagaaaaacagcgtgaggaagacgttctggcccatggtggaagcacattcacgctcgaatgaatttgcttatctggagaaatgcatcaggctgatggcctctcagagagcaatatgcttttgtcttgatatagaggctttcgaaacaaaccagaacgtaatcaccgaaattgggatttcaatttatgaccccagggaaaatatggtgccgtcaatggttccaattacaaagaattaccacctaattatcgaggagtccctggaacttagaaaccaaaaatgggtctgtgactacaaggattgctacttattgggagaaagctatgttttgagcttgaaagagtgcgtgcatttcattcaatcactaataaactattacttggtcccggtgaccgaagaagacaagacatggtcaagggcatttgttggtcatcacgtgagcggggatcttaagtggctggagactattggtgtcaaattccctggcagagggtatgaaggccatctggaccatacgctgcttttggctgaaactcccggtgatctagacgtgttcatcttggacactgagcagttttacaggaaatcgtatggcgaaaagggcagcagtctgggcaagattctgcggttgttcgagataccgcatgcgtttctacacaatgccggtaacgatgcctactataccctgcatttgttcatgaagttttgcgatgttaatttcaggaaaataagcggcatggacgatgttcttaaagtaatgggccaagtaaaagtttggggagaacgagacgtacgagagcctaaagtggtgcccatgtcgtatgccatctccatcgaggaggcagtcaaaaatcggacgtaccgcaagggcgtcaagagcagtaggaaggaaagagtctgccaaacggaattcggtgggttaacgtatttcggaactgctaaagacgccttcacaagcactcttccgacacactaa

SEQ ID NO: 1070 - DNA, 1701 bp, Artificial Sequence
  Description of Artificial Sequence: Synthetic polynucleotide
atgcaggttcaaaaaatggtgagagataacagtaataacggtagcgataaaagcgtccattgggagaggaggaataataacggcgcaggcccccgttatcgttccagaagcggtaataccggtgctttggcaacaaaattaagtaatgggacgctctctgtcagaggattagtgaaggacagaacaggaagcggcaagatcgcgggctgtgtggaggcgtttttggatgccaggacccaattgaatacgccctgggaccgtgctaagtgcaattggttagaccagatagattactatgtacagttgagaaagaccgcgttttctaaggaattggaccaattaaggaagcccatgatcgatgcatatgtggcggagatgaggcagaagtttgatgcctcctatggacaatccagggcgcaattggaagccaaattagcgcaggtggacagtgaatggcatatggtacatggtgatgtgcatgcaaaattagaaaaactcgtggaagaacgcagatttttgaaaagattaagcgacacgatcgtaccacccaggtccaaaagaagccagagattatctccattgaccaaagaggacagagccaactgtatctgtccgcagcccaaaggaatgagcgacaccgcttggttcgaagccattcagaagaaaatgttaggaatgaatggtaccatcaagctcttggagacagaacagaaattattagctgacgagaaaaacagcgtgaggaagacgttctggcccatggtggaagcacattctcgcagtaatgaatttgcttatttggagaaatgcatcaggttgatggcctctcagagagcaatatgcttttgtcttgatatagaggctttcgaaacaaaccagaacgtaatcaccgaaattgggatttccatttatgaccccagggaaaatatggtgccgtctatggttccaattacaaagaattaccacttgattatcgaggagtccttagaacttagaaaccaaaaatgggtctgtgactacaaggattgctacttattgggagaaagctatgttttgagcttgaaagagtgcgtgcatttcattcaatctttgataaactattacttggtcccggtgaccgaagaagacaagacatggagcagggcatttgttggtcatcacgtgagcggggatcttaagtggttggagactattggtgtcaaattccctggcagagggtatgaaggccatttggaccatacgttacttttggctgaaactcccggtgatttggacgtgttcatcttggacactgagcagttttacaggaaaagttatggcgaaaagggcagcagtttgggcaagattttaagattgttcgagataccgcatgcgtttttgcacaatgccggtaacgatgcctactataccttacatttgttcatgaagttttgcgatgttaatttcaggaaaataagcggcatggacgatgttcttaaagtaatgggccaagtaaaagtttggggagaaagagacgtaagagagcctaaagtggtgcccatgtcttatgccatctccatcgaggaggcagtcaaaaatagaacgtaccgcaagggcgtcaagagcagtaggaaggaaagagtctgccaaacggaattcggtgggttaacgtatttcggaactgctaaagacgccttcacaagcactcttccgacacactga

SEQ ID NO: 1071 - DNA, 333 bp, Saccharomyces cerevisiae
atggtatctcaagaaactatcaagcacgtcaaggaccttattgcagaaaacgagatcttcgtcgcatccaaaacgtactgtccatactgccatgcagccctaaacacgctttttgaaaagttaaaggttcccaggtccaaagttctggttttgcaattgaatgacatgaaggaaggcgcagacattcaggctgcgttatatgagattaatggccaaagaaccgtgccaaacatctatattaatggtaaacatattggaggcaacgacgacttgcaggaattgagggagactggtgaattggaggaattgttagaacctattcttgcaaattaa

SEQ ID NO: 1072 - DNA, 333 bp, Artificial Sequence
  Description of Artificial Sequence: Synthetic polynucleotide
atggtatctcaagaaactatcaagcacgtcaaggaccttattgcagaaaacgagatcttcgtcgcatccaaaacgtactgtccatactgccatgcagccttgaacacgctttttgaaaagttaaaggttcccaggtccaaagttttggttttgcaattgaatgacatgaaggaaggcgcagacattcaggctgcgttatatgagattaatggccaaagaaccgtgccaaacatctatattaatggtaaacatattggaggcaacgacgacttgcaggaattgagggagactggtgaattggaggaattgttagaacctattcttgcaaattga

SEQ ID NO: 1073 - DNA, 1065 bp, Saccharomyces cerevisiae
atggggtttctttcggatcatccgcatacagctatcaccgagacgatctttcgaattgtctcttcaagggactatacgctagaagtggagttagctcccttgattcagcttatcaaagcagatcacaacgattataactataccgtgaaccaagaagaagctgcgcgagcacttagaaagaaaataaagtatgggaaccggctgcagcagtccaggactctggacctcttggatctgttcatctcacaaggcgtgaagtttacagtcatgtacaatgatgacaagctgctgcaaaggctgagagggatggctacgaactctgaaaacagcgggtccggtgaaaagtatgagcctaggattattaagaagtgcgcggcgtatgctatctcgtggctaaactatattacgcagaacaaccttgagaatgcgagggcgtattcaggtctttatcaattgggtcaaacagtcaaacagaggtactcgaagagcagccgttcccgccgtagcggcggaggctctggcggacggtctaacttcatggatgatagcgccgacgacactttgtaccagtccaactcgctgactagtgccgatagattgtataggattccacagatcaacatgaacaaagaggcacccaggattcggctcataatcagcgatgctctcgcgtctgctgtgtcgttacagaactcgctgatcgggctgcccaagggcaagttctccacagacgatgaagaggccacgtccaagttcatccaggcaagggcgatcagaaggaaagttcttagatatctgcaattggtcacggagggtgagtttctgggtagcttaattcatgccaatgatgaactggtggctgcgttgactgcatacgacgaccgaagcgctcaggacgatagcagcgatgaaagtgatcacggctcgtacgatgacggtatttatgatgaaaacgagcaggataacagcaggtatattgatagcgagtcctcagaggaagagagcttgtcttcttatcagccgtccacgatctcaaaccctttcggtgatcataacaaaatttga

SEQ ID NO: 1074 - DNA, 1065 bp, Artificial Sequence
  Description of Artificial Sequence: Synthetic polynucleotide
atggggtttctttctgatcatccgcatacagctatcaccgagacgatctttagaattgtctcttccagggactatacgttagaagtggagttagctcccttgattcagcttatcaaagcagatcacaacgattataactataccgtgaaccaagaagaagctgcgcgtgcacttagaaagaaaataaagtatgggaacagattacagcagtccaggactttggacctcttggatcttttcatctctcaaggcgtgaagtttacagtcatgtacaatgatgacaagttattacaaaggttaagagggatggctacgaactctgaaaacagcgggtccggtgaaaagtatgagcctaggattattaagaagtgcgcggcgtatgctatcagttggttgaactatattacgcagaacaaccttgagaatgcgagggcgtattctggtctttatcaattgggtcaaacagtcaaacagaggtactccaagagcagccgttcccgccgtagcggcggaggctctggcggaagatctaacttcatggatgatagcgccgacgacactttgtaccagtccaactctttgactagtgccgatagattgtataggattccacagatcaacatgaacaaagaggcacccaggattagactcataatcagcgatgctctcgcgtctgctgtgtctttacagaactctttgatcgggcttcccaagggcaagttctccacagacgatgaagaggccacgtccaagttcatccaggcaagggcgatcagaaggaaagttcttagatatttacaattggtcacggagggtgagtttttaggtagcttaattcatgccaatgatgaattagtggctgcgttgactgcatacgacgacagaagcgctcaggacgatagcagcgatgaaagtgatcacggctcttacgatgacggtatttatgatgaaaacgagcaggataacagcaggtatattgatagcgagtcctctgaggaagagagcttgtcttcttatcagccgtccacgatctccaaccctttcggtgatcataacaaaatttga

SEQ ID NO: 1075 - DNA, 507 bp, Saccharomyces cerevisiae
atgaataagtggagcaggctgtacgttataactgtacgcaggacttttccagggagaagaaacattgtactgacgcagtactggaataagagcaagaaaatgagtgacgaatcgaatgacgtgaagtggaacgatgccctgacaccattgcagctgatggtgctgagagataaggccactgaaaggcccaacaccggtgcgtatttacacaccaacgagtccggtgtctaccattgtgccaactgcgacagaccgttgtattcgagcaaggccaagttcgacgctcgttgtggatggcccgcattctacgaagaggtatcccctggagccatcacatatcatcgtgacaattctttaatgcctgcgagggtggagatatgttgtgcaaggtgtggtggacacttgggacatgtgtttgaaggtgaaggctggaaacagttgctaaacttgcccaaggacaccagacactgtgtgaacagtgcgtctttaaacctcaagaaggattaa

SEQ ID NO: 1076 - DNA, 507 bp, Artificial Sequence
  Description of Artificial Sequence: Synthetic polynucleotide
atgaataagtggagcaggttgtacgttataactgtacgcaggacttttccagggagaagaaacattgtattgacgcagtactggaataagagcaagaaaatgagtgacgaaagtaatgacgtgaagtggaacgatgccttaacaccattgcagttgatggtgttgagagataaggccactgaaaggcccaacaccggtgcgtatttacacaccaacgagtccggtgtctaccattgtgccaactgcgacagaccgttgtattctagcaaggccaagttcgacgctcgttgtggatggcccgcattctacgaagaggtatcccctggagccatcacatatcatcgtgacaattctttaatgcctgcgagggtggagatatgttgtgcaaggtgtggtggacacttgggacatgtgtttgaaggtgaaggctggaaacagttgttgaacttgcccaaggacaccagacactgtgtgaacagtgcgtctttaaacctcaagaaggattga

SEQ ID NO: 1077 - DNA, 1041 bp, Saccharomyces cerevisiae
atggaggacggtaaacaggccatcaatgagggatcaaacgatgcttcgccggatctggacgtgaatggcacaatattgatgaataatgaagacttttcccagtggtcggttgatgatgtgataacttggtgtatatccacgctggaggtggaagaaaccgatccattatgtcagagactgcgagaaaatgatattgtaggagatcttttgccggaattgtgcttgcaagattgccaggacttgtgtgacggtgatttgaataaggccataaaattcaagatactgatcaataagatgagagacagcaagttggagtggaaggacgacaagactcaagaggacatgataacggtactgaaaaacttgtacactactacatctgcgaaattgcaagaatttcaatcgcagtacacaaggctgaggatggatgtcttggacgtaatgaagaccagctcaagctcttctccgattaacacacatggagtgtccactacggtaccttcttcaaacaacacaattatacccagtagtgacggtgtgtctctttcacaaacagactatttcgacacagttcataaccgacaatcaccgtcaaggagagaatccccggtaacggtatttaggcaacccagtctttcccactcaaaatctttgcacaaggatagcaaaaacaaagtaccccaaatatctacaaaccaatctcacccatctgccgtttcaacagcgaacacaccggggccatcacctaacgaggcgttaaaacagttgcgtgcatctaaagaagactcctgcgaacggatcttgaaaaacgcaatgaaaagacataacttagcagatcaggattggagacaatatgtcttggtcatttgctatggggatcaagagaggctgttagaattgaacgaaaagcctgtgatcatattcaagaacttaaagcaacagggtttgcaccccgccattatgttaagaagaagaggtgatttcgaagaagtagcaatgatgaacggaagtgacaatgtcacccccggtggaagactctaa

SEQ ID NO: 1078 - DNA, 1041 bp, Artificial Sequence
  Description of Artificial Sequence: Synthetic polynucleotide
atggaggacggtaaacaggccatcaatgagggaagtaacgatgcttctccggatttggacgtgaatggcacaatattgatgaataatgaagacttttcccagtggtctgttgatgatgtgataacttggtgtatatccacgttggaggtggaagaaaccgatccattatgtcagagattaagagaaaatgatattgtaggagatcttttgccggaattgtgcttgcaagattgccaggacttgtgtgacggtgatttgaataaggccataaaattcaagatattgatcaataagatgagagacagcaagttggagtggaaggacgacaagactcaagaggacatgataacggtattgaaaaacttgtacactactacatctgcgaaattgcaagaatttcaatctcagtacacaaggttgaggatggatgtcttggacgtaatgaagaccagcagcagctcttctccgattaacacacatggagtgtccactacggtaccttcttccaacaacacaattatacccagtagtgacggtgtgtctctttctcaaacagactatttcgacacagttcataacagacaatctccgtctaggagagaatccccggtaacggtatttaggcaacccagtctttcccactctaaatctttgcacaaggatagcaaaaacaaagtaccccaaatatctacaaaccaatctcacccatctgccgtttctacagcgaacacaccggggccatctcctaacgaggcgttaaaacagttgcgtgcatctaaagaagactcctgcgaaagaatcttgaaaaacgcaatgaaaagacataacttagcagatcaggattggagacaatatgtcttggtcatttgctatggggatcaagagaggttattagaattgaacgaaaagcctgtgatcatattcaagaacttaaagcaacagggtttgcaccccgccattatgttaagaagaagaggtgatttcgaagaagtagcaatgatgaacggaagtgacaatgtcacccccggtggaagactctga

SEQ ID NO: 1079 - DNA, 894 bp, Saccharomyces cerevisiae
atgggtattgaagacattagcgccatgaagaacgggtttatagtggtgccgttcaaattaccggatcacaaggcactacccaaaagccaggaagcttcgttgcatttcatgtttgctaaaagacaccagagttcaaattccaacgagtctgactgtttgtttttggtcaaccttccattattatctaacatagagcacatgaagaaatttgtcgggcagctctgtgggaaatacgatacagtatcgcatgtagaggaactactatataacgatgaatttggattacatgaagtagatttatcggcattgacctccgatctgatgtcctccactgacgtcaacgagaagagatacacaccaagaaacacggcgctattaaaatttgttgatgctgcaagtataaataactgctggaatgctttgaaaaaatactcgaatttgcatgccaaacatccaaatgaactatttgaatggacatatacgactccatcattcacaacttttgttaacttctacaaaccactggatattgattatttgaaagaagatattcatacacatatggcaatttttgaacagcgtgaagctcaagcacaagaggatgttcaaagttctatagtggatgaggatggattcacattagttgtaggaaagaacaccaagtcattgaattccataagaaagaaaatattaaacaaaaatccattatccaaacatgaaaataaggccaagccaatttcaaatatagataaaaaggcaaagaaagatttctatagatttcaggtcagagaacgtaaaaaacaggagatcaatcaactgttaagtaaatttaaggaagatcaagaaagaatcaaggtaatgaaagctaagagaaaattcaatccatacacttaa

SEQ ID NO: 1080 - DNA, 894 bp, Artificial Sequence
  Description of Artificial Sequence: Synthetic polynucleotide
atgggtattgaagacattagcgccatgaagaacgggtttatagtggtgccgttcaaattaccggatcacaaggcattgcccaaaagccaggaagcttctttgcatttcatgtttgctaaaagacaccagagtagtaattccaacgagtctgactgtttgtttttggtcaaccttccattattatctaacatagagcacatgaagaaatttgtcgggcagctctgtgggaaatacgatacagtatctcatgtagaggaattattatataacgatgaatttggattacatgaagtagatttaagtgcattgacctccgatttgatgtcctccactgacgtcaacgagaagagatacacaccaagaaacacggcgttattaaaatttgttgatgctgcaagtataaataactgctggaatgctttgaaaaaatactctaatttgcatgccaaacatccaaatgaattatttgaatggacatatacgactccatctttcacaacttttgttaacttctacaaaccattagatattgattatttgaaagaagatattcatacacatatggcaatttttgaacagcgtgaagctcaagcacaagaggatgttcaaagttctatagtggatgaggatggattcacattagttgtaggaaagaacaccaagtctttgaattccataagaaagaaaatattaaacaaaaatccattatccaaacatgaaaataaggccaagccaatttctaatatagataaaaaggcaaagaaagatttctatagatttcaggtcagagaacgtaaaaaacaggagatcaatcaattattaagtaaatttaaggaagatcaagaaagaatcaaggtaatgaaagctaagagaaaattcaatccatacacttga

SEQ ID NO: 1081 - DNA, 2400 bp, Saccharomyces cerevisiae
atggttttgccgattctaccgttaattgatgatctggcctcatggaatagtaagaaggaatacgtttcacttgttggtcaggtacttttggatggctcgagcctgagtaatgaagagattctccagttctccaaagaggaagaagttccattggtggctttgtccttgccaagtggtaaattcagcgatgatgaaatcattgccttcttgaacaacggagtttcttctctgttcattgctagccaagatgctaaaacagccgaacacttggttgaacaattgaatgtaccaaaggagcgtgttgttgtggaagagaacggtgttttctccaatcaattcatggtaaaacaaaaattctcgcaagataaaattgtgtccataaagaaattaagcaaggatatgttgaccaaagaagtgcttggtgaagtacgtacagaccgtcctgacggtttatataccaccctagttgtcgaccaatatgagcgttgtctagggttggtgtattcttcgaagaaatctatagcaaaggccatcgatttgggtcgtggcgtttattattctcgttctaggaatgaaatctggatcaagggtgaaacttctggcaatggccaaaagcttttacaaatctctactgactgtgattcggatgccttaaagtttatcgttgaacaagaaaacgttggattttgccacttggagaccatgtcttgctttggtgaattcaagcatggtttggtggggctagaatctttactaaaacaaaggctacaggacgctccagaggaatcttatactagaagactattcaacgactctgcattgttagatgccaagatcaaggaagaagctgaagaactgactgaggcaaagggtaagaaggagctttcttgggaggctgccgatttgttctactttgcactggccaaattagtggccaacgatgtttcattgaaggacgtcgagaataatctgaatatgaagcatctgaaggttacaagacggaaaggtgatgctaagccaaagtttgttggacaaccaaaggctgaagaagaaaaactgaccggtccaattcacttggacgtggtgaaggcttccgacaaagttggtgtgcagaaggctttgagcagaccaatccaaaagacttctgaaattatgcatttagtcaatccgatcatcgaaaatgttagagacaaaggtaactctgcccttttggagtacacagaaaagtttgatggtgtaaaattatccaatcctgttcttaatgctccattcccagaagaatactttgaaggtttaaccgaggaaatgaaggaagctttggacctttcaattgaaaacgtccgcaaattccatgctgctcaattgccaacagagactcttgaagttgaaacccaacctggtgtcttgtgttccagattccctcgtcctattgaaaaagttggtttgtatatccctggtggcactgccattttaccaagtactgcattaatgcttggtgttccagcacaagttgcccaatgtaaggagattgtgtttgcatctccaccaagaaaatctgatggtaaagtttcacccgaagttgtttatgtcgcagaaaaagttggcgcttccaagattgttctagctggtggtgcccaagccgttgctgctatggcttacgggacagaaactattcctaaagtggataagatcttgggtccaggtaatcaatttgtgactgccgccaaaatgtatgttcaaaatgacactcaagctctatgttccattgatatgccagctggcccaagtgaagttttggttattgccgatgaagatgccgatgtggattttgttgcaagtgatttgctatcgcaagctgaacacggtattgactcccaagttatccttgttggtgttaacttgagcgaaaagaaaattcaagagattcaagatgctgtccacaatcaagctttacaactgccacgtgtggatattgttcgtaaatgtattgctcacagtacgatcgttctttgtgacggttacgaagaagcccttgaaatgtccaaccaatatgcaccagaacatttgattctacaaatcgccaatgctaacgattatgttaaattggttgacaatgcagggtccgtatttgtgggtgcttacactccagaatcgtgcggtgactattcaagtggtactaaccatacattaccaacctatggttacgctaggcagtacagtggtgccaacactgcaaccttccaaaagtttatcactgcccaaaacattacccctgaaggtttagaaaacatcggtagagctgttatgtgcgttgccaagaaggagggtctagacggtcacagaaacgctgtgaaaatcagaatgagtaagcttgggttgatcccaaaggatttccagtag

SEQ ID NO: 1082 - DNA, 2400 bp, Artificial Sequence
  Description of Artificial Sequence: Synthetic polynucleotide
atggttttgccgattttaccgttaattgatgatttggccagttggaatagtaagaaggaatacgtttcccttgttggtcaggtacttttggatggcagtagcttaagtaatgaagagattctccagttctccaaagaggaagaagttccattggtggctttgtccttgccaagtggtaaattcagcgatgatgaaatcattgccttcttgaacaacggagtttcttctttattcattgctagccaagatgctaaaacagccgaacacttggttgaacaattgaatgtaccaaaggagcgtgttgttgtggaagagaacggtgttttctccaatcaattcatggtaaaacaaaaattctctcaagataaaattgtgtccataaagaaattaagcaaggatatgttgaccaaagaagtgcttggtgaagtacgtacagaccgtcctgacggtttatataccaccttggttgtcgaccaatatgagcgttgtttagggttggtgtattcttccaagaaatctatagcaaaggccatcgatttgggtcgtggcgtttattattctcgttctaggaatgaaatctggatcaagggtgaaacttctggcaatggccaaaagcttttacaaatctctactgactgtgattctgatgccttaaagtttatcgttgaacaagaaaacgttggattttgccacttggagaccatgtcttgctttggtgaattcaagcatggtttggtggggttggaatctttattgaaacaaaggttacaggacgctccagaggaatcttatactagaagattattcaacgactctgcattgttagatgccaagatcaaggaagaagctgaagaattgactgaggcaaagggtaagaaggagctttcttgggaggctgccgatttgttctactttgcattggccaaattagtggccaacgatgtttctttgaaggacgtcgagaataatttgaatatgaagcatttgaaggttacaagaagaaaaggtgatgctaagccaaagtttgttggacaaccaaaggctgaagaagaaaaattgaccggtccaattcacttggacgtggtgaaggcttccgacaaagttggtgtgcagaaggctttgagcagaccaatccaaaagacttctgaaattatgcatttagtcaatccgatcatcgaaaatgttagagacaaaggtaactctgcccttttggagtacacagaaaagtttgatggtgtaaaattatccaatcctgttcttaatgctccattcccagaagaatactttgaaggtttaaccgaggaaatgaaggaagctttggacctttctattgaaaacgtccgcaaattccatgctgctcaattgccaacagagactcttgaagttgaaacccaacctggtgtcttgtgttccagattccctcgtcctattgaaaaagttggtttgtatatccctggtggcactgccattttaccaagtactgcattaatgcttggtgttccagcacaagttgcccaatgtaaggagattgtgtttgcatctccaccaagaaaatctgatggtaaagtttctcccgaagttgtttatgtcgcagaaaaagttggcgcttccaagattgttttggctggtggtgcccaagccgttgctgctatggcttacgggacagaaactattcctaaagtggataagatcttgggtccaggtaatcaatttgtgactgccgccaaaatgtatgttcaaaatgacactcaagctctttgttccattgatatgccagctggcccaagtgaagttttggttattgccgatgaagatgccgatgtggattttgttgcaagtgatttgctttctcaagctgaacacggtattgactcccaagttatccttgttggtgttaacttgagcgaaaagaaaattcaagagattcaagatgctgtccacaatcaagctttacaattaccacgtgtggatattgttcgtaaatgtattgctcacagtacgatcgttctttgtgacggttacgaagaagcccttgaaatgtccaaccaatatgcaccagaacatttgattttacaaatcgccaatgctaacgattatgttaaattggttgacaatgcagggtccgtatttgtgggtgcttacactccagaaagttgcggtgactattctagtggtactaaccatacattaccaacctatggttacgctaggcagtacagtggtgccaacactgcaaccttccaaaagtttatcactgcccaaaacattacccctgaaggtttagaaaacatcggtagagctgttatgtgcgttgccaagaaggagggtttggacggtcacagaaacgctgtgaaaatcagaatgagtaagcttgggttgatcccaaaggatttccagtga

SEQ ID NO: 1083 - DNA, 1323 bp, Saccharomyces cerevisiae
atggatagatatcaaagaaagataggatgtttcatacaaatcccaaatttggggcgcggacaactgaaatacgtgggtccagtggacacgaaagctggaatgtttgctggtgtagacttacttgccaacattggtaagaacgatggatcattcatggggaagaagtattttcaaacggagtatcctcaaagtggactatttattcagttgcaaaaagtcgcatcattgatcgagaaggcatcgatatcgcaaacctcgagaagaacgacaatggaaccgctatcaatacccaaaaacagatctattgtgaggctcactaaccagttctctcccatggatgatcctaaatcccccacacccatgagaagtttccggatcaccagtcggcacagcggtaatcaacagtcgatggaccaggaggcatcggatcaccatcaacagcaagaatttggttacgataacagagaagacagaatggaggtcgactctatcctgtcatcagacagaaaggctaatcacaacaccaccagcgattggaaaccggacaatggccacatgaatgacctcaatagcagcgaagttacaattgaattacgagaagcccaattgaccatcgaaaagctacaaaggaaacaactacactacaaaaggctactcgatgaccaaagaatggtcctcgaagaagtgcaaccgacttttgataggtatgaagccacaatacaagaaagagagaaagagatagaccatctcaagcaacaattggagctcgaacgcagacagcaagccaaacaaaagcagttttttgacgctgagaatgaacagctacttgctgtcgtaagccaactacacgaagagatcaaagaaaacgaagagagaaatctttctcataatcaacccactggtgccaacgaagatgtcgaactcctgaaaaaacagctggaacaattacgcaacatagaagaccaatttgagttacacaagacaaagtgggctaaagaacgcgaacaattgaaaatgcataacgattcgctcagtaaagaataccaaaatttgagcaaggaactatttttgacaaaaccacaagattcctcatcggaagaggtggcatccttaacgaaaaaacttgaagaggctaatgaaaaaatcaaacagttggaacaggctcaagcacaaacagccgtggaatcgttgccaattttcgacccccctgcaccagtcgataccacggcaggaagacaacagtggtgtgagcattgcgatacgatgggtcataatacagcagaatgcccccatcacaatcctgacaaccagcagttcttctag

SEQ ID NO: 1084 - DNA, 1323 bp, Artificial Sequence
  Description of Artificial Sequence: Synthetic polynucleotide
atggatagatatcaaagaaagataggatgtttcatacaaatcccaaatttggggcgcggacaattgaaatacgtgggtccagtggacacgaaagctggaatgtttgctggtgtagacttacttgccaacattggtaagaacgatggaagtttcatggggaagaagtattttcaaacggagtatcctcaaagtggattatttattcagttgcaaaaagtcgcaagtttgatcgagaaggcatctatatctcaaacctccagaagaacgacaatggaaccgttatctatacccaaaaacagatctattgtgaggctcactaaccagttctctcccatggatgatcctaaatcccccacacccatgagaagtttcagaatcaccagtagacacagcggtaatcaacagtccatggaccaggaggcatctgatcaccatcaacagcaagaatttggttacgataacagagaagacagaatggaggtcgactctatcttatcttctgacagaaaggctaatcacaacaccaccagcgattggaaaccggacaatggccacatgaatgacctcaatagcagcgaagttacaattgaattaagagaagcccaattgaccatcgaaaagttacaaaggaaacaattacactacaaaaggttactcgatgaccaaagaatggtcctcgaagaagtgcaaccgacttttgataggtatgaagccacaatacaagaaagagagaaagagatagaccatctcaagcaacaattggagctcgaacgcagacagcaagccaaacaaaagcagttttttgacgctgagaatgaacagttacttgctgtcgtaagccaattacacgaagagatcaaagaaaacgaagagagaaatctttctcataatcaacccactggtgccaacgaagatgtcgaactcttgaaaaaacagttagaacaattacgcaacatagaagaccaatttgagttacacaagacaaagtgggctaaagaacgcgaacaattgaaaatgcataacgattctctcagtaaagaataccaaaatttgagcaaggaattatttttgacaaaaccacaagattcctcttctgaagaggtggcatccttaacgaaaaaacttgaagaggctaatgaaaaaatcaaacagttggaacaggctcaagcacaaacagccgtggaatctttgccaattttcgacccccctgcaccagtcgataccacggcaggaagacaacagtggtgtgagcattgcgatacgatgggtcataatacagcagaatgcccccatcacaatcctgacaaccagcagttcttctga

SEQ ID NO: 1085 - DNA, 1218 bp, Saccharomyces cerevisiae
atggatacggataagttaatctcagaggctgagtctcatttttctcaaggaaaccatgcagaagctgttgcgaagttgacatccgcagctcagtcgaaccccaatgacgagcaaatgtcaactattgaatcattaattcaaaaaatcgcaggatacgtcatggacaaccgtagtggtggtagtgacgcctcgcaagatcgtgctgctggtggtggttcatcttttatgaacactttaatggcagactctaagggttcttcccaaacgcaactaggaaaactagctttgttagccacagtgatgacacactcatcaaataaaggttcttctaacagagggtttgacgtagggactgtcatgtcaatgctaagtggttctggcggcgggagccaaagtatgggtgcttccggcctggctgccttggcttctcaattctttaagtcaggtaacaattcccaaggtcagggacaaggtcaaggtcaaggtcaaggtcaaggacaaggtcaaggtcaaggttcttttactgctttggcgtctttggcttcatctttcatgaattccaacaacaataatcagcaaggtcaaaatcaaagctccggtggttcctcctttggagcactggcttctatggcaagctcttttatgcattccaataataatcagaactccaacaatagtcaacagggctataaccaatcctatcaaaacggtaaccaaaatagtcaaggttacaataatcaacagtaccaaggtggcaacggtggttaccaacaacaacagggacaatctggtggtgctttttcctcattggcctccatggctcaatcttacttaggtggtggacaaactcaatccaaccaacagcaatacaatcaacaaggccaaaacaaccagcagcaataccagcaacaaggccaaaactatcagcatcaacaacagggtcagcagcagcaacaaggccactccagttcattctcagctttggcttccatggcaagttcctacctgggcaataactccaattcaaattcgagttatgggggccagcaacaggctaatgagtatggtagaccgcaacagaatggtcaacagcaatccaatgagtacggaagaccgcaatacggcggaaaccagaactccaatggacagcacgaatccttcaatttttctggcaacttttctcaacagaacaataacggcaaccagaaccgctactga

SEQ ID NO: 1086 - DNA, 1218 bp, Artificial Sequence
  Description of Artificial Sequence: Synthetic polynucleotide
atggatacggataagttaatctctgaggctgagtctcatttttctcaaggaaaccatgcagaagctgttgcgaagttgacatccgcagctcagtccaaccccaatgacgagcaaatgtctactattgaatctttaattcaaaaaatcgcaggatacgtcatggacaaccgtagtggtggtagtgacgcctctcaagatcgtgctgctggtggtggttcttcttttatgaacactttaatggcagactctaagggttcttcccaaacgcaattaggaaaattggctttgttagccacagtgatgacacactcttccaataaaggttcttctaacagagggtttgacgtagggactgtcatgtccatgttaagtggttctggcggcgggagccaaagtatgggtgcttccggcttagctgccttggcttctcaattctttaagtctggtaacaattcccaaggtcagggacaaggtcaaggtcaaggtcaaggtcaaggacaaggtcaaggtcaaggttcttttactgctttggcgtctttggcttcttctttcatgaattccaacaacaataatcagcaaggtcaaaatcaaagctccggtggttcctcctttggagcattggcttctatggcaagctcttttatgcattccaataataatcagaactccaacaatagtcaacagggctataaccaatcctatcaaaacggtaaccaaaatagtcaaggttacaataatcaacagtaccaaggtggcaacggtggttaccaacaacaacagggacaatctggtggtgctttttcctctttggcctccatggctcaatcttacttaggtggtggacaaactcaatccaaccaacagcaatacaatcaacaaggccaaaacaaccagcagcaataccagcaacaaggccaaaactatcagcatcaacaacagggtcagcagcagcaacaaggccactccagttctttcagtgctttggcttccatggcaagttcctacttgggcaataactccaatagtaatagtagttatgggggccagcaacaggctaatgagtatggtagaccgcaacagaatggtcaacagcaatccaatgagtacggaagaccgcaatacggcggaaaccagaactccaatggacagcacgaatccttcaatttttctggcaacttttctcaacagaacaataacggcaaccagaaccgctactga

SEQ ID NO: 1087 - DNA, 1539 bp, Saccharomyces cerevisiae
atggtagcaacaataatgcagacgacaacaactgtgctgacgacagtcgccgcaatgtctactaccttagcatcaaattacatatcttcgcaagctagttcctcgacgagtgtaacaacagtaacgacaatagcgacatcaatacgctctacaccgtctaatctactcttttctaatgtggcggctcagccaaaatcatcttcagcaagcacaattgggctttcaatcggacttcccatcggaatattctgtttcggattacttatccttttgtgttatttctaccttaaaaggaattcggtgtccatttcaaatccacccatgtcagctacgattccaagggaagaggaatattgtcgccgcactaattggttctcacggttattttggcagagtaagtgtgaggatcagaattcatattctaatcgtgatattgagaagtataacgacacccagtggacctcgggtgataacatgtcttcaaaaatacagtacaaaatttccaaacccataataccgcagcatatactgacacctaagaaaacggtgaagaacccatatgcttggtctggtaaaaacatttcgttagaccccaaagtgaacgaaatggaggaagagaaagttgtggatgcattcctgtatactaaaccaccgaatattgtccatattgaatccagcatgccctcgtataatgatttaccttctcaaaaaacggtgtcctcaaagaaaactgcgttaaaaacgagtgagaaatggagttacgaatctccactatctcgatggttcttgaggggttctacatactttaaggattatggcttatcaaagacctctttaaagaccccaactggggctccacaactgaagcaaatgaaaatgctctcccggataagtaagggttacttcaatgagtcagatataatgcctgacgaacgatcgcccatcttggagtataataacacgcctctggatgcaaatgacagtgtgaataacttgggtaataccacgccagattcacaaatcacatcttatcgcaacaataacatcgatctaatcacggcaagaccccattcagtgatatacggtactactgcacaacaaactttggaaaccaacttcaatgatcatcatgactgcaataaaagcactgagaaacacgagttgataatacccaccccatcaaaaccactaaagaaaaggaaaaaaagaagacaaagtaaaatgtatcagcatttacaacatttgtcacgttctaaaccattgccgcttactccaaactccaaatataatggggaggctagcgtccaattagggaagacatatacagttattcaggattacgagcctagattgacagacgaaataagaatctcgctgggtgaaaaagttaaaattctggccactcataccgatggatggtgtctggtagaaaagtgtaatacacaaaagggttctattcacgtcagtgttgacgataaaagatacctcaatgaagatagaggcattgtgcctggtgactgtctccaagaatacgactga

SEQ ID NO: 1088 - DNA, 1539 bp, Artificial Sequence
  Description of Artificial Sequence: Synthetic polynucleotide
atggtagcaacaataatgcagacgacaacaactgtgttaacgacagtcgccgcaatgtctactaccttagcatctaattacatatcttctcaagctagttcctctacgagtgtaacaacagtaacgacaatagcgacatctatacgctctacaccgtctaatttactcttttctaatgtggcggctcagccaaaatcttcttctgcaagcacaattgggctttctatcggacttcccatcggaatattctgtttcggattacttatccttttgtgttatttctaccttaaaaggaattctgtgtccatttctaatccacccatgtctgctacgattccaagggaagaggaatattgtcgccgcactaattggttcagtaggttattttggcagagtaagtgtgaggatcagaattcttattctaatcgtgatattgagaagtataacgacacccagtggacctctggtgataacatgtcttctaaaatacagtacaaaatttccaaacccataataccgcagcatatattaacacctaagaaaacggtgaagaacccatatgcttggtctggtaaaaacatttctttagaccccaaagtgaacgaaatggaggaagagaaagttgtggatgcattcctctatactaaaccaccgaatattgtccatattgaatccagcatgccctcttataatgatttaccttctcaaaaaacggtgtcctccaagaaaactgcgttaaaaacgagtgagaaatggagttacgaatctccattatctcgttggttcttgaggggttctacatactttaaggattatggcttatccaagacctctttaaagaccccaactggggctccacaattgaagcaaatgaaaatgctctccagaataagtaagggttacttcaatgagtctgatataatgcctgacgaaagatctcccatcttggagtataataacacgcctttggatgcaaatgacagtgtgaataacttgggtaataccacgccagattctcaaatcacatcttatcgcaacaataacatcgatttgatcacggcaagaccccattctgtgatatacggtactactgcacaacaaactttggaaaccaacttcaatgatcatcatgactgcaataaaagcactgagaaacacgagttgataatacccaccccatctaaaccattgaagaaaaggaaaaaaagaagacaaagtaaaatgtatcagcatttacaacatttgtctcgttctaaaccattgccgcttactccaaactccaaatataatggggaggctagcgtccaattagggaagacatatacagttattcaggattacgagcctagattgacagacgaaataagaatctctttgggtgaaaaagttaaaattttagccactcataccgatggatggtgtttggtagaaaagtgtaatacacaaaagggttctattcacgtcagtgttgacgataaaagatacctcaatgaagatagaggcattgtgcctggtgactgtctccaagaatacgactga

SEQ ID NO: 1089 - DNA, 582 bp, Saccharomyces cerevisiae
atgtctgctgttgcaacttatttgaaaactttaactgctcgtcgtactatttacgctttgaaaccggagttacctggtgaaattactatcaacgacatccaatccgtcgtccaaaccatcattaaagaaacacccaccgctttcaactcccagccaaatcgcgctgttatcttgactggtgaaactcacaaaaaagtttgggacgaagtgactaaggctatagaaagccctgccggtcaaaagaggcctgcttcagcaagggatgaggcctttggttctgtaatcttcttcaccgacgacaaggtaactgaaaagctaaaggctgacttcccagcgtacgcagctgcattccctagtttcgcggaccatacctctggtgccgctcaaatcaactcgtgggttgccttggaggcaatgggcctgggtggtcacctacaacactacaatggttacataaaagctgctttgccaagcaaaatccctgagtcttggaccgtacaagctcaattagtcttcggtaccccagccgcacctccaggtgaaaagacctacatcaaaaacgatgttgaaatcttcaattaa

SEQ ID NO: 1090 - DNA, 582 bp, Artificial Sequence
  Description of Artificial Sequence: Synthetic polynucleotide
atgtctgctgttgcaacttatttgaaaactttaactgctcgtcgtactatttacgctttgaaaccggagttacctggtgaaattactatcaacgacatccaatccgtcgtccaaaccatcattaaagaaacacccaccgctttcaactcccagccaaatcgcgctgttatcttgactggtgaaactcacaaaaaagtttgggacgaagtgactaaggctatagaaagccctgccggtcaaaagaggcctgcttctgcaagggatgaggcctttggttctgtaatcttcttcaccgacgacaaggtaactgaaaagttgaaggctgacttcccagcgtacgcagctgcattccctagtttcgcggaccatacctctggtgccgctcaaatcaacagttgggttgccttggaggcaatgggcttgggtggtcacttgcaacactacaatggttacataaaagctgctttgccaagcaaaatccctgagtcttggaccgtacaagctcaattagtcttcggtaccccagccgcacctccaggtgaaaagacctacatcaaaaacgatgttgaaatcttcaattga

SEQ ID NO: 1091 - DNA, 582 bp, Saccharomyces cerevisiae
atgtccccaactggaaactacttaaacgctattacaaaccgtcgtaccatctacaatttgaagcccgaattaccacaaggtgtcggtttggatgatgtaaagagaactgtacacgttattctcaagaatacgccaacagcttttaactcacaagtgaatcgcgctgtcattatcgttggtgatacacacaaaaggatatgggatgctgttgcgagcgcaatgccaactgctgaagccaagaagagaccagagtcttgcagagatgaggcttacggttcagtcattttcttcactgatgaaggaccaactgaaaaactgcaaagagattttccagccttggcagccgctttcccaacatgcgccgctcatacgaccggtgctgtgcaaattcagtcttggactgccctcgaactattgggattgggggctaatttgcaacactataatgactacgtcaaatctgctttgcctcaagatgttcctattgcgtggactgtacaatctcaattggtctttggtgttccaactgccttgccagaagaaaagacttttatcaataacgtaatcaacgtttatcactga

SEQ ID NO: 1092 - DNA, 582 bp, Artificial Sequence
  Description of Artificial Sequence: Synthetic polynucleotide
atgtccccaactggaaactacttaaacgctattacaaaccgtcgtaccatctacaatttgaagcccgaattaccacaaggtgtcggtttggatgatgtaaagagaactgtacacgttattctcaagaatacgccaacagcttttaactctcaagtgaatcgcgctgtcattatcgttggtgatacacacaaaaggatatgggatgctgttgcgagcgcaatgccaactgctgaagccaagaagagaccagagtcttgcagagatgaggcttacggttctgtcattttcttcactgatgaaggaccaactgaaaaattacaaagagattttccagccttggcagccgctttcccaacatgcgccgctcatacgaccggtgctgtgcaaattcagtcttggactgccctcgaattattgggattgggggctaatttgcaacactataatgactacgtcaaatctgctttgcctcaagatgttcctattgcgtggactgtacaatctcaattggtctttggtgttccaactgccttgccagaagaaaagacttttatcaataacgtaatcaacgtttatcactga

SEQ ID NO: 1093 - DNA, 1902 bp, Saccharomyces cerevisiae
atgtcgtcgtcgaagtctctatacgaactgaaagacttgaaaaatagctccacagaaatacatgccacggggcaggataatgaaattgaatatttcgaaacaggctccaatgaccgtccatcctcacaacctcatttaggttacgaacagcataacacttctgccgtgcgtaggtttttcgactcctttaaaagagcggatcagggtccacaggatgaagtagaagcaacacaaatgaacgatcttacgtcggctatctcaccttcttctagacaggctcaagaactagaaaaaaatgaaagttcggacaacataggcgctaatacaggtcataagtcggactcgctgaagaaaaccattcagcctagacatgttctgatgattgcgttgggtacgggtatcggtactgggttattggtcggtaacggtaccgcgttggttcatgcgggtccagctggactacttattggttacgctattatgggttctatcttgtactgtattattcaagcatgtggtgaaatggcgctagtgtatagtaacttgactggtggctacaatgcataccccagtttccttgtggatgatggttttgggtttgcagtcgcttgggtttattgtttgcaatggctgtgtgtgtgtcctctggaattggtgaccgcatccatgactatcaaatattggacgacatctgtgaacccggatgtgttcgtcattattttctatgttttggtgattactattaatattttcggtgctcgtggttatgcagaagctgagttcttcttcaactgttgcaaaattttgatgatgactgggttcttcattcttggtattatcatcgatgttggtggcgctggtaatgatggttttattggtggtaaatactggcacgatccgggcgctttcaatggtaaacatgccattgacagatttaaaggtgttgctgcaacattagtgactgctgcttttgcctttggtggttcagagtttattgccatcaccactgcagaacaatctaatccaagaaaggccattccaggtgcggccaaacaaatgatctacagaatcttattcctattcttggctaccattattctactgggtttcttggtgccatacaattccgatcaattattgggttctaccggtggtggtactaaagcctcgccatatgtcattgctgttgcatcccacggtgtccgtgtcgtcccacacttcattaacgccgttattctactttccgtgctgtccatggctaactcctccttctactccagtgctcgtttatttttaactctatccgagcaaggttacgctcctaaggttttctcctacatcgacagagccggtagaccattgattgccatgggtgtttctgcattgtttgccgttattgccttctgtgctgcatctcccaaggaagaacaagttttcacttggttattggccatttctggtttgtctcagcttttcacatggactgccatttgtttatcccatcttagatttagaagagccatgaaagtccaagggagatctcttggagaattgggtttcaaatctcaaactggtgtttggggatctgcctacgcttgcattatgatgattttaattcttattgcccaattttgggtcgctatcgcccccattggtgaaggtaagctggatgcacaagcctttttcgaaaactacttggctatgccaatcttgattgcactttatgtcggctacaaggtctggcacaaggattggaaactgttcatcagggcagacaagatcgacctagattctcatagacaaatctttgatgaagaattaatcaagcaagaagacgaagaatatagggaacgtttgaggaacggaccttattggaaaagggtcgttgccttctggtgttaa

SEQ ID NO: 1094 - DNA, 1902 bp, Artificial Sequence
  Description of Artificial Sequence: Synthetic polynucleotide
atgtcttcttccaagtctttgtacgaattgaaagacttgaaaaatagctccacagaaatacatgccacggggcaggataatgaaattgaatatttcgaaacaggctccaatgaccgtccatcctctcaacctcatttaggttacgaacagcataacacttctgccgtgcgtaggtttttcgactcctttaaaagagcggatcagggtccacaggatgaagtagaagcaacacaaatgaacgatcttacgagcgctatctctccttcttctagacaggctcaagaattggaaaaaaatgaaagtagtgacaacataggcgctaatacaggtcataagagtgactctttgaagaaaaccattcagcctagacatgttttgatgattgcgttgggtacgggtatcggtactgggttattggtcggtaacggtaccgcgttggttcatgcgggtccagctggattgcttattggttacgctattatgggttctatcttgtactgtattattcaagcatgtggtgaaatggcgttagtgtatagtaacttgactggtggctacaatgcataccccagtttccttgtggatgatggttttgggtttgcagtcgcttgggtttattgtttgcaatggttatgtgtgtgtcctttggaattggtgaccgcatccatgactatcaaatattggacgacatctgtgaacccggatgtgttcgtcattattttctatgttttggtgattactattaatattttcggtgctcgtggttatgcagaagctgagttcttcttcaactgttgcaaaattttgatgatgactgggttcttcattcttggtattatcatcgatgttggtggcgctggtaatgatggttttattggtggtaaatactggcacgatccgggcgctttcaatggtaaacatgccattgacagatttaaaggtgttgctgcaacattagtgactgctgcttttgcctttggtggttctgagtttattgccatcaccactgcagaacaatctaatccaagaaaggccattccaggtgcggccaaacaaatgatctacagaatcttattccttttcttggctaccattattttattgggtttcttggtgccatacaattccgatcaattattgggttctaccggtggtggtactaaagcctctccatatgtcattgctgttgcatcccacggtgtccgtgtcgtcccacacttcattaacgccgttattttactttccgtgttatccatggctaactcctccttctactccagtgctcgtttatttttaactttatccgagcaaggttacgctcctaaggttttctcctacatcgacagagccggtagaccattgattgccatgggtgtttctgcattgtttgccgttattgccttctgtgctgcatctcccaaggaagaacaagttttcacttggttattggccatttctggtttgtctcagcttttcacatggactgccatttgtttatcccatcttagatttagaagagccatgaaagtccaagggagatctcttggagaattgggtttcaaatctcaaactggtgtttggggatctgcctacgcttgcattatgatgattttaattcttattgcccaattttgggtcgctatcgcccccattggtgaaggtaagttggatgcacaagcctttttcgaaaactacttggctatgccaatcttgattgcactttatgtcggctacaaggtctggcacaaggattggaaattattcatcagggcagacaagatcgacttggattctcatagacaaatctttgatgaagaattaatcaagcaagaagacgaagaatatagggaacgtttgaggaacggaccttattggaaaagggtcgttgccttctggtgttga

SEQ ID NO: 1095 - DNA, 3114 bp, Saccharomyces cerevisiae
atgactgtggcgaataccgagacccattctgctgctaaaccatcgagtactataggcccatggaagcttggtgaaacactgggctttggtagcaccggcaaggtccaacttgcgcaacatgagcgcacgggccatagaacagccgtcaaagtaatctcaaagtccattttcaacaacaacggaaaccacagtaacgacgattcagtgctgccatacaacatcgagcgtgagattgttattatgaaacttttgagccacccaaacgttctgagtctttacgacgtttgggaaaccaacaataacctgtaccttatcctggaatacgccgaaaagggagaactgttcaacttgcttgtggaccacggtcccttgcccgagcgtgaggccatcaattgcttcagacagataattataggcatttcatactgccatgcgctaggaatagtacatcgggatttaaagccagaaaatcttttgctcgatagtttctataatatcaaaattgcggattttggtatggcagctttacagacagacgccgacctgctagaaacttcttgtgggtctcctcattatgccgctcctgagatcgtatcaggtctgccctatgaaggatttgccagcgacgtttggtcttgcggtgtaatcctctttgcccttttaacgggtagactacccttcgatgaagaaaacggtaatgttagggatttgttattgaaagtccaaaagggccagtttgaaatgcccaatgacaccgaaatttccagagatgcacaagatttaatcggcaagattctcgttgtagatcccaggcaaagaataaaaatcagagacatccttagtcatccactgctaaaaaaatatcaaaccattaaggattccaaaagtatcaaagatttacctcgtgaaaatacctatctatatccactggctgactcgaacaaccatactagcgcctctatcgatgattcaatcctacaaaacttggtggtactttggcatggtagacacgccgatgacatcgtatctaaactgaaagagaatggaaccaacaaagaaaaaattctatatgcgctactataccgtttcaaactggactctgtaaggggatcgaataagaagaaccgcaataagataaagaaaaccaaaaaaaataaaagatctagcacactttcgtcatcgtcatcattattattgaacaaccgaagcatacaatctacgccacgcagacgtacatccaagaggcattccagggaattctcttctagcaggaagagatcgtcctttttactgtcctcgaatcctaccgatagttctccaatacctttgagaagtagtaaaagaattacacatattaacgtagcgtctgcaaatacccaagcaacgccaagtggtgtcccgaatcctcacaagaggaactcaaaaaaacggtcaagcaaaagattatcttatatgcctaatacaaaaagaagctcactaacatcaaaatcattatcaaactttactaacctaatagatgatgatgattgggagtacattgaaaaggatgcaaagagaacaagttccaacttcgctacactgattgatgaaatatttgagcctgagaaatttgaattggcgaaaagagaaaaggctgaacttcaaagaaaagttcaggaagcaaaaaggcaatcagtgaatgcacagaagattaatgaggacgagtttggatccgaagtttctgatggaatgaaagagctgaaaaaaataaatgacaaagtgtcgtccccgttgataaattacgaattttcgcaacaagaactattgcaagatatagacaccttactaacgaatcgttatcaactttcgtcatatactaggcctatttcgagactggatcccggattaacgcctgttactgagacacttcctaacaacctaaaagaaaaaacagctctgctgcaggatactgaaaagaaaataatagaaacgatacgcagatccaaatttttaggatcgctactaaatgttagagggggactatcgccagggaaaagtgaactggcacctatcgaagagtctcccatagtttcaaccacaccactaatatataatgatcgaatggaacctcgtaggatatccgatgtggaagtcccacatttcacgaggaaatcaaaacactttactactgctaataatcggcgctcagtcttatctttgtatgcgaaggattcaatcaaagacttaaacgaatttttaataaaggaagatcctgatttgcctccacaaggaagcactgataacgaaagtaggagcgaagatcccgaaatagccgagagtatcactgattcaaggaatatacaatatgatgaggatgatagtaaggatggtgataatgtgaataatgataatatattgagcgactttcctcaaggcgttggcatatcacaggaatacgacatgaaggataaaaatccaaaccaatctccaatatcaaaaagcgcagagcccacactggtagtgaaacttccgtctttgagttctttccaaggaaaaaacgccagtgggttgggcctataccaaagagagccttctaaggtaaccttaccgagccttacaagtaataacagcagcgtcggagaaaacatagaggatggggcggaaaaagggactgagagtgagaaaatcgctgcttccctgtcagacgatgacttgaaggaagataatgacaagaaagataacgacacagtgaatgcccctactacagtaaaaaagccacctaacagcgtactcttgaaaaaattctcaaaaggtaaaatcttagaacttgaaatacatgccaaaatacctgaaaagagactatacgagggcctacataaactactagaaggctggaagcaatacgggttgaaaaacctggtgtttaacatcactaatatgatcataacaggaaaattggtgaatgacagtattttatttttacgatctacgctttttgaaataatggttttaccaaatggagacggtagaagtttaattaaattcaataagaaaacaggatctactaaaacgctgaccaagcttgctacagaaatccaaattattttacaaaaagaaggtgttttggacaaataa

SEQ ID NO: 1096 - DNA, 3114 bp, Artificial Sequence
  Description of Artificial Sequence: Synthetic polynucleotide
atgactgtggcgaataccgagacccattctgctgctaaaccatctagtactataggcccatggaagcttggtgaaacattaggctttggtagcaccggcaaggtccaacttgcgcaacatgagcgcacgggccatagaacagccgtcaaagtaatctccaagtccattttcaacaacaacggaaaccacagtaacgacgattctgtgttaccatacaacatcgagcgtgagattgttattatgaaacttttgagccacccaaacgttttgagtctttacgacgtttgggaaaccaacaataacctttaccttatcttggaatacgccgaaaagggagaattattcaacttgcttgtggaccacggtcccttgcccgagcgtgaggccatcaattgcttcagacagataattataggcatttcttactgccatgcgttgggaatagtacatagagatttaaagccagaaaatcttttgctcgatagtttctataatatcaaaattgcggattttggtatggcagctttacagacagacgccgacttattggaaacttcttgtgggtctcctcattatgccgctcctgagatcgtatctggtttgccctatgaaggatttgccagcgacgtttggtcttgcggtgtaatcctctttgcccttttaacgggtagattacccttcgatgaagaaaacggtaatgttagggatttgttattgaaagtccaaaagggccagtttgaaatgcccaatgacaccgaaatttccagagatgcacaagatttaatcggcaagattctcgttgtagatcccaggcaaagaataaaaatcagagacatccttagtcatccattgttgaaaaaatatcaaaccattaaggattccaaaagtatcaaagatttacctcgtgaaaatacctatttgtatccattggctgactccaacaaccatactagcgcctctatcgatgattctatcttgcaaaacttggtggtactttggcatggtagacacgccgatgacatcgtatctaaattgaaagagaatggaaccaacaaagaaaaaattctttatgcgttattgtaccgtttcaaattagactctgtaaggggaagtaataagaagaaccgcaataagataaagaaaaccaaaaaaaataaaagatctagcacactttcttcttcttcttctttattattgaacaacagaagcatacaatctacgccacgcagacgtacatccaagaggcattccagggaattctcttctagcaggaagagaagttcctttttattatcctctaatcctaccgatagttctccaatacctttgagaagtagtaaaagaattacacatattaacgtagcgtctgcaaatacccaagcaacgccaagtggtgtcccgaatcctcacaagaggaactccaaaaaaagaagcagcaaaagattatcttatatgcctaatacaaaaagaagctctttaacaagtaaatctttatctaactttactaacttgatagatgatgatgattgggagtacattgaaaaggatgcaaagagaacaagttccaacttcgctacattaattgatgaaatatttgagcctgagaaatttgaattggcgaaaagagaaaaggctgaacttcaaagaaaagttcaggaagcaaaaaggcaatctgtgaatgcacagaagattaatgaggacgagtttggatccgaagtttctgatggaatgaaagagttgaaaaaaataaatgacaaagtgtcttccccgttgataaattacgaattttctcaacaagaattattgcaagatatagacaccttattgacgaatcgttatcaactttcttcttatactaggcctatttctagattagatcccggattaacgcctgttactgagacacttcctaacaacttgaaagaaaaaacagctttattgcaggatactgaaaagaaaataatagaaacgatacgcagatccaaatttttaggatctttattgaatgttagagggggattatctccagggaaaagtgaattggcacctatcgaagagtctcccatagtttctaccacaccattgatatataatgatagaatggaacctcgtaggatatccgatgtggaagtcccacatttcacgaggaaatctaaacactttactactgctaataatagacgctctgtcttatctttgtatgcgaaggattctatcaaagacttaaacgaatttttaataaaggaagatcctgatttgcctccacaaggaagcactgataacgaaagtaggagcgaagatcccgaaatagccgagagtatcactgatagtaggaatatacaatatgatgaggatgatagtaaggatggtgataatgtgaataatgataatatattgagcgactttcctcaaggcgttggcatatctcaggaatacgacatgaaggataaaaatccaaaccaatctccaatatccaaaagcgcagagcccacattggtagtgaaacttccgtctttgagttctttccaaggaaaaaacgccagtgggttgggcctttaccaaagagagccttctaaggtaaccttaccgagccttacaagtaataacagcagcgtcggagaaaacatagaggatggggcggaaaaagggactgagagtgagaaaatcgctgcttccttaagtgacgatgacttgaaggaagataatgacaagaaagataacgacacagtgaatgcccctactacagtaaaaaagccacctaacagcgtactcttgaaaaaattctccaaaggtaaaatcttagaacttgaaatacatgccaaaatacctgaaaagagattatacgagggcttgcataaattattggaaggctggaagcaatacgggttgaaaaacttggtgtttaacatcactaatatgatcataacaggaaaattggtgaatgacagtattttatttttaagatctacgctttttgaaataatggttttaccaaatggagacggtagaagtttaattaaattcaataagaaaacaggatctactaaaacgttgaccaagcttgctacagaaatccaaattattttacaaaaagaaggtgttttggacaaatga

SEQ ID NO: 1097 - DNA, 378 bp, Saccharomyces cerevisiae
atggttctaaccgatgccgaagaactgcgcagtccggttataacgtctgacatgtccttttttgatttggaatccaaccactcaagtgactctgttcatttactttgcgaaaaatatacccacaaattgcccatcgaaagtgaatcgcaaaccaccttcagactggcaccgacaaagcaaagattatacagacagagtactttatacgtaccgttaagtctcaagcaaagggttttcttatttactgaacgggtaaagagtatctgggccggcttgccaagatgcaaaccgaataagtatttcaaagttgcatttgccttagccgtcctgacaccattggctatttggatattttatattgactttcgtgtacattga

SEQ ID NO: 1098 - DNA, 378 bp, Artificial Sequence
  Description of Artificial Sequence: Synthetic polynucleotide
atggttttaaccgatgccgaagaattacgcagtccggttataacgtctgacatgtccttttttgatttggaatccaaccacagcagtgactctgttcatttactttgcgaaaaatatacccacaaattgcccatcgaaagtgaatctcaaaccaccttcagattagcaccgacaaagcaaagattatacagacagagtactttatacgtaccgttaagtctcaagcaaagggttttcttatttactgaaagagtaaagagtatctgggccggcttgccaagatgcaaaccgaataagtatttcaaagttgcatttgccttagccgtcttaacaccattggctatttggatattttatattgactttcgtgtacattga

SEQ ID NO: 1099 - DNA, 1095 bp, Saccharomyces cerevisiae
atgtctgcccctaagaagatcgtcgttttgccaggtgaccacgttggtcaagaaatcacagccgaagccattaaggttcttaaagctatttctgatgttcgttccaatgtcaagttcgatttcgaaaatcatttaattggtggtgctgctatcgatgctacaggtgttccacttccagatgaggcgctggaagcctccaagaaggctgatgccgttttgttaggtgctgtgggtggtcctaaatggggtaccggtagtgttagacctgaacaaggtttactaaaaatccgtaaagaacttcaattgtacgccaacttaagaccatgtaactttgcatccgactctcttttagacttatctccaatcaagccacaatttgctaaaggtactgacttcgttgttgtcagagaattagtgggaggtatttactttggtaagagaaaggaagacgatggtgatggtgtcgcttgggatagtgaacaatacaccgttccagaagtgcaaagaatcacaagaatggccgctttcatggccctacaacatgagccaccattgcctatttggtccttggataaagctaatgttttggcctcttcaagattatggagaaaaactgtggaggaaaccatcaagaacgaattccctacattgaaggttcaacatcaattgattgattctgccgccatgatcctagttaagaacccaacccacctaaatggtattataatcaccagcaacatgtttggtgatatcatctccgatgaagcctccgttatcccaggttccttgggtttgttgccatctgcgtccttggcctctttgccagacaagaacaccgcatttggtttgtacgaaccatgccacggttctgctccagatttgccaaagaataaggtcaaccctatcgccactatcttgtctgctgcaatgatgttgaaattgtcattgaacttgcctgaagaaggtaaggccattgaagatgcagttaaaaaggttttggatgcaggtatcagaactggtgatttaggtggttccaacagtaccaccgaagtcggtgatgctgtcgccgaagaagttaagaaaatccttgcttaa

SEQ ID NO: 1100 - DNA, 1095 bp, Artificial Sequence
  Description of Artificial Sequence: Synthetic polynucleotide
atgtctgcccctaagaagatcgtcgttttgccaggtgaccacgttggtcaagaaatcacagccgaagccattaaggttcttaaagctatttctgatgttcgttccaatgtcaagttcgatttcgaaaatcatttaattggtggtgctgctatcgatgctacaggtgttccacttccagatgaggcgttagaagcctccaagaaggctgatgccgttttgttaggtgctgtgggtggtcctaaatggggtaccggtagtgttagacctgaacaaggtttattgaaaatccgtaaagaacttcaattgtacgccaacttaagaccatgtaactttgcatccgactctcttttagacttatctccaatcaagccacaatttgctaaaggtactgacttcgttgttgtcagagaattagtgggaggtatttactttggtaagagaaaggaagacgatggtgatggtgtcgcttgggatagtgaacaatacaccgttccagaagtgcaaagaatcacaagaatggccgctttcatggccttgcaacatgagccaccattgcctatttggtccttggataaagctaatgttttggcctcttctagattatggagaaaaactgtggaggaaaccatcaagaacgaattccctacattgaaggttcaacatcaattgattgattctgccgccatgatcttggttaagaacccaacccacttgaatggtattataatcaccagcaacatgtttggtgatatcatctccgatgaagcctccgttatcccaggttccttgggtttgttgccatctgcgtccttggcctctttgccagacaagaacaccgcatttggtttgtacgaaccatgccacggttctgctccagatttgccaaagaataaggtcaaccctatcgccactatcttgtctgctgcaatgatgttgaaattgtctttgaacttgcctgaagaaggtaaggccattgaagatgcagttaaaaaggttttggatgcaggtatcagaactggtgatttaggtggttccaacagtaccaccgaagtcggtgatgctgtcgccgaagaagttaagaaaatccttgcttga

SEQ ID NO: 1101 - DNA, 1494 bp, Saccharomyces cerevisiae
atgttgaaatcaactgctacaagatcgataacaagattatctcaagtttacaacgttccagcggccacatatagggcttgtttggtaagcaggagattctattcccctcctgcagcaggcgtgaagttagacgacaacttctctctggaaacgcataccgatattcaggctgctgcaaaggcacaggctagtgcccgtgcgagtgcatccggtaccaccccagatgctgtagtagcttctggtagcactgcaatgagccatgcttatcaagaaaacacaggttttggtactcgtcccatatatcttgacatgcaagccactacaccaacagaccctagggttttggatacgatgttgaagttttatacgggactttatggtaatcctcattccaacactcactcttacggttgggaaacaaatactgctgtggaaaatgctagagctcacgtagcaaagatgatcaatgccgaccccaaggaaataatattcacttcgggagcgaccgaatctaataatatggttcttaagggtgtcccaagattttataagaagactaagaaacacatcatcaccactagaacggaacacaagtgtgtcttggaagccgcacgggccatgatgaaggagggatttgaagtcactttcctaaatgtggacgatcaaggtcttatcgatttgaaggaattggaagatgccattagaccagatacctgtctcgtctctgtgatggctgtcaataatgaaatcggtgtcattcaacctattaaagaaattggtgcaatttgtagaaagaataagatctactttcatactgacgccgcacaagcctatggtaagattcacattgatgtcaatgaaatgaacattgatttactatcaatttcttctcacaagatttacggtccaaagggaataggtgccatctatgtaagaaggagaccaagagttagattagaacctttactatccggtggtggccaagagagaggattgagatctggtactttggcccccccattggtagcgggatttggtgaagctgcgagattgatgaagaaagaatttgacaacgaccaagctcacatcaaaagactatccgataaattagtcaaaggtctattatccgctgaacataccacgttgaacggatctccagatcatcgttatccagggtgtgttaacgtttctttcgcctacgtggaaggagaatctttattgatggcactaagggatatcgcattatcctcgggttcagcctgtacatctgcttccctagaaccttcttatgttttacatgcgctgggtaaggatgatgcattagcccattcttccatcagatttggtattggtagatttagtactgaagaggaggtcgactacgtcgttaaggccgtttctgacagagtaaaattcttgagggaactttcaccattatgggaaatggttcaagaaggtattgacttaaactccatcaaatggtcaggtcattga

SEQ ID NO: 1102 - DNA, 1494 bp, Artificial Sequence
  Description of Artificial Sequence: Synthetic polynucleotide
atgttgaaatctactgctacaagaagtataacaagattatctcaagtttacaacgttccagcggccacatatagggcttgtttggtaagcaggagattctattcccctcctgcagcaggcgtgaagttagacgacaacttctctttggaaacgcataccgatattcaggctgctgcaaaggcacaggctagtgcccgtgcgagtgcatccggtaccaccccagatgctgtagtagcttctggtagcactgcaatgagccatgcttatcaagaaaacacaggttttggtactcgtcccatatatcttgacatgcaagccactacaccaacagaccctagggttttggatacgatgttgaagttttatacgggactttatggtaatcctcattccaacactcactcttacggttgggaaacaaatactgctgtggaaaatgctagagctcacgtagcaaagatgatcaatgccgaccccaaggaaataatattcacttctggagcgaccgaatctaataatatggttcttaagggtgtcccaagattttataagaagactaagaaacacatcatcaccactagaacggaacacaagtgtgtcttggaagccgcaagagccatgatgaaggagggatttgaagtcactttcttgaatgtggacgatcaaggtcttatcgatttgaaggaattggaagatgccattagaccagatacctgtctcgtctctgtgatggctgtcaataatgaaatcggtgtcattcaacctattaaagaaattggtgcaatttgtagaaagaataagatctactttcatactgacgccgcacaagcctatggtaagattcacattgatgtcaatgaaatgaacattgatttattatccatttcttctcacaagatttacggtccaaagggaataggtgccatctatgtaagaaggagaccaagagttagattagaacctttattatccggtggtggccaagagagaggattgagatctggtactttggcccccccattggtagcgggatttggtgaagctgcgagattgatgaagaaagaatttgacaacgaccaagctcacatcaaaagattatccgataaattagtcaaaggtttattatccgctgaacataccacgttgaacggatctccagatcatcgttatccagggtgtgttaacgtttctttcgcctacgtggaaggagaatctttattgatggcattaagggatatcgcattatccagtggttctgcctgtacatctgcttccttagaaccttcttatgttttacatgcgcttggtaaggatgatgcattagcccattcttccatcagatttggtattggtagatttagtactgaagaggaggtcgactacgtcgttaaggccgtttctgacagagtaaaattcttgagggaactttctccattatgggaaatggttcaagaaggtattgacttaaactccatcaaatggtctggtcattga

SEQ ID NO: 1103 - DNA, 1143 bp, Saccharomyces cerevisiae
atgtccatcaacctacattccgcacccgagtatgatccatcttataagctgatccagttgacaccagagttactggatataatacaggatccggttcaaaatcaccagttaaggtttaagtcattggacaaagacaagtctgaagttgtactgtgttcgcacgacaagacttgggtgctgaagcagcgcaaacattcaaacacagttctactaatgagagaatttgttcctgaacaacctattactttcgacgaaacgctcttgtttggactgtccaagccgtacatggacgtcgtgggattcgccaagactgaatcagaatttgagaccagagagacacatggcgaattgaacttgaattcagtaccaatatacaacggagaactggatttctccgacaaaatcatgaagaggtcatctacaaaggttatcgggaccctggaagaactacttgagaactcaccatgttctgcgctagaaggtatatcaaaatggcataagattggtggatctgtgaaagacggtgtgttgtgtattctttcacaagacttccttttcaaagcactgcatgtactactgatgagcgcaatggcagaatcactcgatctacagcatctgaatgttgaggatacacatcacgctgtggggaaggacattgaggacgagttcaatccatacacaagagaaatcattgaaacagtgctgaataaatttgctgttcaagagcaagaggctgaaaacaatacgtggcgcttgagaataccgtttatagctcagtggtacgggattcaagcgctaaggaaatatgtttctggaataagcatgccaattgatgagttcctcatcaagtggaagtcccttttcccacctttcttcccatgtgacattgacattgacatgctgcgaggctatcatttcaagcctaccgataagactgtccagtatatagcgaaaagcacactaccaatggaccccaaagaacggtttaaagtcctgtttaggctacagtcacagtgggacttggaggatatcaagcctctaattgaagaactaaattcaagaggtatgaaaatagacagtttcatcatgaagtatgcccgccgtaaaagactgggcaaaaagaccgtggtcacgagcaggtag

SEQ ID NO: 1104 - DNA, 1143 bp, Artificial Sequence
  Description of Artificial Sequence: Synthetic polynucleotide
atgtccatcaacttacattccgcacccgagtatgatccatcttataagttaatccagttgacaccagagttattagatataatacaggatccggttcaaaatcaccagttaaggtttaagtctttggacaaagacaagtctgaagttgtattatgttctcacgacaagacttgggtgttgaagcagcgcaaacattccaacacagttttgttgatgagagaatttgttcctgaacaacctattactttcgacgaaacgctcttgtttggattatccaagccgtacatggacgtcgtgggattcgccaagactgaaagtgaatttgagaccagagagacacatggcgaattgaacttgaattctgtaccaatatacaacggagaattagatttctccgacaaaatcatgaagaggtcttctacaaaggttatcgggaccttagaagaattgcttgagaactctccatgttctgcgttagaaggtatatccaaatggcataagattggtggatctgtgaaagacggtgtgttgtgtattctttctcaagacttccttttcaaagcattgcatgtattgttgatgagcgcaatggcagaatctctcgatttacagcatttgaatgttgaggatacacatcacgctgtggggaaggacattgaggacgagttcaatccatacacaagagaaatcattgaaacagtgttgaataaatttgctgttcaagagcaagaggctgaaaacaatacgtggcgcttgagaataccgtttatagctcagtggtacgggattcaagcgttaaggaaatatgtttctggaataagcatgccaattgatgagttcctcatcaagtggaagtcccttttcccacctttcttcccatgtgacattgacattgacatgttaagaggctatcatttcaagcctaccgataagactgtccagtatatagcgaaaagcacattaccaatggaccccaaagaaagatttaaagtcttgtttaggttacagtctcagtgggacttggaggatatcaagcctttgattgaagaattgaattctagaggtatgaaaatagacagtttcatcatgaagtatgcccgccgtaaaagattgggcaaaaagaccgtggtcacgagcaggtga

SEQ ID NO: 1105 - DNA, 4911 bp, Saccharomyces cerevisiae
atggagaaagacctgtcgtctctttactctgaaaagaaagacaaagagaacgatgaaaccttatttaacatcaaactatccaaatctgttgtcgagaccacaccgctaaatggtcattcattgtttgatgatgataaatcactttcagactggacggataatgtgttcactcaatcagtattctatcacgggtcagatgacttgatatgggggaagttctttgtctgcgtgtacaagtcccccaacagcaataagttgaacgctataatattcgacaaattaggaacatcatgcttcgaatccgtcgatatatcttccaactcgcaatactatccggccattgagaatttgagtccaagtgatcaggaaagcaatgttaagaaatgcattgctgtcattctgttacagcgctatccattactttcaccatcagacttatcacaaatattgtccaataaatcggaaaattgcgactatgaccccccttatgctggagatttggctagtagttgccagttgataacagcagttcctccagaagatctggggaagcgcttctttacatcaggacttctgcaaaatagatttgtcagctctaccctgttagatgttatttatgaaaacaatgaatccaccatcgaactaaataataggttggtattccatctgggtgaacaacttgaacaactttttaacccagtcacagaatactcaccggaacagacagaatatggttataaggcgccagaggacgaattacccacagaatcggatgatgatcttgtcaaggccatttgcaacgagttattacaactacaaacaaattttactttcaatttggtagaatttttgcaaaaattcctgatcgccttgagagtcagagtactcaatgaagaaattaatgggttatccacaaccaaattaaatcgactcttcccacctacaatagatgaagtcacaagaatcaattgtatttttctagactcgctaaagacagcaatcccttacggttccctcgaagtactgaaggcatgcagcattactattccttatttctacaaagcatatacaagacacgaggcggccacaaagaacttcagcaaagatattaaattgtttattaggcatttcagcaatgtaattccagaaagagaggtctacacggaaatgaaaatcgagagtataattaagggacctcaggaaaaactactgaagctaaagttaattatagagagattgtggaagtcgaaaaaatggagaccgaaaaatcaagaaatggcaaaaaaatgctacaacaatatcattgatgtcattgattcgtttggaaaattagattccccacttcattcttatagtaccagagtatttactccatcgggaaaaatccttacagaattagccaaatgctggcccgtagaactgcaatacaaatggctgaagagaagggtagtcggtgtgtatgatgtagtggatttgaatgatgaaaataagagaaatttattagtcatattcagtgattatgtggttttcatcaatatactggaggcagaaagttactacacttcagatggatcaaacaggcccttaatctcagatattttaatgaactcattgatcaacgaagttccgttgccctccaagatccctaagttgaaagtggagcgtcattgctatatagatgaggttctagtttctatattagacaaaagcactctacgttttgatcgattgaagggaaaagattctttctcaatggtatgtaaattatcctctgcatttatctcttcttcgtcagttgctgacttgattacgaaggctagaattttggaaaaagacactgcatttcatttatttaaagctagtagaagccattttacattatattctactgctcacgagctttgcgcttatgattccgaaaaaataaaatcaaaatttgccttattcctgaacataccaccatccaaggagatattggaggtcaacaaccttcatttggctttttttgcaagattttgcagtaacgatggtagagataacatcgtaatcttagacgtcttaaccaaacatgacgataaacatatagaagttacatccgataacattgttttcaccataattaatcaattggccattgaaataccgatatgcttttcttccttaaactcatcgatggccaaagatttactctgtgtaaatgagaatttgataaaaaacttagaacatcaattggaagaggtcaagcacccttcaacagacgaacatagggctgttaatagcaaactttccggtgcatccgatttcgatgctactcacgagaagaaaagatcatacggtaccataacaacatttagaagctatacaagcgacttgaaggacagtccatcaggcgataatagtaatgtcaccaaggaaactaaggaaattttaccagtgaaacctacgaaaaagtcttcaaaaaaaccaagagaaattcaaaagaagaccaagacaaacgcctctaaagcagagcacatagaaaagaagaagcctaacaaaggcaaagggttttttggcgtgttaaaaaatgtttttggaagtaaaagcaagagcaagccttcaccagttcaaagagtgcctaaaaaaatatcgcagaggcatcctaagtctccagtgaagaagccaatgacctcagaaaagaaatcctcccctaaaagggcagtcgtttcatctcccaaaattaaaaagaaaagtacttctttttccacaaaagaatcacaaactgctaaatcttctcttcgagcagttgaattcaaatctgatgacttgatcggaaaaccacctgatgttggaaatggcgcacatcctcaagaaaataccagaatatcttcagtagtaagggatacaaaatatgtctcctacaatccctctcagcctgtgacagaaaataccagtaacgaaaaaaatgtcgaaccaaaagcggatcaatccacaaagcaggataacatttccaattttgcagatgtagaggtatctgcgtcttcttatcctgaaaaacttgatgcagaaacagatgatcaaataattgggaaggcgacgaattcgtcatcagttcatggaaataaagagctgccagaccttgctgaggtgactacagcaaatagggtttctacaacatcggctggggaccaacgtattgatacccaaagcgaatttttacgtgcagctgatgttgaaaacttaagtgatgacgatgaacacagacagaatgaaagtagagtttttaacgatgacctctttggtgattttattcctaagcattaccgtaataaacaggagaacattaacagctcgagtaatttgtttccagagggaaaggtgccccaagaaaagggcgtatcaaatgaaaacactaacatatctctcaaaactaatgaagatgcatctacattgacgcagaaactctctccacaagcgagtaaagtgctgacagaaaattctaatgaattaaaagataccaacaatgaagggaaggacgcaaaggacataaaattaggagatgattacagtgataaagaaacagcgaaagaaataactaaaccaaaaaattttgttgaaggaataactgaacggaaagaaatattccccactattcctaggttagcgccgccagcttcaaaaattaactttcaaaggtcaccatcctatattgagctctttcaaggaatgagggtggttttagataagcatgatgcccattataactggaaacgcttggctagtcaagtctccttaagtgagggactaaaagtcaatactgaggaagatgcggcaattataaataaaagtcaggatgatgccaaggcggaaagaatgactcaaatttctgaagtgattgagtatgaaatgcagcaacctatcccaacttatttgcctaaggcgcatctagatgactcgggtattgaaaaaagtgatgacaaattcttcgaaattgaagaagaacttaaggaagaattgaagggcagcaaaaccggtaatgaagatgtcggtaataataatccatccaattctattccaaaaatcgagaagcccccagcattcaaagttattagaacatcgcctgtgagaattatcggaaggacttttgaagacactagaaaatatgaaaatggctctccatctgatatttcgttcacttatgatactcacaacaatgatgaacctgacaaaaggctgatggaattaaaatttccatcccaagatgaaattccggatgacagattctatactccagcagaggaacccactgctgaatttccggtggaagaacttccaaatactccgcgaagtattaacgttacaacttcaaataacaagagcacagacgataagttgagtagcggtaatattgatcaaaaacctaccgaactgttagatgatttagaattcagttcatttaatatagcatttggaaatacctccatgagtactgacaatatgaaaatatcatccgacttaagttcgaataaaaccgtgttaggaaatgctcagaaagttcaagagtctcctagtggaccattaatctatgttttgcctcagagtagcacaaagcatgagaaagaggggttccttcgaaagaaacaaaaagacgagcccatttgggtttcccctagcaaaattgactttgctgatctaagtaggagaactaaagcattgacgccagagcgtaatactgttcctttgaaaaacaacgacagtagaaaatacaaatatactggagagggatctatcggtaatatgacaaatatgctgttaactaaagatgcttcgtacgcgtacttaaaagattttgttgcgttgagtgacgatgaagatgaagatgggaaacagaactgcgctgttggtggcccagagaaactgaaattttattga

SEQ ID NO: 1106 - DNA, 4911 bp, Artificial Sequence
  Description of Artificial Sequence: Synthetic polynucleotide
atggagaaagacctttcttctctttactctgaaaagaaagacaaagagaacgatgaaaccttatttaacatcaaactttccaaatctgttgtcgagaccacaccgttaaatggtcattctttgtttgatgatgataaatctctttctgactggacggataatgtgttcactcaaagtgtattctatcacgggtctgatgacttgatatgggggaagttctttgtctgcgtgtacaagtcccccaacagcaataagttgaacgctataatattcgacaaattaggaacatcctgcttcgaatccgtcgatatatcttccaactctcaatactatccggccattgagaatttgagtccaagtgatcaggaaagcaatgttaagaaatgcattgctgtcattttattacagcgctatccattactttctccatctgacttatctcaaatattgtccaataaaagtgaaaattgcgactatgaccccccttatgctggagatttggctagtagttgccagttgataacagcagttcctccagaagatttagggaagcgcttctttacatctggacttttacaaaatagatttgtcagctctaccttattagatgttatttatgaaaacaatgaatccaccatcgaattgaataataggttggtattccatttaggtgaacaacttgaacaactttttaacccagtcacagaatactctccggaacagacagaatatggttataaggcgccagaggacgaattacccacagaaagtgatgatgatcttgtcaaggccatttgcaacgagttattacaattacaaacaaattttactttcaatttggtagaatttttgcaaaaattcttgatcgccttgagagtcagagtactcaatgaagaaattaatgggttatccacaaccaaattaaatagactcttcccacctacaatagatgaagtcacaagaatcaattgtatttttttggactctttgaagacagcaatcccttacggttccctcgaagtattgaaggcatgcagcattactattccttatttctacaaagcatatacaagacacgaggcggccacaaagaacttcagcaaagatattaaattgtttattaggcatttcagcaatgtaattccagaaagagaggtctacacggaaatgaaaatcgagagtataattaagggacctcaggaaaaattattgaagttgaagttaattatagagagattgtggaagagtaaaaaatggagaccgaaaaatcaagaaatggcaaaaaaatgctacaacaatatcattgatgtcattgattcttttggaaaattagattccccacttcattcttatagtaccagagtatttactccatctggaaaaatccttacagaattagccaaatgctggcccgtagaattacaatacaaatggttaaagagaagggtagtcggtgtgtatgatgtagtggatttgaatgatgaaaataagagaaatttattagtcatattcagtgattatgtggttttcatcaatatattggaggcagaaagttactacacttctgatggaagtaacaggcccttaatcagtgatattttaatgaactctttgatcaacgaagttccgttgccctccaagatccctaagttgaaagtggagcgtcattgctatatagatgaggttttggtttctatattagacaaaagcactttacgttttgatagattgaagggaaaagattctttctccatggtatgtaaattatcctctgcatttatctcttcttcttctgttgctgacttgattacgaaggctagaattttggaaaaagacactgcatttcatttatttaaagctagtagaagccattttacattatattctactgctcacgagctttgcgcttatgattccgaaaaaataaaatctaaatttgccttattcttgaacataccaccatccaaggagatattggaggtcaacaaccttcatttggctttttttgcaagattttgcagtaacgatggtagagataacatcgtaatcttagacgtcttaaccaaacatgacgataaacatatagaagttacatccgataacattgttttcaccataattaatcaattggccattgaaataccgatatgcttttcttccttaaactcttctatggccaaagatttactctgtgtaaatgagaatttgataaaaaacttagaacatcaattggaagaggtcaagcacccttctacagacgaacatagggctgttaatagcaaactttccggtgcatccgatttcgatgctactcacgagaagaaaagatcttacggtaccataacaacatttagaagctatacaagcgacttgaaggacagtccaagtggcgataatagtaatgtcaccaaggaaactaaggaaattttaccagtgaaacctacgaaaaagtcttctaaaaaaccaagagaaattcaaaagaagaccaagacaaacgcctctaaagcagagcacatagaaaagaagaagcctaacaaaggcaaagggttttttggcgtgttaaaaaatgtttttggaagtaaaagcaagagcaagccttctccagttcaaagagtgcctaaaaaaatatctcagaggcatcctaagtctccagtgaagaagccaatgaccagtgaaaagaaatcctcccctaaaagggcagtcgtttcttctcccaaaattaaaaagaaaagtacttctttttccacaaaagaatctcaaactgctaaatcttctcttcgtgcagttgaattcaaatctgatgacttgatcggaaaaccacctgatgttggaaatggcgcacatcctcaagaaaataccagaatatcttctgtagtaagggatacaaaatatgtctcctacaatccctctcagcctgtgacagaaaataccagtaacgaaaaaaatgtcgaaccaaaagcggatcaatccacaaagcaggataacatttccaattttgcagatgtagaggtatctgcgtcttcttatcctgaaaaacttgatgcagaaacagatgatcaaataattgggaaggcgacgaattcttcttctgttcatggaaataaagagttaccagaccttgctgaggtgactacagcaaatagggtttctacaacatctgctggggaccaacgtattgatacccaaagcgaatttttacgtgcagctgatgttgaaaacttaagtgatgacgatgaacacagacagaatgaaagtagagtttttaacgatgacctctttggtgattttattcctaagcattaccgtaataaacaggagaacattaacagcagtagtaatttgtttccagagggaaaggtgccccaagaaaagggcgtatctaatgaaaacactaacatatctctcaaaactaatgaagatgcatctacattgacgcagaaactctctccacaagcgagtaaagtgttaacagaaaattctaatgaattaaaagataccaacaatgaagggaaggacgcaaaggacataaaattaggagatgattacagtgataaagaaacagcgaaagaaataactaaaccaaaaaattttgttgaaggaataactgaaagaaaagaaatattccccactattcctaggttagcgccgccagcttccaaaattaactttcaaaggtctccatcctatattgagctctttcaaggaatgagggtggttttagataagcatgatgcccattataactggaaacgcttggctagtcaagtctccttaagtgagggattgaaagtcaatactgaggaagatgcggcaattataaataaaagtcaggatgatgccaaggcggaaagaatgactcaaatttctgaagtgattgagtatgaaatgcagcaacctatcccaacttatttgcctaaggcgcatttggatgactctggtattgaaaaaagtgatgacaaattcttcgaaattgaagaagaacttaaggaagaattgaagggcagcaaaaccggtaatgaagatgtcggtaataataatccatccaattctattccaaaaatcgagaagcccccagcattcaaagttattagaacatctcctgtgagaattatcggaaggacttttgaagacactagaaaatatgaaaatggctctccatctgatatttctttcacttatgatactcacaacaatgatgaacctgacaaaaggttgatggaattaaaatttccatcccaagatgaaattccggatgacagattctatactccagcagaggaacccactgctgaatttccggtggaagaacttccaaatactccgaggagtattaacgttacaacttccaataacaagagcacagacgataagttgagtagcggtaatattgatcaaaaacctaccgaattattagatgatttagaattcagttcttttaatatagcatttggaaatacctccatgagtactgacaatatgaaaatatcttccgacttaagtagtaataaaaccgtgttaggaaatgctcagaaagttcaagagtctcctagtggaccattaatctatgttttgcctcagagtagcacaaagcatgagaaagaggggttccttagaaagaaacaaaaagacgagcccatttgggtttcccctagcaaaattgactttgctgatttgagtaggagaactaaagcattgacgccagagcgtaatactgttcctttgaaaaacaacgacagtagaaaatacaaatatactggagagggatctatcggtaatatgacaaatatgcttttaactaaagatgcttcttacgcgtacttaaaagattttgttgcgttgagtgacgatgaagatgaagatgggaaacagaactgcgctgttggtggcccagagaaattgaaattttattga

SEQ ID NO: 1107 - DNA, 405 bp, Saccharomyces cerevisiae
atgaagagtttgttctatctcaaattgctcctctgggttgtgctattgtctttatgccttcttatggcacaccggaaaaccaaagttgccgacaaatttcgtgcactgcgttcaagaatacaattacgttttaatagacatatacgtttaaatgattcctttgctgatgacctagaaaacggtctccattccaggaatttcgatattatctcggagaatagcaacgacgtaagaggtggtttggatgatgtctccaagaatgagattaaacaaattatggaaaacgataatgtagatttcgataaggctagactattatatatggaaagaaagttcggccaaaatggtattgcccccgatggaacccctattgatccaaaagcattcacctttgatagtaggtaa

SEQ ID NO: 1108 - DNA, 405 bp, Artificial Sequence
  Description of Artificial Sequence: Synthetic polynucleotide
atgaagagtttgttctatctcaaattgctcctctgggttgtgttattgtctttatgccttcttatggcacacagaaaaaccaaagttgccgacaaatttcgtgcattgcgttccagaatacaattacgttttaatagacatatacgtttaaatgattcctttgctgatgacttggaaaacggtctccattccaggaatttcgatattatctctgagaatagcaacgacgtaagaggtggtttggatgatgtctccaagaatgagattaaacaaattatggaaaacgataatgtagatttcgataaggctagattattatatatggaaagaaagttcggccaaaatggtattgcccccgatggaacccctattgatccaaaagcattcacctttgatagtaggtga

SEQ ID NO: 1109 - DNA, 1284 bp, Saccharomyces cerevisiae
atggagagagagctagggatgtatggaaatgataggagtagatcaagatcacctgtacgtcgtcgtttgagcgacgacagagacaggtacgatgattataacgatagtagcagtaataatggtaatggcagtcgtcgtcagagacgcgaccgaggctcccgtttcaatgatcggtacgatcagagttatggtggcagccgctaccacgatgataggaactggccccctcgccgaggaggccgtggcagaggaggaagcagatcattcagagggggacgcggtggcggtaggggtcgtactttaggtccaattgttgaaagagacttagaaaggcaatttgacgcgaccaagagaaattttgaaaatagtatcttcgtgagaaacttgacttttgattgtacccctgaagaccttaaggaattgtttggtacagtgggcgaagttgtggaggctgacattatcacatcaaagggccatcaccgtggtatggggactgtggaatttaccaaaaacgaatctgtccaagatgccatatcgaagtttgatggtgccctctttatggaccggaaactaatggtaagacaggataatcctcctcctgaagctgccaaggaattttctaagaaagctactagggaagaaatagataatgggtttgaagtgttcatcatcaatttaccgtactctatgaattggcaatccttaaaagatatgtttaaagaatgtggtcatgtcttgcgtgccgatgtagaattggatttcaacggattttcaagaggattcggttctgtcatttatcctactgaggatgaaatgattagagctatcgatacattcaacggcatggaagtagaaggtagagttttggaagttagagaagggcgtttcaacaagagaaagaacaatgatcgttataatcaaaggcgtgaggaccttgaagataccagaggtactgaaccaggtcttgcgcaggatgccgctgtccacattgatgaaactgcagcaaaatttactgaaggtgtcaatccaggaggggatagaaactgtttcatttattgtagtaatttaccattctcaacagcaagaagcgatttattcgacttgtttgggcctatcggcaaaatcaataacgcggaattgaaaccacaggaaaatggtcaaccaactggtgttgctgttgtagaatatgaaaatttagtagatgcagatttttgtattcaaaaattaaataattataattatggtggttgtagtttacagatctcttatgctagacgtgattaa

SEQ ID NO: 1110 - DNA, 1284 bp, Artificial Sequence
  Description of Artificial Sequence: Synthetic polynucleotide
atggagagagagttagggatgtatggaaatgataggagtagatctagatctcctgtacgtcgtcgtttgagcgacgacagagacaggtacgatgattataacgatagtagcagtaataatggtaatggcagtcgtcgtcagagacgcgaccgtggctcccgtttcaatgatagatacgatcagagttatggtggcagccgctaccacgatgataggaactggccccctcgcagaggaggccgtggcagaggaggaagcagatctttcagagggggacgcggtggcggtaggggtcgtactttaggtccaattgttgaaagagacttagaaaggcaatttgacgcgaccaagagaaattttgaaaatagtatcttcgtgagaaacttgacttttgattgtacccctgaagaccttaaggaattgtttggtacagtgggcgaagttgtggaggctgacattatcacatccaagggccatcaccgtggtatggggactgtggaatttaccaaaaacgaatctgtccaagatgccatatccaagtttgatggtgccctctttatggacagaaaattaatggtaagacaggataatcctcctcctgaagctgccaaggaattttctaagaaagctactagggaagaaatagataatgggtttgaagtgttcatcatcaatttaccgtactctatgaattggcaatccttaaaagatatgtttaaagaatgtggtcatgtcttgcgtgccgatgtagaattggatttcaacggattttccagaggattcggttctgtcatttatcctactgaggatgaaatgattagagctatcgatacattcaacggcatggaagtagaaggtagagttttggaagttagagaagggcgtttcaacaagagaaagaacaatgatcgttataatcaaaggcgtgaggaccttgaagataccagaggtactgaaccaggtcttgcgcaggatgccgctgtccacattgatgaaactgcagcaaaatttactgaaggtgtcaatccaggaggggatagaaactgtttcatttattgtagtaatttaccattcagtacagcaagaagcgatttattcgacttgtttgggcctatcggcaaaatcaataacgcggaattgaaaccacaggaaaatggtcaaccaactggtgttgctgttgtagaatatgaaaatttagtagatgcagatttttgtattcaaaaattaaataattataattatggtggttgtagtttacagatctcttatgctagacgtgattga

SEQ ID NO: 1111 - DNA, 780 bp, Saccharomyces cerevisiae
atggacggatattgggatgttgtagtgtcgtccttgcaagacatatacaatgccaacgaggtcattccctttgatgatgagctgcaaacaaaaaaactaaatttccttaatatgtcaaaggatcagctgcaattgcatctcaacactttccaagaacacatggaaaacgtcaacagagtgcaccgaatccttgacaatgtacgttccaatttgtcgttgatgttgaatcagtcacgagaggaaaagagtgaggaaaatactgaagatgcagaagaaggagaagggacacgcatggcattgtcgcagggcaagaaagctgtggggaaagttggcagatcgtactggaccagcgaatacaacccaaatgcacctattttggtgggctcagaggttgcctataagcccagaaggggcagtgccgacggcgaatggatacagtgtgaagtactcaaagtcgtagcagatggtacacgatttgaagtgagagatcctgaacctgatgaattgggcaactcaggcaaggtgtataaatgtaatcggaaagaactactgttgatcccgccaggctttcccactaagaactacccgccaggtactaaggttctggcaagatatcctgaaacgaccactttttatcctgcaattgtcatcggaaccaagagggacggcacttgcaggcttcgatttgatggtgaagaggaagtggacaaagagacggaagtgactcgccgtctagtgctgccttcgccaacggctttggcaaacctagcaaggaaatag

SEQ ID NO: 1112 - DNA, 780 bp, Artificial Sequence
  Description of Artificial Sequence: Synthetic polynucleotide
atggacggatattgggatgttgtagtgtcttccttgcaagacatatacaatgccaacgaggtcattccctttgatgatgagttacaaacaaaaaaattgaatttccttaatatgtccaaggatcagttacaattgcatctcaacactttccaagaacacatggaaaacgtcaacagagtgcacagaatccttgacaatgtacgttccaatttgtctttgatgttgaatcagtctagagaggaaaagagtgaggaaaatactgaagatgcagaagaaggagaagggacacgcatggcattgtctcagggcaagaaagctgtggggaaagttggcagatcttactggaccagcgaatacaacccaaatgcacctattttggtgggcagtgaggttgcctataagcccagaaggggcagtgccgacggcgaatggatacagtgtgaagtactcaaagtcgtagcagatggtacaagatttgaagtgagagatcctgaacctgatgaattgggcaacagtggcaaggtgtataaatgtaatagaaaagaattattattgatcccgccaggctttcccactaagaactacccgccaggtactaaggttttagcaagatatcctgaaacgaccactttttatcctgcaattgtcatcggaaccaagagggacggcacttgcaggcttagatttgatggtgaagaggaagtggacaaagagacggaagtgactcgccgtttagtgttgccttctccaacggctttggcaaacttggcaaggaaatga

SEQ ID NO: 1113 - DNA, 930 bp, Saccharomyces cerevisiae
atgctgagatcgttattgcaaagcggccaccgcagggtggttgcttcttcatgtgctaccatggtgcgttgcagttcctcgtcgacctccgcgttggcgtacaagcagatgcacagacacgcaacaagacctcccttgcccacactagacactccttcctggaatgccaacagtgccgtttcatccatcatttacgaaacaccagcgccttctcgtcaaccaagaaaacagcatgtcttgaactgtttggtgcaaaacgaacccggtgtcttgtccagagtctcgggtacgttagctgccagaggctttaacatcgattcgttggtcgtgtgcaacaccgaggtcaaagacctaagtagaatgaccattgttttgcaagggcaagatggcgtagtcgaacaagcacgcagacaaatcgaagacttggtccccgtctacgccgtcctagactataccaattctgagatcatcaaaagagagctagtgatggccagaatctctctattgggtactgaatacttcgaagacctactattgcaccaccacacttccaccaatgctggcgccgctgactcccaagaattggtcgccgaaatcagagaaaagcaattccaccctgccaacttgcccgccagtgaggtattaaggttgaagcacgagcatttgaacgatatcaccaacttgaccaacaactttggaggtcgtgtcgtcgacatcagcgaaacaagctgtattgtggagttgtctgcaaaacccacacgtatctctgccttcttgaagttggtcgagccattcggtgtcctagagtgtgcaagaagcggtatgatggcattgccaagaactcctttgaagacaagcaccgaggaagctgccgacgaagacgaaaagatcagcgaaatcgtcgacatttcccaactaccacctggttag

SEQ ID NO: 1114 - DNA, 930 bp, Artificial Sequence
  Description of Artificial Sequence: Synthetic polynucleotide
atgttgagatctttattgcaaagcggccaccgcagggtggttgcttcttcttgtgctaccatggtgcgttgcagttcctcttccacctccgcgttggcgtacaagcagatgcacagacacgcaacaagacctcccttgcccacattagacactccttcctggaatgccaacagtgccgtttcttccatcatttacgaaacaccagcgccttctcgtcaaccaagaaaacagcatgtcttgaactgtttggtgcaaaacgaacccggtgtcttgtccagagtctctggtacgttagctgccagaggctttaacatcgattctttggtcgtgtgcaacaccgaggtcaaagacttgagtagaatgaccattgttttgcaagggcaagatggcgtagtcgaacaagcacgcagacaaatcgaagacttggtccccgtctacgccgtcttggactataccaattctgagatcatcaaaagagagttggtgatggccagaatctctttgttgggtactgaatacttcgaagacttattattgcaccaccacacttccaccaatgctggcgccgctgactcccaagaattggtcgccgaaatcagagaaaagcaattccaccctgccaacttgcccgccagtgaggtattaaggttgaagcacgagcatttgaacgatatcaccaacttgaccaacaactttggaggtcgtgtcgtcgacatcagcgaaacaagctgtattgtggagttgtctgcaaaacccacacgtatctctgccttcttgaagttggtcgagccattcggtgtcttggagtgtgcaagaagcggtatgatggcattgccaagaactcctttgaagacaagcaccgaggaagctgccgacgaagacgaaaagatcagcgaaatcgtcgacatttcccaattaccacctggttga

SEQ ID NO: 1115 - DNA, 1158 bp, Saccharomyces cerevisiae
atgtctgcaaacggcaagatctctgttcccgaggcggtggtcaattggctgttcaaagtcattcaacccatttataacgacggaagaacaactttccacgattctttagcgctgctggacaattttcacagtttaaggccaagaacaagggtatttacgcactctgacggcactccacaactactgttgtccatatatggtaccattagtactggtgaggatggttcatctcctcacagtattcctgtgatcatgtgggtacccagtatgtacccggtaaaacctccctttataagtataaacttggaaaatttcgacatgaacaccatcagtagttccttgcccattcaagaatacatcgactccaatgggtggattgcgctgcccatactccactgctgggatcctgccgcgatgaaccttataatggtcgtacaagaattaatgagtctcttacacgagccgccacaagatcaggcgcccagtctaccccctaagcccaatacgcagctccagcaggagcagaatactcccccactgcccccaaagcccaagtctccacacctaaaaccgccattgcctccacctccaccacctcaaccggcatctaacgcactcgaccttatggacatggacaacacggatatctccccaaccaaccatcatgaaatgctacaaaatctacaaaccgtagtcaatgagttatacagagaggatgtggactatgtagcggacaagatactgacgagacagaccgtcatgcaagaatcaattgccagattccatgaaataatcgccatcgacaagaaccatttacgagccgttgagcaggctattgagcagaccatgcactcgctaaacgcacagatagacgtcctgaccgcaaatagggccaaagtccaacagtttagctcaacttcgcatgtggatgacgaggacgtgaactccatagcagtggccaaaacagatggactcaatcaactatacaacctcgttgcccaggactacgctctcacggacaccattgagtgcttatctaggatgctgcaccgtggcaccattcccctcgatacttttgtcaagcaaggtcgtgaattagcacgccagcaattccttgtgcgatggcacatccaacgaatcacctcaccgttatcgtga

SEQ ID NO: 1116 - DNA, 1158 bp, Artificial Sequence
  Description of Artificial Sequence: Synthetic polynucleotide
atgtctgcaaacggcaagatctctgttcccgaggcggtggtcaattggcttttcaaagtcattcaacccatttataacgacggaagaacaactttccacgattctttagcgttattagacaattttcacagtttaaggccaagaacaagggtatttacgcactctgacggcactccacaattattattgtccatatatggtaccattagtactggtgaggatggttcttctcctcacagtattcctgtgatcatgtgggtacccagtatgtacccggtaaaacctccctttataagtataaacttggaaaatttcgacatgaacaccatcagtagttccttgcccattcaagaatacatcgactccaatgggtggattgcgttgcccatactccactgctgggatcctgccgcgatgaaccttataatggtcgtacaagaattaatgagtctcttacacgagccgccacaagatcaggcgcccagtttaccccctaagcccaatacgcagctccagcaggagcagaatactcccccattgcccccaaagcccaagtctccacacttgaaaccgccattgcctccacctccaccacctcaaccggcatctaacgcactcgaccttatggacatggacaacacggatatctccccaaccaaccatcatgaaatgttacaaaatttacaaaccgtagtcaatgagttatacagagaggatgtggactatgtagcggacaagatattaacgagacagaccgtcatgcaagaaagtattgccagattccatgaaataatcgccatcgacaagaaccatttaagagccgttgagcaggctattgagcagaccatgcactctttgaacgcacagatagacgtcttgaccgcaaatagggccaaagtccaacagtttagctctacttctcatgtggatgacgaggacgtgaactccatagcagtggccaaaacagatggactcaatcaattgtacaacctcgttgcccaggactacgctctcacggacaccattgagtgcttatctaggatgttgcaccgtggcaccattcccctcgatacttttgtcaagcaaggtcgtgaattagcacgccagcaattccttgtgagatggcacatccaaagaatcacctctccgttatcctga

SEQ ID NO: 1117 - DNA, 222 bp, Saccharomyces cerevisiae
atgagtagtttctatactgttgttggtgtattcatagtggttagtgccatgtccgtgctgttctggataatggctccaaagaacaaccaagctgtttggagaagtacagtgattttgacattggccatgatgtttttgatgtgggccattacgttcctttgccagctccatcccttggtggctccacgccgttcagatttgagacctgaatttgcagaataa

SEQ ID NO: 1118 - DNA, 222 bp, Artificial Sequence
  Description of Artificial Sequence: Synthetic polynucleotide
atgagtagtttctatactgttgttggtgtattcatagtggttagtgccatgtccgtgcttttctggataatggctccaaagaacaaccaagctgtttggagaagtacagtgattttgacattggccatgatgtttttgatgtgggccattacgttcctttgccagctccatcccttggtggctccacgccgttctgatttgagacctgaatttgcagaatga

SEQ ID NO: 1119 - DNA, 771 bp, Saccharomyces cerevisiae
atgtttgtggtggattggagcgtgcagctatgcatgggagtgatttcacctctcttccgtgccctcgtgcaactgcctttatcaattttcgtatggaatgggtttcagcttgtggcattgcctatcaacatcccattgaggttgttcctggggacgtcgctgagccgtttagttgcacaaacaagcacattagacttctatgtggttttgacgttgtttcaatattttgctgtgctttgtgcttttggcagcatcataggactcatctttggatttatattgggtgtgttccactcaatctgcggggtacccagtgtatacataagtctagaatggaaacggtggtttgctccgatacgtacggtccttgaacgtgcttccactagtattgtcaacattatgcgaggacaaactattgcgccaatacccatgcctaagcccaatcccacgcatatatcaaagcctaacatgaaaaaattccatgatgagcctggagctgatgatatgactataacgcatgatgtgaactgctacatcaccccttgccaaacgcctactaacgaaaaaattcagcattataataatgattcattcaacacgaccaccacagacgatgaacccactgatatttgggataggtctgacacttaccaaaactcattcgtcaccaatgaaactttgatgtctctttctaatagagctaagcttcgaagaaatgccagtgatgcggacatcgttaatataaagattttacgaaggaattctaggtga

SEQ ID NO: 1120 - DNA, 771 bp, Artificial Sequence
  Description of Artificial Sequence: Synthetic polynucleotide
atgtttgtggtggattggagcgtgcagttatgcatgggagtgatttctcctctcttccgtgccctcgtgcaattacctttatccattttcgtatggaatgggtttcagcttgtggcattgcctatcaacatcccattgaggttgttcttggggacgtccttaagccgtttagttgcacaaacaagcacattagacttctatgtggttttgacgttgtttcaatattttgctgtgctttgtgcttttggcagcatcataggactcatctttggatttatattgggtgtgttccactccatctgcggggtacccagtgtatacataagtttagaatggaaaagatggtttgctccgatacgtacggtccttgaacgtgcttccactagtattgtcaacattatgagaggacaaactattgcgccaatacccatgcctaagcccaatcccacgcatatatccaagcctaacatgaaaaaattccatgatgagcctggagctgatgatatgactataacgcatgatgtgaactgctacatcaccccttgccaaacgcctactaacgaaaaaattcagcattataataatgattctttcaacacgaccaccacagacgatgaacccactgatatttgggataggtctgacacttaccaaaactctttcgtcaccaatgaaactttgatgtctctttctaatagagctaagcttagaagaaatgccagtgatgcggacatcgttaatataaagattttaagaaggaattctaggtga

SEQ ID NO: 1121 - DNA, 1566 bp, Saccharomyces cerevisiae
atgacgactcgtttgctccaactcactcgtcctcattacagattattatccctacctctccagaaacccttcaatataaaaaggcagatgtccgctgcgaacccttctccatttggcaattatttgaacacgatcactaagtccctacaacagaatttacaaacatgctttcatttccaagcaaaagaaatcgatataatcgaatctccatctcagttttacgatctcttgaagacaaaaatacttaattcacaaaatagaatattcattgcgtctctgtatttaggcaaaagcgagactgagttggtggactgcatatcccaggcattgaccaagaaccccaagttgaaagtttcttttctacttgatggccttcgaggaacaagagaattgccttccgcctgttccgccactttattatcgtctttagtagccaaatatgggtcagagagagtggattgccgattgtacaagacgcctgcttatcatggttggaaaaaagtcttggttcccaagagatttaatgaaggtttaggcttacaacatatgaaaatatatgggtttgataacgaggtcattctttcgggagccaacctttcgaacgactatttcaccaacagacaagatagatactatctctttaaatctcgaaacttctccaactattattttaaattacatcaactcataagttccttcagttatcagattataaagccaatggtggatggtagcatcaacatcatttggccagattcgaatcctactgttgaaccgacgaaaaataaaaggctgtttttaagggaagcatctcaattactagatggctttttaaagagttctaaacaaagcctcccgattactgccgtgggtcaattctccacattagtttacccaatttctcaattcactccactttttcccaaatataatgacaaatcgaccgaaaaaagaacaatattgtcattgctttccactataacaagcaatgccatttcttggacgttcactgcaggatacttcaatattttgccagacatcaaagcaaaactgctggcaacgccggttgctgaggcaaatgtaataacagcttccccctttgcaaacggcttttaccaatcaaagggcgtctcatcaaatttacctggtgcttacttgtacctgtcaaaaaaatttctacaagatgtatgtaggtacagacaagatcatgctattacattaagagaatggcaaagaggcgtagtaaataagccgaatggttggtcatatcacgcaaaaggtatttggctttccgctcgtgataaaaatgatgctaacaattggaaaccctttatcacggttataggatcttcaaactatacgagaagggcgtattcattagatttggaatcgaatgctctcattattacaagagatgaagagctaagaaaaaaaatgaaagcagagttagataatttattacaatatacaaaacctgtaactctagaagactttcaatcagacccagaaagacatgttggcactggtgtaaagatagctacctccattttgggtaaaaaactttag

SEQ ID NO: 1122 - DNA, 1566 bp, Artificial Sequence
  Description of Artificial Sequence: Synthetic polynucleotide
atgacgactcgtttgctccaactcactcgtcctcattacagattattatccttacctctccagaaacccttcaatataaaaaggcagatgtccgctgcgaacccttctccatttggcaattatttgaacacgatcactaagtccttacaacagaatttacaaacatgctttcatttccaagcaaaagaaatcgatataatcgaatctccatctcagttttacgatctcttgaagacaaaaatacttaattctcaaaatagaatattcattgcgtctttgtatttaggcaaaagcgagactgagttggtggactgcatatcccaggcattgaccaagaaccccaagttgaaagtttcttttttacttgatggccttagaggaacaagagaattgccttccgcctgttccgccactttattatcttctttagtagccaaatatgggagtgagagagtggattgcagattgtacaagacgcctgcttatcatggttggaaaaaagtcttggttcccaagagatttaatgaaggtttaggcttacaacatatgaaaatatatgggtttgataacgaggtcattctttctggagccaacctttccaacgactatttcaccaacagacaagatagatactatctctttaaatctagaaacttctccaactattattttaaattacatcaactcataagttccttcagttatcagattataaagccaatggtggatggtagcatcaacatcatttggccagattctaatcctactgttgaaccgacgaaaaataaaaggttatttttaagggaagcatctcaattattagatggctttttaaagagttctaaacaaagcctcccgattactgccgtgggtcaattctccacattagtttacccaatttctcaattcactccactttttcccaaatataatgacaaatctaccgaaaaaagaacaatattgtctttgctttccactataacaagcaatgccatttcttggacgttcactgcaggatacttcaatattttgccagacatcaaagcaaaattattggcaacgccggttgctgaggcaaatgtaataacagcttccccctttgcaaacggcttttaccaatccaagggcgtcagtagtaatttacctggtgcttacttgtacctttctaaaaaatttttgcaagatgtatgtaggtacagacaagatcatgctattacattaagagaatggcaaagaggcgtagtaaataagccgaatggttggagttatcacgcaaaaggtatttggctttccgctcgtgataaaaatgatgctaacaattggaaaccctttatcacggttataggatcttccaactatacgagaagggcgtattctttagatttggaaagtaatgctctcattattacaagagatgaagagttaagaaaaaaaatgaaagcagagttagataatttattacaatatacaaaacctgtaactttggaagactttcaatctgacccagaaagacatgttggcactggtgtaaagatagctacctccattttgggtaaaaaactttga

SEQ ID NO: 1123 - DNA, 792 bp, Saccharomyces cerevisiae
atgcttgttattgttctgcagggcttggcaggttttttatcaatcatcgccattctatgtcaaaagcgctataataaacttcatcgatctatttacgggctttcatatgatttatttctgctagattttgttggtaatggtctgtacttgtattgcgcgttgcattattgttattcatctctggtgagggaacaactgtctcaaagattcccacttttttatccgttgaatgatgcccgtagtatacctatatccagtttcctcattctaaaagatttttgcgtttcctgttgctgcatgatggttttaaggcagttatactattataggtcaactaaacatatttatcagggcatttccattacttccataataattataagtgtgttccttgtattaggcatatttacatatggctgttccatctctaatttaccgttgaaaaattcaggtaaatttggcgttttctatttggaacacataaattatttgtgggtaatggcaaatctgcttaaatgtttcaagtatgtgcctcaaatgagtataaactggatgggatgctcaacagtaggtttatcatcaaagtttgcattgatatcatttttggctgaatctatcgatttattaggtagactggtaataccgaccaatgcattgttttacgagataccatttaattcaacgcccttttgggtaaaattgatacaatttgtcaccttattggtcatactttgtcaagttcagtatgtttacgtaggacggaaaccacggttgccaaaaggaaaactataa

SEQ ID NO: 1124 - DNA, 792 bp, Artificial Sequence
  Description of Artificial Sequence: Synthetic polynucleotide
atgcttgttattgttttacagggcttggcaggttttttatctatcatcgccattctttgtcaaaagcgctataataaacttcatagatctatttacgggctttcctatgatttatttttattagattttgttggtaatggtttatacttgtattgcgcgttgcattattgttattcttctttggtgagggaacaattatctcaaagattcccacttttttatccgttgaatgatgcccgtagtatacctatatccagtttcctcattttgaaagatttttgcgtttcctgttgctgcatgatggttttaaggcagttatactattataggtctactaaacatatttatcagggcatttccattacttccataataattataagtgtgttccttgtattaggcatatttacatatggctgttccatctctaatttaccgttgaaaaattctggtaaatttggcgttttctatttggaacacataaattatttgtgggtaatggcaaatttacttaaatgtttcaagtatgtgcctcaaatgagtataaactggatgggatgctccacagtaggtttatcttccaagtttgcattgatatcctttttggctgaatctatcgatttattaggtagattggtaataccgaccaatgcattgttttacgagataccatttaattctacgcccttttgggtaaaattgatacaatttgtcaccttattggtcatactttgtcaagttcagtatgtttacgtaggaagaaaaccaagattgccaaaaggaaaattgtga

SEQ ID NO: 1125 - DNA, 567 bp, Saccharomyces cerevisiae
atggattacgatagctctgatacaatgaacggtggttcaagtaaccccttaatcactaagatgaatacaatgaaattattatatcaacactatttggataaagtcactcctcacgctaaggagaggtgggctgtattgggtggtttgttatgtttgtttatggttcgtattacaatggccgaaggctggtatgtgatttgttatggtctaggtctatttttattgaatcaatttttagcctttttgaccccaaaattcgatatgtccttacagcaagatgaagaaaacaacgaattggaagctggagaaaaatcagaagaattccgtccattcatcagaagattaccagagttcaaattctggtataacagcattagagccactgtcatttccctcttgttgtcgctattttcaatcttcgatattccagtattttggcccatcttattgatgtatttcatattattgttttttttaactatgagaaggcagattcaacatatgataaaatatagatatatacccttagatatcggtaagaagaaatattctcattcttctaactga

SEQ ID NO: 1126 - DNA, 567 bp, Artificial Sequence
  Description of Artificial Sequence: Synthetic polynucleotide
atggattacgatagctctgatacaatgaacggtggtagtagtaaccccttaatcactaagatgaatacaatgaaattattatatcaacactatttggataaagtcactcctcacgctaaggagaggtgggctgtattgggtggtttgttatgtttgtttatggttcgtattacaatggccgaaggctggtatgtgatttgttatggtttaggtttatttttattgaatcaatttttagcctttttgaccccaaaattcgatatgtccttacagcaagatgaagaaaacaacgaattggaagctggagaaaaaagtgaagaattccgtccattcatcagaagattaccagagttcaaattctggtataacagcattagagccactgtcatttccctcttgttgtccttattttctatcttcgatattccagtattttggcccatcttattgatgtatttcatattattgttttttttaactatgagaaggcagattcaacatatgataaaatatagatatatacccttagatatcggtaagaagaaatattctcattcttctaactga

SEQ ID NO: 1127 - DNA, 462 bp, Saccharomyces cerevisiae
atgacctttttacaatttatcaataataatagacaagaaggacaaggttatatttcagaaaaattattcaaaactaagaagaatgagatgataagaaaaacagttaccaatttagtagctgtaagattaaaaaacttatcccacgaatttgatgtaatagagaattatctgcgctatatagctagcaccagtgaacatctatttactgctattaagcgccactttaacaaatgtgccagaaaacttttgaaagaagcaatcgactccaaatcaaactcagaaactgctacggtggttctgcaagaaggattttctggcatttgcttattgaaagcgtcttcaattatattaaaactaaaattgaagtttccaaaaaagaaagatagaactgatattagcaaattgtgtgacaagaaagaacggatgacacagtggttagaaatttcaattttgatgaactga

SEQ ID NO: 1128 - DNA, 462 bp, Artificial Sequence
  Description of Artificial Sequence: Synthetic polynucleotide
atgacctttttacaatttatcaataataatagacaagaaggacaaggttatatttctgaaaaattattcaaaactaagaagaatgagatgataagaaaaacagttaccaatttagtagctgtaagattaaaaaacttatcccacgaatttgatgtaatagagaattatttgcgctatatagctagcaccagtgaacatttatttactgctattaagcgccactttaacaaatgtgccagaaaacttttgaaagaagcaatcgactccaaaagtaactctgaaactgctacggtggttttgcaagaaggattttctggcatttgcttattgaaagcgtcttccattatattaaaattgaaattgaagtttccaaaaaagaaagatagaactgatattagcaaattgtgtgacaagaaagaaagaatgacacagtggttagaaatttccattttgatgaactga

SEQ ID NO: 1129 - DNA, 255 bp, Saccharomyces cerevisiae
atggacgatttccttgaacatttgagcaaagacgataacaaagcatggtatggcgcggaagaaaccgagagagctgcaaaattagatgcaatagaaacactacttattacagatagtgtactaaaaaggaacgacgtgaaaaaacgtgaaaaatacctagacctaatagagaatagtggaaacaacaatggcaaaatattcgtactcagtacttcaaaaatcacagtgagcaacttgacaaaccaacagatatag

SEQ ID NO: 1130 - DNA, 255 bp, Artificial Sequence
  Description of Artificial Sequence: Synthetic polynucleotide
atggacgatttccttgaacatttgagcaaagacgataacaaagcatggtatggcgcggaagaaaccgagagagctgcaaaattagatgcaatagaaacattgcttattacagatagtgtattgaaaaggaacgacgtgaaaaaacgtgaaaaatacttggacttgatagagaatagtggaaacaacaatggcaaaatattcgtactcagtacttctaaaatcacagtgagcaacttgacaaaccaacagatatga

SEQ ID NO: 1131 - DNA, 315 bp, Saccharomyces cerevisiae
atgttatatcttctgaagaaattgaaacatattgattcttatggtgagagcaatttatcaatgttttatcttaagttctactgcccttggaaattatgtcctttgcttcccattttatatggaagaaacaaatcagtacaaaatgcttggtcatgtcataagcttcatcgatttattgacttcccaactccttcggctaatatgaatttttttttctttataagagtttgctatggaactgtctcgctgtttatttcaacgtttctaaagaaaatatccttttttatttatgtgaacttcactgtatacttttag

SEQ ID NO: 1132 - DNA, 315 bp, Artificial Sequence
  Description of Artificial Sequence: Synthetic polynucleotide
atgttatatcttttgaagaaattgaaacatattgattcttatggtgagagcaatttatctatgttttatcttaagttctactgcccttggaaattatgtcctttgcttcccattttatatggaagaaacaaatctgtacaaaatgcttggtcttgtcataagcttcatagatttattgacttcccaactccttctgctaatatgaatttttttttctttataagagtttgctatggaactgtctctttatttatttctacgtttttgaagaaaatatccttttttatttatgtgaacttcactgtatacttttga

SEQ ID NO: 1133 - DNA, 969 bp, Saccharomyces cerevisiae
atggatcctctcagctcagtacagcctgcttcttatgttggttttgataccatcacgaatcagatcgaacatcgtctgttgaagaaaggttttcaatttaatataatggttgttggccaatccggattgggtaaaagtactctaataaatacgttatttgcctcacatttgattgattctgctactggtgatgatatttctgccctgcctgttacaaaaacaactgaaatgaaaatttctactcatactcttgtggaggaccgcgttcgcttgaatattaatgttatagatacacctggatttggtgactttattgacaattctaaagcttgggagcctattgtgaagtacattaaggaacaacattctcaatacttacgtaaagaattgacagcccaacgtgaaaggtttattactgatacaagagttcatgcaattctttatttcctgcaaccaaatggaaaggagttgagccgccttgacgttgaagccttgaaaagattgacagaaatagcaaatgttataccagttattggcaagtcggatacattgactttagatgaaagaacggagtttagggagcttattcaaaatgaattcgaaaaatacaatttcaagatttatccttatgattcggaagaactaactgacgaggaattagaactaaacagaagtgttagatctatcattccgtttgcagtggttggttctgagaatgagattgaaataaacggtgaaaccttcaggggaagaaaaactcgttggagcgctattaatgttgaggatatcaaccagtgtgattttgtatatttaagggaatttttgattcgaactcatctccaagacttaatcgaaacaacttcctacattcattatgaagggttcagagcaagacaattaattgccttgaaagaaaatgcgaatagtcgttcctcagctcatatgtctagcaacgccattcaacgttga

SEQ ID NO: 1134 - DNA, 969 bp, Artificial Sequence
  Description of Artificial Sequence: Synthetic polynucleotide
atggatcctctcagctctgtacagcctgcttcttatgttggttttgataccatcacgaatcagatcgaacatcgtttattgaagaaaggttttcaatttaatataatggttgttggccaatccggattgggtaaaagtactttgataaatacgttatttgcctctcatttgattgattctgctactggtgatgatatttctgccttgcctgttacaaaaacaactgaaatgaaaatttctactcatactcttgtggaggaccgcgttcgcttgaatattaatgttatagatacacctggatttggtgactttattgacaattctaaagcttgggagcctattgtgaagtacattaaggaacaacattctcaatacttacgtaaagaattgacagcccaacgtgaaaggtttattactgatacaagagttcatgcaattctttatttcttacaaccaaatggaaaggagttgagccgccttgacgttgaagccttgaaaagattgacagaaatagcaaatgttataccagttattggcaagagtgatacattgactttagatgaaagaacggagtttagggagcttattcaaaatgaattcgaaaaatacaatttcaagatttatccttatgattctgaagaattgactgacgaggaattagaattgaacagaagtgttagatctatcattccgtttgcagtggttggttctgagaatgagattgaaataaacggtgaaaccttcaggggaagaaaaactcgttggagcgctattaatgttgaggatatcaaccagtgtgattttgtatatttaagggaatttttgattagaactcatctccaagacttaatcgaaacaacttcctacattcattatgaagggttcagagcaagacaattaattgccttgaaagaaaatgcgaatagtcgttcctctgctcatatgtctagcaacgccattcaacgttga

SEQ ID NO: 1135 - DNA, 552 bp, Saccharomyces cerevisiae
atgaattctttgatttttggtaaacaattagcatttcacaaaattgtgcctaccactgcaattgggtggttggtaccgctaggaaatccttcactgcagattccaggccaaaaacaactgggatctatccaccgttggttgagagaaaagctacaacaagatcataaggacactgaagataaagattttttctctaataatggtattctactagcagttcctaaaaaaaaagtatcacaccaaaaaaaaaggcaaaaactttacggtccaggtaagaagcaattgaagatgattcaccatttgaataagtgcccatcatgcggccattataagagagccaatacactgtgtatgtattgtgttggacaaataagtcatatatggaaaacgcataccgctaaagaagaaattaagccgagacaagaggaggaactttccgaactagaccaaagagtcctatatcctggtagaagagataccaaatataccaaggatttgaaagataaagataactatttggaacgtcgcgttcggactttaaaaaaggactag

SEQ ID NO: 1136 - DNA, 552 bp, Artificial Sequence
  Description of Artificial Sequence: Synthetic polynucleotide
atgaattctttgatttttggtaaacaattagcatttcacaaaattgtgcctaccactgcaattgggtggttggtaccgttgggaaatccttctttgcagattccaggccaaaaacaattaggatctatccaccgttggttgagagaaaagttacaacaagatcataaggacactgaagataaagattttttctctaataatggtattttattggcagttcctaaaaaaaaagtaagccaccaaaaaaaaaggcaaaaactttacggtccaggtaagaagcaattgaagatgattcaccatttgaataagtgcccaagttgcggccattataagagagccaatacattatgtatgtattgtgttggacaaataagtcatatatggaaaacgcataccgctaaagaagaaattaagccgagacaagaggaggaactttccgaattagaccaaagagtcctttatcctggtagaagagataccaaatataccaaggatttgaaagataaagataactatttggaacgtcgcgttagaactttaaaaaaggactga

SEQ ID NO: 1137 - DNA, 744 bp, Saccharomyces cerevisiae
atggtaaagattgcgataattacttactctacctacgggcacatagacgttttagcccaagctgttaagaaaggtgtggaggcagctggtggtaaagctgatatatacagggtcgaggaaactttacctgatgaagtcctcaccaagatgaacgctcctcagaaacctgaagatattcctgttgccactgagaaaacgttgctcgaatatgacgcctttttgttcggtgttccaactaggtttggtaatttgccggctcaatggtccgccttttgggataaaaccggtggattatgggccaagggctctttgaacggcaaagctgcggggatattcgttagtacttccagttacggaggtggtcaagaaagtaccgttaaagcctgtttgtcttatttagctcatcacggaattatctttttaccactgggttataagaattcatttgctgagttagccagtatagaagaggtacacggtggctctccatggggtgctggtacccttgcaggacctgacggctcaagaactgcgtctccacttgaattgagaattgctgaaattcaaggtaaaacattctacgaaaccgccaaaaaacttttccctgcaaaagaagccaagccctccactgaaaagaagaccactacttctgatgcggctaagagacaaactaaacctgcagcagctacaactgcagaaaagaaggaggacaaaggattattatcctgctgtactgtcatgtaa

SEQ ID NO: 1138 - DNA, 744 bp, Artificial Sequence
  Description of Artificial Sequence: Synthetic polynucleotide
atggtaaagattgcgataattacttactctacctacgggcacatagacgttttagcccaagctgttaagaaaggtgtggaggcagctggtggtaaagctgatatatacagggtcgaggaaactttacctgatgaagtcctcaccaagatgaacgctcctcagaaacctgaagatattcctgttgccactgagaaaacgttgctcgaatatgacgcctttttgttcggtgttccaactaggtttggtaatttgccggctcaatggtccgccttttgggataaaaccggtggattatgggccaagggctctttgaacggcaaagctgcggggatattcgttagtacttccagttacggaggtggtcaagaaagtaccgttaaagcctgtttgtcttatttagctcatcacggaattatctttttaccattgggttataagaattcttttgctgagttagccagtatagaagaggtacacggtggctctccatggggtgctggtacccttgcaggacctgacggctccagaactgcgtctccacttgaattgagaattgctgaaattcaaggtaaaacattctacgaaaccgccaaaaaacttttccctgcaaaagaagccaagccctccactgaaaagaagaccactacttctgatgcggctaagagacaaactaaacctgcagcagctacaactgcagaaaagaaggaggacaaaggattattatcctgctgtactgtcatgtga

SEQ ID NO: 1139 - DNA, 1383 bp, Saccharomyces cerevisiae
atgacagttccttatctaaattcaaacagaaatgttgcatcatatttacaatcaaattcaagccaagaaaagactctaaaagagagatttagcgaaatctaccccatccatgctcaagatgtaaggcaattcgttaaagagcatggcaaaactaaaattagcgatgttctattagaacaggtatatggtggtatgagaggtattccagggagcgtatgggaaggttccgttttggacccagaagacggtattcgtttcagaggtcgtacgatcgccgacattcaaaaggacctgcccaaggcaaaaggaagctcacaaccactaccagaagctctcttttggttattgctaactggcgaggttccaactcaagcgcaagttgaaaacttatcagctgatctaatgtcaagatcggaactacctagtcatgtcgttcaacttttggataatttaccaaaggacttacacccaatggctcaattctctattgctgtaactgccttggaaagcgagtcaaagtttgctaaggcttatgctcaaggaatttccaagcaagattattggagttatacttttgaagattcactagacttgctgggtaaattgccagttattgcagctaaaatttatcgtaatgtattcaaagatggcaaaatgggtgaagtggacccaaatgccgattatgctaaaaatctggtcaacttgattggttctaaggatgaagatttcgtggacttgatgagactttatttaaccattcattcggatcacgaaggtggtaatgtatctgcacatacatcccatcttgtgggctcagcactatcatcaccttatctgtcccttgcatcaggtttgaacgggttggctggcccacttcatgggcgtgctaatcaagaagtactagaatggttatttgcacttaaagaagaggtaaatgatgactactctaaagatacgatcgaaaaatatttatgggatactctaaactcaggaagagtcattcccggttatggtcatgctgtgctaaggaaaactgatcctcgttatatggctcagcgtaagtttgccatggaccattttccagattatgaattattcaagttagtttcatcaatatacgaggtagcacctggcgtattgactgaacatggtaaaaccaaaaatccatggccaaatgtagatgctcactctggtgtcttattacaatattatggactaaaagaatcttctttctataccgttttatttggcgtttcaagggcatttggtattcttgctcaattgatcactgatagggccatcggtgcttccattgaaaggccaaagtcctattctactgagaaatacaaggaattggtcaaaaacattgaaagcaaactatag

SEQ ID NO: 1140 - DNA, 1383 bp, Artificial Sequence
  Description of Artificial Sequence: Synthetic polynucleotide
atgacagttccttatttgaatagcaacagaaatgttgcaagttatttacaaagcaatagtagccaagaaaagactttgaaagagagatttagcgaaatctaccccatccatgctcaagatgtaaggcaattcgttaaagagcatggcaaaactaaaattagcgatgttttattagaacaggtatatggtggtatgagaggtattccagggagcgtatgggaaggttccgttttggacccagaagacggtattcgtttcagaggtcgtacgatcgccgacattcaaaaggacttgcccaaggcaaaaggaagctctcaaccattaccagaagctctcttttggttattgttgactggcgaggttccaactcaagcgcaagttgaaaacttatctgctgatttgatgagtagaagtgaattacctagtcatgtcgttcaacttttggataatttaccaaaggacttacacccaatggctcaattctctattgctgtaactgccttggaaagcgagtctaagtttgctaaggcttatgctcaaggaatttccaagcaagattattggagttatacttttgaagattctttggacttgttgggtaaattgccagttattgcagctaaaatttatcgtaatgtattcaaagatggcaaaatgggtgaagtggacccaaatgccgattatgctaaaaatttggtcaacttgattggttctaaggatgaagatttcgtggacttgatgagactttatttaaccattcattctgatcacgaaggtggtaatgtatctgcacatacatcccatcttgtgggcagtgcattatcttctccttatttatcccttgcatctggtttgaacgggttggctggcccacttcatgggcgtgctaatcaagaagtattggaatggttatttgcacttaaagaagaggtaaatgatgactactctaaagatacgatcgaaaaatatttatgggatactttgaactctggaagagtcattcccggttatggtcatgctgtgttaaggaaaactgatcctcgttatatggctcagcgtaagtttgccatggaccattttccagattatgaattattcaagttagtttcttctatatacgaggtagcacctggcgtattgactgaacatggtaaaaccaaaaatccatggccaaatgtagatgctcactctggtgtcttattacaatattatggattgaaagaatcttctttctataccgttttatttggcgtttccagggcatttggtattcttgctcaattgatcactgatagggccatcggtgcttccattgaaaggccaaagtcctattctactgagaaatacaaggaattggtcaaaaacattgaaagcaaactttga

SEQ ID NO: 1141 - DNA, 474 bp, Saccharomyces cerevisiae
atgttcatacgcgtatgcaaccgtcttatttacactccgactaatgtccttctaattactgtggaagacggccgtataagcgtccttctgtggtttagatatgctataccggcggaactttgttacacacggctcgcgcgaatccttaggggaaaacattgcgctgactttccccagagttgttgccacaacataagccgctttggagtgttgaacaaatccgtccttgggtcattcaatcaatggcttggcggtatctcaaaagagcgcaaactaatagcgcgcacattcgacgcatttatccggtggtcatcgactaggggcgaagaggtcacgacctattttttcttgcagaaaaaaagtgtgaccttttccgtagctagacgtctatcagggcgtcagcaatgggaggcacagcggaaaaacaataacaatggtaagcgcaattaccttttgagcgttacattcgtatga

SEQ ID NO: 1142 - DNA, 474 bp, Artificial Sequence
  Description of Artificial Sequence: Synthetic polynucleotide
atgttcatacgcgtatgcaaccgtcttatttacactccgactaatgtccttttgattactgtggaagacggccgtataagcgtccttttatggtttagatatgctataccggcggaactttgttacacaagactcgcgaggatccttaggggaaaacattgcgctgactttccccagagttgttgccacaacataagccgctttggagtgttgaacaaatccgtccttgggtctttcaatcaatggcttggcggtatctccaaagagcgcaaattgatagcgcgcacattcgacgcatttatcagatggtccagcactaggggcgaagaggtcacgacctattttttcttgcagaaaaaaagtgtgaccttttccgtagctagacgtttaagtgggcgtcagcaatgggaggcacagagaaaaaacaataacaatggtaagcgcaattaccttttgagcgttacattcgtatga

SEQ ID NO: 1143 - DNA, 720 bp, Saccharomyces cerevisiae
atgcagcctcatttagacaacaacagtaataatgacgatgtcaaattggatacattaggggaacaaaatgtgttatcatccgcagaaaatatcactttacctgaagacacctttaaatcatatatgacctacttgctgtacgagatggctcattacaaaccgatgatattttccttcttggcactttcagtttcaattttaatagttgtgatctttcataatgttaaagcttgtgatgtcgtttttggtttttcaattttcgtcacttctattttgtttttgtctacgttgattccgtttaatgtgtatatctcggatgagggtttcagaattaagcttttgctggaagttatcacccacaggccagcggtaaagggaaaagaatggagagcaatcacagacaatatgaatcaatatttacttgataatggtttatggagtactcgctattacttttatagtagtgaaagatgctacaaattcttcagatttcttgtgaaagaaaaacccccaggtgtgaatgtaaattcatcggtaaaggacgccacaagtacgcagatagatgcaccagcaaatgaggcttcaaatgaggtaataaaatgctttagtttcagttctgacccaatattcgaagcatactttgttaaagcagtagaagttgagaaacaagcacaacaggaatattggagaaagcaatatcctgacgccgatataccatga

SEQ ID NO: 1144 - DNA, 720 bp, Artificial Sequence
  Description of Artificial Sequence: Synthetic polynucleotide
atgcagcctcatttagacaacaacagtaataatgacgatgtcaaattggatacattaggggaacaaaatgtgttatcttccgcagaaaatatcactttacctgaagacacctttaaaagttatatgacctacttgttgtacgagatggctcattacaaaccgatgatattttccttcttggcactttctgtttctattttaatagttgtgatctttcataatgttaaagcttgtgatgtcgtttttggtttttctattttcgtcacttctattttgtttttgtctacgttgattccgtttaatgtgtatatcagtgatgagggtttcagaattaagcttttgttggaagttatcacccacaggccagcggtaaagggaaaagaatggagagcaatcacagacaatatgaatcaatatttacttgataatggtttatggagtactcgctattacttttatagtagtgaaagatgctacaaattcttcagatttcttgtgaaagaaaaacccccaggtgtgaatgtaaattcttctgtaaaggacgccacaagtacgcagatagatgcaccagcaaatgaggcttctaatgaggtaataaaatgctttagtttcagttctgacccaatattcgaagcatactttgttaaagcagtagaagttgagaaacaagcacaacaggaatattggagaaagcaatatcctgacgccgatataccatga

SEQ ID NO: 1145 - DNA, 1812 bp, Saccharomyces cerevisiae
atgactggtatgaatgataataatgccgctattcctcagcaaactccaaggaaacatgcgctatcttctaaagttatgcaactttttagaagcggttcaagatcatctaggcagggaaaggcctcatcgaatatccagccaccttctaatataaacacaaacgttccatcggcgtctaaatcagccaaatttggtttacataccccaaccactgctactcctagggtagtttctaatccttctaatactgcaggtgtgagtaaaccgggcatgtatatgcccgaatattaccagtcggcatcaccatcgcactctagttcatccgcatcattaaacaaccatattgatattaacacctctaagtcatcatcagctgcttctttaacttcgtcagtatcagctttatccttatcacccacatcagccataaatattagctccaaaagtttgagcccaaagttctctcatcatagtaacagcaatactgctattacacccgcgcctactcccactgcttcaaatattaataatgtaaataagataaccaatacaagtgcacctatttgtgggaggtttcttgtgcataaagatggtacccatgaacatcacttaaaaaatgctaagagacaagaaaagctaagcacaatgattaaaaacatggttggtgcgagcaaattacgtggtgaggcaaaatctgctgtccctgatataataatggatccaaagacgactttaaaatccaacaagaatcctcctactctttttgcaggcttcatgaagcaggtcgtggatatggatgataaatatccagaaggcgctcccacaagtggcgctttaaattgtcctgaaagggatatatacaggtcagatcaaaaagattccaaaaataatacgcataatatcactactactaaaaaagataggcaatgttttgccgaaaagtatggtcgctgtcaagaagtccttggtaaaggtgcttttggtgtagtaagaatatgtcaaaagaaaaatgtttcttctcaagatggtaataaaagtgaaaagctttatgcagtgaaagagttcaagcgtagaacatccgaatcagcagaaaagtattctaagaggttgacttctgaattttgcatttcttcttcattacaccatacaaatattgttactacactagatcttttccaagatgccaaaggcgagtactgtgaagtaatggaatattgtgcaggtggcgatctattcactttggtcgttgccgccggaaaattagaatatatggaagcagattgtttcttcaagcagcttattagaggtgttgtttatatgcatgaaatgggtgtttgtcatagagatttgaagcctgagaacttactgcttacgcacgatggtgtgctaaaaattacagactttggtaacagcgaatgtttcaagatggcatgggaaaaaaatattcaccttagtggaggcgtttgcggttcatcgccgtacatcgccccagaggaatatatcaaagaagagtttgatccaagacccgtagatatatgggcatgtggtgtcatttatatggcaatgagaactggtagacaattgtggagttctgctgaaaaagacgatccattttatatgaattatttaaaaggacgtaaggaaaagggaggctatgagccaatcgaaagtttaaaaagagccaggtgtaggaatgttatatattcgatgttagatcccgttccgtacagaagaattaacgggaaacaaattttgaacagtgaatggggaagggagataaaatgctgccataatgggcgcgcattgaaataa

SEQ ID NO: 1146 - DNA, 1812 bp, Artificial Sequence
  Description of Artificial Sequence: Synthetic polynucleotide
atgactggtatgaatgataataatgccgctattcctcagcaaactccaaggaaacatgcgctttcttctaaagttatgcaactttttagaagcggttccagatcttctaggcagggaaaggcctcttccaatatccagccaccttctaatataaacacaaacgttccatctgcgtctaaaagtgccaaatttggtttacataccccaaccactgctactcctagggtagtttctaatccttctaatactgcaggtgtgagtaaaccgggcatgtatatgcccgaatattaccagtctgcatctccatctcactctagttcttccgcatctttaaacaaccatattgatattaacacctctaagagttcttctgctgcttctttaacttcttctgtatccgctttatccttatctcccacatctgccataaatattagctccaaaagtttgagcccaaagttctctcatcatagtaacagcaatactgctattacacccgcgcctactcccactgcttctaatattaataatgtaaataagataaccaatacaagtgcacctatttgtgggaggtttcttgtgcataaagatggtacccatgaacatcacttaaaaaatgctaagagacaagaaaagttgagcacaatgattaaaaacatggttggtgcgagcaaattacgtggtgaggcaaaatctgctgtccctgatataataatggatccaaagacgactttaaaatccaacaagaatcctcctactctttttgcaggcttcatgaagcaggtcgtggatatggatgataaatatccagaaggcgctcccacaagtggcgctttaaattgtcctgaaagggatatatacaggtctgatcaaaaagattccaaaaataatacgcataatatcactactactaaaaaagataggcaatgttttgccgaaaagtatggtcgctgtcaagaagtccttggtaaaggtgcttttggtgtagtaagaatatgtcaaaagaaaaatgtttcttctcaagatggtaataaaagtgaaaagctttatgcagtgaaagagttcaagcgtagaacatccgaaagtgcagaaaagtattctaagaggttgacttctgaattttgcatttcttcttctttacaccatacaaatattgttactacattagatcttttccaagatgccaaaggcgagtactgtgaagtaatggaatattgtgcaggtggcgatcttttcactttggtcgttgccgccggaaaattagaatatatggaagcagattgtttcttcaagcagcttattagaggtgttgtttatatgcatgaaatgggtgtttgtcatagagatttgaagcctgagaacttattacttacgcacgatggtgtgttgaaaattacagactttggtaacagcgaatgtttcaagatggcatgggaaaaaaatattcaccttagtggaggcgtttgcggttcttctccgtacatcgccccagaggaatatatcaaagaagagtttgatccaagacccgtagatatatgggcatgtggtgtcatttatatggcaatgagaactggtagacaattgtggagttctgctgaaaaagacgatccattttatatgaattatttaaaaggacgtaaggaaaagggaggctatgagccaatcgaaagtttaaaaagagccaggtgtaggaatgttatatattccatgttagatcccgttccgtacagaagaattaacgggaaacaaattttgaacagtgaatggggaagggagataaaatgctgccataatgggcgcgcattgaaatga

SEQ ID NO: 1147 - DNA, 798 bp, Saccharomyces cerevisiae
atgagttgggaaggttttaagaaagctatcaacagagctggtcacagtgtgataattaagaatgtcgacaagaccattgataaagagtatgacatggaagaacgtcgttataaagttcttcaaagagcaggtgaggcattacaaaaggaagccaaaggtttcttggactcattgagagctgtgacagcatcacagactaccattgccgaggtcatctctaacctctatgacgattcaaaatatgttgctggtggtggttacaacgttggtaactattatttgcaatgtgttcaagattttgatagcgaaactgttaagcaattagacgggcccttaagagaaaccgtactagatccaataacaaagttttcgacgtatttcaaagaaattgaggaggccataaaaaagagagaccataagaaacaagacttcgatgctgcgaaggcaaaagttcgtagattagtggacaaacctgctaaagatgcctctaaactgccaagggctgaaaaagaattgagcttagctaaagatattttcgaaaatcttaataaccaattgaaaactgaactaccacagttagtttcattaagagtaccttactttgacccaagttttgaagctttaatcaagattcagctaaggttctgtactgatggttacactcgtttagcgcagattcaacaatatttggaccaacaatcaagagacgactatgccaatgggttattagacactaaaatcgaagaactattaggacaaatgacaagcctagatatttgtgcgctcgggataaaataa

SEQ ID NO: 1148 - DNA, 798 bp, Artificial Sequence
  Description of Artificial Sequence: Synthetic polynucleotide
atgagttgggaaggttttaagaaagctatcaacagagctggtcacagtgtgataattaagaatgtcgacaagaccattgataaagagtatgacatggaagaacgtcgttataaagttcttcaaagagcaggtgaggcattacaaaaggaagccaaaggtttcttggactctttgagagctgtgacagcatcccagactaccattgccgaggtcatctctaacctctatgacgattctaaatatgttgctggtggtggttacaacgttggtaactattatttgcaatgtgttcaagattttgatagcgaaactgttaagcaattagacgggcccttaagagaaaccgtattggatccaataacaaagttttctacgtatttcaaagaaattgaggaggccataaaaaagagagaccataagaaacaagacttcgatgctgcgaaggcaaaagttcgtagattagtggacaaacctgctaaagatgcctctaaattaccaagggctgaaaaagaattgagcttagctaaagatattttcgaaaatcttaataaccaattgaaaactgaattaccacagttagtttctttaagagtaccttactttgacccaagttttgaagctttaatcaagattcagttgaggttctgtactgatggttacactcgtttagcgcagattcaacaatatttggaccaacaatctagagacgactatgccaatgggttattagacactaaaatcgaagaattattaggacaaatgacaagcttagatatttgtgcgctcgggataaaatga

SEQ ID NO: 1149 - DNA, 852 bp, Saccharomyces cerevisiae
atgtctgacaaggaacaaacgagcggaaacacagatttggagaatgcaccagcaggatactatagttcccatgataacgacgttaatggcgttgcagaagatgaacgtccatctcatgattcgttgggcaagatttacactggaggtgataacaatgaatatatctatattgggcgtcaaaagtttttgaagagcgacttataccaagcctttggtggtaccttgaatccagggttagctcctgctccagtgcacaaatttgctaatcctgcgcccttaggtctttcagccttcgcgttgacgacatttgtgctgtccatgttcaatgcgagagcgcaagggatcactgttcctaatgttgtcgtcggttgtgctatgttttatggtggtttggtgcaattgattgctggtatttgggagatagctttggaaaatacttttggtggtaccgcattatgttcttacggtgggttttggttgagtttcgctgcaatttacattccttggtttggtatcttggaagcttacgaagacaatgaatctgatttgaataatgctttaggattttatttgttggggtgggccatctttacgtttggtttaaccgtttgtaccatgaaatccactgttatgttctttttgttgttcttcttactagcattaactttcctactgttgtctattggtcactttgctaatagacttggtgtcacaagagctggtggtgtcctgggagttgttgttgctttcattgcttggtacaacgcatatgcaggtgttgctacaaagcagaattcatatgtactggctcgtccattcccattaccatctactgaaagggtaatcttttaa

SEQ ID NO: 1150 - DNA, 852 bp, Artificial Sequence
  Description of Artificial Sequence: Synthetic polynucleotide
atgtctgacaaggaacaaacgagcggaaacacagatttggagaatgcaccagcaggatactatagttcccatgataacgacgttaatggcgttgcagaagatgaacgtccatctcatgattctttgggcaagatttacactggaggtgataacaatgaatatatctatattgggcgtcaaaagtttttgaagagcgacttataccaagcctttggtggtaccttgaatccagggttagctcctgctccagtgcacaaatttgctaatcctgcgcccttaggtctttctgccttcgcgttgacgacatttgtgttatccatgttcaatgcgagagcgcaagggatcactgttcctaatgttgtcgtcggttgtgctatgttttatggtggtttggtgcaattgattgctggtatttgggagatagctttggaaaatacttttggtggtaccgcattatgttcttacggtgggttttggttgagtttcgctgcaatttacattccttggtttggtatcttggaagcttacgaagacaatgaatctgatttgaataatgctttaggattttatttgttggggtgggccatctttacgtttggtttaaccgtttgtaccatgaaatccactgttatgttctttttgttgttcttcttattggcattaactttcttattattgtctattggtcactttgctaatagacttggtgtcacaagagctggtggtgtccttggagttgttgttgctttcattgcttggtacaacgcatatgcaggtgttgctacaaagcagaattcttatgtattggctcgtccattcccattaccatctactgaaagggtaatcttttga

SEQ ID NO: 1151 - DNA, 3150 bp, Saccharomyces cerevisiae
atgggaagtcatcgacgttatctctactatagtatattatcatttctattattatcctgctcagtggtacttgcaaaacaagataagaccccattctttgaaggtacttcttcgaaaaattcgcgtctaactgcacaagataagggcaatgatacatgcccgccatgttttaattgtatgctacctatttttgaatgcaaacagttttctgaatgcaattcgtacactggtagatgtgagtgtatagaagggtttgcaggtgatgattgctctctgcccctctgtggcggtctatcaccggatgaaagcggtaataaggatcgtcccataagagcacaaaatgacacctgtcattgtgataacggatggggagggatcaattgtgacgtttgtcaagaagattttgtctgtgatgcgttcatgcctgatcctagtattaaggggacatgttataagaatggtatgattgtagataaagtattttcaggttgtaatgtgaccaatgagaaaattctacagattttgaacggcaaaataccacaaattacatttgcctgtgataaacctaatcaagaatgtaattttcagttttggatagatcagttagaaagcttctattgtggcttaagtgattgtgcctttgaatacgacttggaacagaatacctcccattataagtgtaatgacgttcaatgcaaatgcgttcccgacactgtgttgtgtggtgctaaggggtctatagatatctcggatttcctgacagagacaataaaagggccaggagatttcagctgtgatttagaaacaaggcaatgtaaattcagtgagccttctatgaatgatttgatattgaccgtgtttggtgacccttatattactttgaagtgtgaatccggtgaatgtgttcattatagtgagattccaggttacaaatctccttcaaaagatccaacagtgtcatggcaagggaaattggtgttggcattgactgctgtgatggtcctggcactttttacatttgctaccttttacatttctaaatctccgttattcagaaatggattgggttcctcaaagtctcccattcgtttgccagatgaagatgcggtgaataatttcttacaaaatgaagatgacacactggcgacattaagttttgaaaatatcacttatagtgtcccctcgataaattcagatggtgttgaagaaactgtgctgaatgaaataagtggtatcgtgaagcccggccaaatattagctatcatgggtggatctggtgcgggtaaaactactttattagatatcctagcaatgaaacggaaaacaggtcacgtttcgggttccataaaagttaacggtattagtatggaccgtaaatctttctcgaaaataatcgggttcgtcgatcaagatgactttttgctgcccactttgactgtttttgaaaccgtattaaatagtgcgctgttaagattgccaaaagcattgtcattcgaggccaagaaggcaagagtttataaggtgttggaagaactaagaattattgatatcaaagatcgtattattggtaatgaatttgatcgtggtattagtggaggtgaaaaacgccgagtttccattgcatgtgaattagtgacatctccattggttttatttttggatgaacctacatctggtttagatgctagtaatgccaataatgttattgaatgtttggtaaggttatccagcgactataacaggacattggtgctatctattcatcagccaagatcaaatatattttatttattcgataaattggtcctgttaagtaaaggtgagatggtctattccggaaatgccaaaaaagtgtcagaatttttgagaaatgagggatatatctgtccggacaactataatattgctgattatttgattgatattacttttgaagccggtcctcaggggaaaaggagaagaatcagaaacatttccgatttagaagctggtacggatactaacgatattgataatacgatacaccaaacaacatttactagcagtgatggtacaacacagagagagtgggctcatcttgcagctcatagagatgagatcagatctttactcagagatgaagaagatgtagagggaacagatggaaggcgaggtgctactgagattgacttaaataccaaactactacacgataaatataaagatagcgtctattatgcagagctttcacaggagatcgaggaagttttaagcgaaggtgatgaggaaagtaacgttttgaatggagatttacccacaggtcaacaatctgctggttttctgcaacagttatcgatattgaattcaagaagttttaaaaacatgtacagaaaccctaaactattattgggtaattatttactgacgatcctattgagtttattcttgggaacactatattacaacgtctccaatgatatcagcggttttcagaacagaatggggctgttcttctttatactaacgtacttcggttttgttacattcacaggtctcagctcgttcgctctggaaaggatcattttcataaaagaaagatccaataactattactcgccacttgcatactacattagtaagataatgagcgaagtggtcccgctacgtgttgtaccacctatactcttgtcattgattgtttacccaatgactggtttaaacatgaaagacaatgctttttttaaatgtattggaatccttatactgtttaaccttgggatatcgttggaaatcctaaccatcggcataatttttgaagacttgaataactccataatattaagcgtgctggtgcttttgggctcactactgtttagcggactatttatcaatactaagaatattacaaacgtggccttcaagtacctgaaaaacttctctgtgttttactacgcctacgaatctttattgatcaatgaggtcaaaacattgatgctgaaagagagaaagtacggcttaaatattgaagttccaggcgctactatcttgagcacatttggatttgttgtccaaaaccttgtatttgacatcaagatcctggctctgtttaatgtggtgtttttaataatggggtatctagcccttaagtggatagttgtggaacaaaagtag

SEQ ID NO: 1152 - DNA, 3150 bp, Artificial Sequence
  Description of Artificial Sequence: Synthetic polynucleotide
atgggaagtcatcgtcgttatctctactatagtatattatcttttttattattatcctgctctgtggtacttgcaaaacaagataagaccccattctttgaaggtacttcttctaaaaattctcgtttgactgcacaagataagggcaatgatacatgcccgccatgttttaattgtatgttgcctatttttgaatgcaaacagttttctgaatgcaattcttacactggtagatgtgagtgtatagaagggtttgcaggtgatgattgctctttacccctctgtggcggtttatctccggatgaaagcggtaataaggatcgtcccataagagcacaaaatgacacctgtcattgtgataacggatggggagggatcaattgtgacgtttgtcaagaagattttgtctgtgatgcgttcatgcctgatcctagtattaaggggacatgttataagaatggtatgattgtagataaagtattttctggttgtaatgtgaccaatgagaaaattttacagattttgaacggcaaaataccacaaattacatttgcctgtgataaacctaatcaagaatgtaattttcagttttggatagatcagttagaaagcttctattgtggcttaagtgattgtgcctttgaatacgacttggaacagaatacctcccattataagtgtaatgacgttcaatgcaaatgcgttcccgacactgtgttgtgtggtgctaaggggtctatagatatcagtgatttcttaacagagacaataaaagggccaggagatttcagctgtgatttagaaacaaggcaatgtaaattcagtgagccttctatgaatgatttgatattgaccgtgtttggtgacccttatattactttgaagtgtgaatccggtgaatgtgttcattatagtgagattccaggttacaaatctccttccaaagatccaacagtgtcttggcaagggaaattggtgttggcattgactgctgtgatggtcttggcactttttacatttgctaccttttacatttctaaatctccgttattcagaaatggattgggttcctccaagtctcccattcgtttgccagatgaagatgcggtgaataatttcttacaaaatgaagatgacacattagcgacattaagttttgaaaatatcacttatagtgtcccctccataaattctgatggtgttgaagaaactgtgttgaatgaaataagtggtatcgtgaagcccggccaaatattagctatcatgggtggatctggtgcgggtaaaactactttattagatatcttggcaatgaaaagaaaaacaggtcacgtttctggttccataaaagttaacggtattagtatggaccgtaaatctttctccaaaataatcgggttcgtcgatcaagatgactttttgttgcccactttgactgtttttgaaaccgtattaaatagtgcgttattaagattgccaaaagcattgagtttcgaggccaagaaggcaagagtttataaggtgttggaagaattgagaattattgatatcaaagatcgtattattggtaatgaatttgatcgtggtattagtggaggtgaaaaacgccgtgtttccattgcatgtgaattagtgacatctccattggttttatttttggatgaacctacatctggtttagatgctagtaatgccaataatgttattgaatgtttggtaaggttatccagcgactataacaggacattggtgttatctattcatcagccaagatctaatatattttatttattcgataaattggtccttttaagtaaaggtgagatggtctattccggaaatgccaaaaaagtgtctgaatttttgagaaatgagggatatatctgtccggacaactataatattgctgattatttgattgatattacttttgaagccggtcctcaggggaaaaggagaagaatcagaaacatttccgatttagaagctggtacggatactaacgatattgataatacgatacaccaaacaacatttactagcagtgatggtacaacacagagagagtgggctcatcttgcagctcatagagatgagatcagatctttactcagagatgaagaagatgtagagggaacagatggaaggagaggtgctactgagattgacttaaataccaaattattacacgataaatataaagatagcgtctattatgcagagctttctcaggagatcgaggaagttttaagcgaaggtgatgaggaaagtaacgttttgaatggagatttacccacaggtcaacaatctgctggttttttgcaacagttatctatattgaattctagaagttttaaaaacatgtacagaaaccctaaattattattgggtaattatttattgacgatcttgttgagtttattcttgggaacattatattacaacgtctccaatgatatcagcggttttcagaacagaatggggcttttcttctttatattaacgtacttcggttttgttacattcacaggtctcagctctttcgctttggaaaggatcattttcataaaagaaagatccaataactattactctccacttgcatactacattagtaagataatgagcgaagtggtcccgttacgtgttgtaccacctatactcttgtctttgattgtttacccaatgactggtttaaacatgaaagacaatgctttttttaaatgtattggaatccttatattgtttaaccttgggatatctttggaaatcttgaccatcggcataatttttgaagacttgaataactccataatattaagcgtgttagtgcttttgggctccttactttttagcggattatttatcaatactaagaatattacaaacgtggccttcaagtacttgaaaaacttctctgtgttttactacgcctacgaatctttattgatcaatgaggtcaaaacattgatgttgaaagagagaaagtacggcttaaatattgaagttccaggcgctactatcttgagcacatttggatttgttgtccaaaaccttgtatttgacatcaagatcttggctttgtttaatgtggtgtttttaataatggggtatttggcccttaagtggatagttgtggaacaaaagtga

SEQ ID NO: 1153 - DNA, 1251 bp, Saccharomyces cerevisiae
atgtctttatcttcaaagttgtctgtccaagatttggacttgaaggacaagcgtgtcttcatcagagttgacttcaacgtcccattggacggtaagaagatcacttctaaccaaagaattgttgctgctttgccaaccatcaagtacgttttggaacaccacccaagatacgttgtcttggcttctcacttgggtagaccaaacggtgaaagaaacgaaaaatactctttggctccagttgctaaggaattgcaatcattgttgggtaaggatgtcaccttcttgaacgactgtgtcggtccagaagttgaagccgctgtcaaggcttctgccccaggttccgttattttgttggaaaacttgcgttaccacatcgaagaagaaggttccagaaaggtcgatggtcaaaaggtcaaggcttccaaggaagatgttcaaaagttcagacacgaattgagctctttggctgatgtttacatcaacgatgccttcggtaccgctcacagagctcactcttctatggtcggtttcgacttgccacaacgtgctgccggtttcttgttggaaaaggaattgaagtacttcggtaaggctttggagaacccaaccagaccattcttggccatcttaggtggtgccaaggttgctgacaagattcaattgattgacaacttgttggacaaggtcgactctatcatcattggtggtggtatggctttcaccttcaagaaggttttggaaaacactgaaatcggtgactccatcttcgacaaggctggtgctgaaatcgttccaaagttgatggaaaaggccaaggccaagggtgtcgaagtcgtcttgccagtcgacttcatcattgctgatgctttctctgctgatgccaacaccaagactgtcactgacaaggaaggtattccagctggctggcaagggttggacaatggtccagaatctagaaagttgtttgctgctactgttgcaaaggctaagaccattgtctggaacggtccaccaggtgttttcgaattcgaaaagttcgctgctggtactaaggctttgttagacgaagttgtcaagagctctgctgctggtaacaccgtcatcattggtggtggtgacactgccactgtcgctaagaagtacggtgtcactgacaagatctcccatgtctctactggtggtggtgcttctttggaattattggaaggtaaggaattgccaggtgttgctttcttatccgaaaagaaataa

SEQ ID NO: 1154 - DNA, 1251 bp, Artificial Sequence
  Description of Artificial Sequence: Synthetic polynucleotide
atgtctttatcttccaagttgtctgtccaagatttggacttgaaggacaagcgtgtcttcatcagagttgacttcaacgtcccattggacggtaagaagatcacttctaaccaaagaattgttgctgctttgccaaccatcaagtacgttttggaacaccacccaagatacgttgtcttggcttctcacttgggtagaccaaacggtgaaagaaacgaaaaatactctttggctccagttgctaaggaattgcaatctttgttgggtaaggatgtcaccttcttgaacgactgtgtcggtccagaagttgaagccgctgtcaaggcttctgccccaggttccgttattttgttggaaaacttgcgttaccacatcgaagaagaaggttccagaaaggtcgatggtcaaaaggtcaaggcttccaaggaagatgttcaaaagttcagacacgaattgagctctttggctgatgtttacatcaacgatgccttcggtaccgctcacagagctcactcttctatggtcggtttcgacttgccacaacgtgctgccggtttcttgttggaaaaggaattgaagtacttcggtaaggctttggagaacccaaccagaccattcttggccatcttaggtggtgccaaggttgctgacaagattcaattgattgacaacttgttggacaaggtcgactctatcatcattggtggtggtatggctttcaccttcaagaaggttttggaaaacactgaaatcggtgactccatcttcgacaaggctggtgctgaaatcgttccaaagttgatggaaaaggccaaggccaagggtgtcgaagtcgtcttgccagtcgacttcatcattgctgatgctttctctgctgatgccaacaccaagactgtcactgacaaggaaggtattccagctggctggcaagggttggacaatggtccagaatctagaaagttgtttgctgctactgttgcaaaggctaagaccattgtctggaacggtccaccaggtgttttcgaattcgaaaagttcgctgctggtactaaggctttgttagacgaagttgtcaagagctctgctgctggtaacaccgtcatcattggtggtggtgacactgccactgtcgctaagaagtacggtgtcactgacaagatctcccatgtctctactggtggtggtgcttctttggaattattggaaggtaaggaattgccaggtgttgctttcttatccgaaaagaaatga

SEQ ID NO: 1155 - DNA, 1749 bp, Saccharomyces cerevisiae
atgtctctaaagggtaaatttttcgcctttttacctaatcctaacacatcttccaataagttctttaagagtatattggagaaaaagggcgccacaattgtgtcaagtattcaaaattgtcttcaatctagccgtaaggaagtggtcattttgattgaggactcctttgttgattctgatatgcatttgactcagaaagatattttccaaagggaagcaggcttaaatgatgtcgatgaatttcttggtaagattgaacagtcaggcattcaatgtgtgaaaaccagttgcatcacaaagtgggtccagaatgataaatttgcgtttcaaaaagatgatttgattaaatttcaaccatccattatcgttatatcagataacgctgatgacggacaaagttctactgataaagagagtgagatttcaactgacgtagaaagtgaaaggaatgatgacagcaacaataaagatatgatacaagcttcaaaacctcttaagcgactcttacagggggataaaggaagagcttcccttgttactgacaaaacgaagtacaaaaacaatgaattgattatcggagcgttgaaaaggttaacaaaaaaatatgagatcgaaggtgagaaatttcgtgcaagaagttatagactggctaaacagtcgatggaaaattgcgatttcaatgttcgttccggtgaagaagcacatactaaattaaggaatatcgggcctagtattgccaaaaaaatacaagttatattagatacgggagttttaccaggtttaaatgattcagtgggattagaagacaagttgaaatacttcaaaaattgttacggcattgggtcggaaattgctaaacgctggaatcttctaaattttgaaagcttttgtgttgcagctaagaaggacccagaggagtttgtatcagattggacaattttatttggttggtcatattacgacgattggttatgcaagatgtctcggaatgaatgtttcacacatttaaagaaggttcaaaaagcgctgcgtggcattgatcctgaatgccaagtcgaattacagggaagttataataggggctattccaagtgtggtgacattgatcttttatttttcaagccgttttgtaatgacacgaccgagttggcaaaaatcatggaaacgctttgtattaagttgtacaaggatggctatatccattgttttttacagctaacgccaaacttggaaaagctattcttaaaaagaatagtggagagatttcgtacagcgaagattgttgggtatggagaaagaaagaggtggtattcttctgagataatcaagaaatttttcatgggagtcaaattgtctccaagagaattagaagaactgaaagaaatgaaaaatgatgaaggcacattgttaattgaagaagaagaagaagaagaaacaaaattaaaaccgattgaccaatatatgtctctgaatgccaaggatggaaattattgcagaagattagactttttttgttgcaagtgggatgagcttggagcaggaagaatacactatactggatctaaagagtacaatagatggataagaatattggcagcgcaaaaaggcttcaagcttacacaacacggtttatttcgaaataatatccttctcgaaagctttaacgaacgcagaattttcgagttattaaacttaaaatacgctgaacccgaacatagaaatatcgaatgggaaaaaaaaactgcataa

SEQ ID NO: 1156 - DNA, 1749 bp, Artificial Sequence
  Description of Artificial Sequence: Synthetic polynucleotide
atgtctttgaagggtaaatttttcgcctttttacctaatcctaacacatcttccaataagttctttaagagtatattggagaaaaagggcgccacaattgtgtccagtattcaaaattgtcttcaatctagccgtaaggaagtggtcattttgattgaggactcctttgttgattctgatatgcatttgactcagaaagatattttccaaagggaagcaggcttaaatgatgtcgatgaatttcttggtaagattgaacagtctggcattcaatgtgtgaaaaccagttgcatcacaaagtgggtccagaatgataaatttgcgtttcaaaaagatgatttgattaaatttcaaccatccattatcgttatatctgataacgctgatgacggacaaagttctactgataaagagagtgagatttctactgacgtagaaagtgaaaggaatgatgacagcaacaataaagatatgatacaagcttccaaacctcttaagagactcttacagggggataaaggaagagcttcccttgttactgacaaaacgaagtacaaaaacaatgaattgattatcggagcgttgaaaaggttaacaaaaaaatatgagatcgaaggtgagaaatttcgtgcaagaagttatagattggctaaacagtccatggaaaattgcgatttcaatgttcgttccggtgaagaagcacatactaaattaaggaatatcgggcctagtattgccaaaaaaatacaagttatattagatacgggagttttaccaggtttaaatgattctgtgggattagaagacaagttgaaatacttcaaaaattgttacggcattgggagtgaaattgctaaacgctggaatcttttgaattttgaaagcttttgtgttgcagctaagaaggacccagaggagtttgtatctgattggacaattttatttggttggagttattacgacgattggttatgcaagatgtctagaaatgaatgtttcacacatttaaagaaggttcaaaaagcgttgcgtggcattgatcctgaatgccaagtcgaattacagggaagttataataggggctattccaagtgtggtgacattgatcttttatttttcaagccgttttgtaatgacacgaccgagttggcaaaaatcatggaaacgctttgtattaagttgtacaaggatggctatatccattgttttttacagttaacgccaaacttggaaaagcttttcttaaaaagaatagtggagagatttcgtacagcgaagattgttgggtatggagaaagaaagaggtggtattcttctgagataatcaagaaatttttcatgggagtcaaattgtctccaagagaattagaagaattgaaagaaatgaaaaatgatgaaggcacattgttaattgaagaagaagaagaagaagaaacaaaattaaaaccgattgaccaatatatgtctttgaatgccaaggatggaaattattgcagaagattagactttttttgttgcaagtgggatgagcttggagcaggaagaatacactatactggatctaaagagtacaatagatggataagaatattggcagcgcaaaaaggcttcaagcttacacaacacggtttatttagaaataatatccttctcgaaagctttaacgaacgcagaattttcgagttattaaacttaaaatacgctgaacccgaacatagaaatatcgaatgggaaaaaaaaactgcatga

SEQ ID NO: 1157 - DNA, 954 bp, Saccharomyces cerevisiae
atgaaaaccattattatttcagattttgatgaaacaatcacaagagttgacacaatctgcaccattgctaaattaccgtatctactgaacccgcggttgaaacctgagtggggtcattttaccaagacatatatggacggataccataaatacaaatacaatggaacgagatcactgccgttgttatcttcaggcgtacctacgataatttcgcagtctaacttcaataagttgtttgcggacgaattaaaatatcaaaatcataacagggttgttgagttaaatagtgtaaatgaaattacaaaacaacagatttttaagtcgatttctttggatcaaatgaaaacgttcgccagagatcagaatcacgaagattgtttactaagagatggtttcaaaacgttttgctcttcagttgtcaaaaattttgaaagtgatttttacgttttatctataaattggtcaaaagagtttattcatgaagtcattggtgacagaagacttaaaaatagtcatattttttgtaacgatctaaaaaaagttagtgacaagtgttctcaaagctacaatggtgaatttgattgtcggttattgacaggctctgataaggtcaagatactgggtgaaatattagataagatcgactcaggttgcaataaagaaggaaattcttgcagctattggtatataggggatagtgagactgacttgttgtccatattacatccatctactaatggtgtactgctaataaacccgcaagaaaatccttccaaattcataaaaattaccgaaaagattattggtatcccaaaggataaaatctcgagttttgaagctgataatggtccagcgtggttacagttttgtgaaaaggaaggcggtaaaggtgcctaccttgtgaaatcctgggactctttaaaagatttgatcatgcaggtaacaaaaatgtag

SEQ ID NO: 1158 - DNA, 954 bp, Artificial Sequence
  Description of Artificial Sequence: Synthetic polynucleotide
atgaaaaccattattatttctgattttgatgaaacaatcacaagagttgacacaatctgcaccattgctaaattaccgtatttattaaacccgcgtttgaaacctgagtggggtcattttaccaagacatatatggacggataccataaatacaaatacaatggaacgagatctttaccgttgttatcttctggcgtacctacgataatttctcagtctaacttcaataagttgtttgcggacgaattaaaatatcaaaatcataacagggttgttgagttaaatagtgtaaatgaaattacaaaacaacagatttttaagtctatttctttggatcaaatgaaaacgttcgccagagatcagaatcacgaagattgtttattaagagatggtttcaaaacgttttgctcttctgttgtcaaaaattttgaaagtgatttttacgttttatctataaattggtccaaagagtttattcatgaagtcattggtgacagaagacttaaaaatagtcatattttttgtaacgatttgaaaaaagttagtgacaagtgttctcaaagctacaatggtgaatttgattgtagattattgacaggctctgataaggtcaagatattaggtgaaatattagataagatcgactctggttgcaataaagaaggaaattcttgcagctattggtatataggggatagtgagactgacttgttgtccatattacatccatctactaatggtgtattattgataaacccgcaagaaaatccttccaaattcataaaaattaccgaaaagattattggtatcccaaaggataaaatctccagttttgaagctgataatggtccagcgtggttacagttttgtgaaaaggaaggcggtaaaggtgcctaccttgtgaaatcctgggactctttaaaagatttgatcatgcaggtaacaaaaatgtga

SEQ ID NO: 1159 - DNA, 873 bp, Saccharomyces cerevisiae
atgtccgaaaatcacgttcctgcctggaaaagaattgctttgaagagacagactataagcagtggtgacgaaagtaaagaaaaaggccaatccaatctaatagatgatgatccactaaatatcactacgcatttatccactggtaatttgacaaagaaagagaaaaaaagaatcattaatggtgagagcaaatcctctaccaaaaaagggaagcgtgtgtcgaaaccagggacgaagaagaaggaaaaattgtcaaaggatgaaaagaattcgaaaaaaaataaaattcttaaagatcaattacgttacctgatagaatttttcaggacaaagtctgagagcaagtttcccaccggaatcctagaattggaaagtgtaaaagaaaattacggcgactccctgatcaaagacgagccatcagagtctggtgttgttgaagtttggaaattttccaagcaaaagcaaaattggcttattaagcattttttcaacttggacgaaatcccctcagtatataatgatcttttgcttttatatttcagggacttacaaggtaaatcaaaagaagaactaatatcaaaatgcaaaggaaaactgaagcaatggaacgactatgtggaagatcaagaaacaaaaataaaagcgttaattgcagaggataaggctagcgaaccaattaatggtgaagaaaaagaagaaggtgaaaaagacggtaatgccgaacaagggaagcaaaaagaggtacaagacgagcaagaggaagtacaaatgccgaataaagagcttgttcaaagaagtctgaaattactagaaatttggaagaatgatgactcggagcagatagaacttaagaatttcttcgttgatgtttaa

SEQ ID NO: 1160 - DNA, 873 bp, Artificial Sequence
  Description of Artificial Sequence: Synthetic polynucleotide
atgtccgaaaatcacgttcctgcctggaaaagaattgctttgaagagacagactataagcagtggtgacgaaagtaaagaaaaaggccaatccaatttgatagatgatgatccattgaatatcactacgcatttatccactggtaatttgacaaagaaagagaaaaaaagaatcattaatggtgagagcaaatcctctaccaaaaaagggaagcgtgtgtctaaaccagggacgaagaagaaggaaaaattgtccaaggatgaaaagaattctaaaaaaaataaaattcttaaagatcaattacgttacttgatagaatttttcaggacaaagtctgagagcaagtttcccaccggaatcttggaattggaaagtgtaaaagaaaattacggcgactccttaatcaaagacgagccaagtgagtctggtgttgttgaagtttggaaattttccaagcaaaagcaaaattggcttattaagcattttttcaacttggacgaaatcccctctgtatataatgatcttttgcttttatatttcagggacttacaaggtaaatctaaagaagaattgatatccaaatgcaaaggaaaattgaagcaatggaacgactatgtggaagatcaagaaacaaaaataaaagcgttaattgcagaggataaggctagcgaaccaattaatggtgaagaaaaagaagaaggtgaaaaagacggtaatgccgaacaagggaagcaaaaagaggtacaagacgagcaagaggaagtacaaatgccgaataaagagcttgttcaaagaagtttgaaattattggaaatttggaagaatgatgactctgagcagatagaacttaagaatttcttcgttgatgtttga

SEQ ID NO: 1161 - DNA, 2862 bp, Saccharomyces cerevisiae
atgctgatcatcaatgggaagatcatccctatagctcatactatttgtgcattctccgccttctttgcagctttggtcactggttattcattacattttcataaaattgtaaccaatgcacattatacgtatccagatgagtggtttcctagtgtatcagccactatcggggaccgctatccggaacgttctattttccaaatcttaatagctctaactgcttttccaagatttttactgctactaggtcactactacttgaaccaatctaaggtatgcttccttgtcggtgtactccggacagtctcttgcggtggttgggtatacattacaagtacagatgaccacgatattcatgatatatttatgatcacatacattgttttaacgttaccatgggatataatgattacccgctattctagtcctttaacttcgaagaacaaagggttgactgctacaattttttttggaacattgttcccgatgatttactggtacattcagcactccgtccaacagagagctggggcatattctatatatgcttatttcgaatggtctctgattcttttagatattgcatttgatgcatttgcttacgctgatttcaaaaagatagatattgttctcgcttttaatgagaaacccggtaataccagttttttccaaattagagactctagtcccataaattatggagaagaaaaaagttcagaattgcagaaaagtggtgaaaagaaggttgaaaaggaaaaacccgttgctagaagcgcaactggttcatatttcaggtttgactcttttttttacttactaacaaatatttttaacggttttcttttctggtcgaacgttacgtccctgttatgtagtatttggcatttcccgctatggtatatgggaatctcaggttatgaagctgcaatattgggttatttgggacccattttcttatatctgccgttcgtttctgaagccttcacgcaatatggtgtacttttaggaggtattattgccattggtgcctatattgttcagatgccagaattaaggttgatttctgtagctgtgggaacttccattaccgttgcaacgtttgtacaaaatctaagatatatcacaaatgcggagactagtttctcttttgctctaacttggctgttaggtcttgttgcatctgtgatcttgaaaatggggttctataccaacaatccaacttgggtcattttagatgaacgtaatggtgggtataataagacagctctcgtgcttactgttttattcggcatgctgtcgccttatgttaattcaattaatttcgaagggaaaaggaatgctcaagcaaaatctgcttcgttgattggcaaattatttttggctgttggttttggctcgttgttattcggaattcatcagttattgacggattcttctactactatttattgggcatgggaaggttacaatgaatcacacggtcccttgccatggccttggggcgccttaacttgtacggtcatgttatttgcttctttgagttctgtgaagtttatgggcaagccattagttccatgtttgttgcttctcatatccactgctgtactttcagctagaagcattacacaatggcctaaatatattttcggtggtttattgtacgctatcgctatgctttggttagttccttcgtatttttctgcattaggccaagttcaaaacatatgggtttatgtcctatcattctccgtttatattatctttgtccttgcccatgtttgggtcgttgcatacgcatttgttccaatgggctgggtactgagggagaagattgagacggttcttgccttttcttccacatttatcattattggtgctttaacatgcaaaaaccttaacattcaactggtgactatgggcaaaaaattcttcatttatgttttcttctttgccgtggccctgctatcactaacagctaggttcgtgtatgatattagacctacaggaattcctcagccttatcatccagattctcagttgattacagctggtatttggactatccactttggtctcgataatgatatgtgggcatctgaagacagaatgatcaaccttattaaagatatggaactagatgtggtaggtctactagaaacagatacacaaagaattaccatggggaacagggatctaactagcaaactagctcatgatttgaatatgtatgcagatttcggaccaggtccaaataaacatacctggggctgtgttcttctttctaaattccctatcgtaaattctacgcatcatttattgccctctccagttggggaacttgcgccagccattcatgccacacttcaaacgtacaatgacactctcgttgacgtctttgtattccatagtggacaagaagaggatgaagaggatagaagactgcaaagtaactacatggctaagctcatgggcaatacgactcgcccagctattttattaagttacttagttgttgatccaggtgaaggcaactacaatacgtacgttagtgaaacatccggaatgcacgacattgatccttctgacgatgatagatggtgtgagtatatcttgtataggggcttgagaagaacaggatatgctagagttgcaagaggaacgataaccgatacggagctacaagttggtaagttccaagttttgagtgagcaagcgttagtagagcactcggattctatgtatgaatacggtcatatgagtgaaccggaatatgaggacatgaaatttccagataagtttttaggcgaaggtgagaggggtcacttctaccatgtttttgatgagccacgttattacttataa

SEQ ID NO: 1162 - DNA, 2862 bp, Artificial Sequence
  Description of Artificial Sequence: Synthetic polynucleotide
atgttgatcatcaatgggaagatcatccctatagctcatactatttgtgcattctccgccttctttgcagctttggtcactggttattctttacattttcataaaattgtaaccaatgcacattatacgtatccagatgagtggtttcctagtgtatctgccactatcggggaccgctatccggaacgttctattttccaaatcttaatagctttgactgcttttccaagatttttattattattgggtcactactacttgaaccaatctaaggtatgcttccttgtcggtgtactcaggacagtctcttgcggtggttgggtatacattacaagtacagatgaccacgatattcatgatatatttatgatcacatacattgttttaacgttaccatgggatataatgattacccgctattctagtcctttaacttctaagaacaaagggttgactgctacaattttttttggaacattgttcccgatgatttactggtacattcagcactccgtccaacagagagctggggcatattctatatatgcttatttcgaatggtctttgattcttttagatattgcatttgatgcatttgcttacgctgatttcaaaaagatagatattgttctcgcttttaatgagaaacccggtaataccagttttttccaaattagagactctagtcccataaattatggagaagaaaaaagttctgaattgcagaaaagtggtgaaaagaaggttgaaaaggaaaaacccgttgctagaagcgcaactggttcttatttcaggtttgactcttttttttacttattaacaaatatttttaacggttttcttttctggagcaacgttacgtccttattatgtagtatttggcatttcccgttatggtatatgggaatcagtggttatgaagctgcaatattgggttatttgggacccattttcttatatttaccgttcgtttctgaagccttcacgcaatatggtgtacttttaggaggtattattgccattggtgcctatattgttcagatgccagaattaaggttgatttctgtagctgtgggaacttccattaccgttgcaacgtttgtacaaaatttaagatatatcacaaatgcggagactagtttctcttttgctttgacttggttgttaggtcttgttgcatctgtgatcttgaaaatggggttctataccaacaatccaacttgggtcattttagatgaacgtaatggtgggtataataagacagctctcgtgcttactgttttattcggcatgctttctccttatgttaattctattaatttcgaagggaaaaggaatgctcaagcaaaatctgcttctttgattggcaaattatttttggctgttggttttggctctttgttattcggaattcatcagttattgacggattcttctactactatttattgggcatgggaaggttacaatgaatctcacggtcccttgccatggccttggggcgccttaacttgtacggtcatgttatttgcttctttgagttctgtgaagtttatgggcaagccattagttccatgtttgttgcttctcatatccactgctgtactttctgctagaagcattacacaatggcctaaatatattttcggtggtttattgtacgctatcgctatgctttggttagttccttcttatttttctgcattaggccaagttcaaaacatatgggtttatgtcctttctttctccgtttatattatctttgtccttgcccatgtttgggtcgttgcatacgcatttgttccaatgggctgggtattgagggagaagattgagacggttcttgccttttcttccacatttatcattattggtgctttaacatgcaaaaaccttaacattcaattagtgactatgggcaaaaaattcttcatttatgttttcttctttgccgtggccttgttaagtttgacagctaggttcgtgtatgatattagacctacaggaattcctcagccttatcatccagattctcagttgattacagctggtatttggactatccactttggtctcgataatgatatgtgggcatctgaagacagaatgatcaaccttattaaagatatggaattagatgtggtaggtttattggaaacagatacacaaagaattaccatggggaacagggatttgactagcaaattggctcatgatttgaatatgtatgcagatttcggaccaggtccaaataaacatacctggggctgtgttcttctttctaaattccctatcgtaaattctacgcatcatttattgccctctccagttggggaacttgcgccagccattcatgccacacttcaaacgtacaatgacactctcgttgacgtctttgtattccatagtggacaagaagaggatgaagaggatagaagattacaaagtaactacatggctaagctcatgggcaatacgactcgcccagctattttattaagttacttagttgttgatccaggtgaaggcaactacaatacgtacgttagtgaaacatccggaatgcacgacattgatccttctgacgatgatagatggtgtgagtatatcttgtataggggcttgagaagaacaggatatgctagagttgcaagaggaacgataaccgatacggagttacaagttggtaagttccaagttttgagtgagcaagcgttagtagagcacagtgattctatgtatgaatacggtcatatgagtgaaccggaatatgaggacatgaaatttccagataagtttttaggcgaaggtgagaggggtcacttctaccatgtttttgatgagccacgttattacttatga

SEQ ID NO: 1163 - DNA, 666 bp, Saccharomyces cerevisiae
atgcgatataataattatgacaactctggaagttccttcttaactagagtagttaaaaagtcagatatggagaaaacgttattattaaatagagaaattgatgactggaagtcaaacgataaaaagaaggcatataaggaacgcggaagagtttatgcaagttgctcatttattgaagtatccttttctcaaataagggctgttgatgttgaaaaaaaaattgagaatgccgaacaactaagagatcttacaagaaatattgttaagaacaaaaccagctctttgaacgaaattacaccctcaaagaatcgtgtaactagtgcatgcaattccgagagacgtacgactagccaagaagcaaacaatcttgaaggctaccatagttgtgcacaaggaactagtcggtctgccagtattacgaagaaatacagcaaaaagactactagtcgtcctaaaagagaaaagagacaaacaatcctcccaaatggtgagataaaggaatgctctaaatgtaaagacacttggacaattcaatggcgtagtggacccgaccaaaacagggaactttgtagtccctgtggactcgcctatggaaaaagactgaagaaggagaatgaaaaaaaaaggcaagcagcagataaaaggatagatcgaaacaatccatag

SEQ ID NO: 1164 - DNA, 666 bp, Artificial Sequence
  Description of Artificial Sequence: Synthetic polynucleotide
atgagatataataattatgacaactctggaagttccttcttaactagagtagttaaaaagagtgatatggagaaaacgttattattaaatagagaaattgatgactggaagtctaacgataaaaagaaggcatataaggaacgcggaagagtttatgcaagttgctcttttattgaagtatccttttctcaaataagggctgttgatgttgaaaaaaaaattgagaatgccgaacaattgagagatcttacaagaaatattgttaagaacaaaaccagctctttgaacgaaattacaccctccaagaatcgtgtaactagtgcatgcaattccgagagacgtacgactagccaagaagcaaacaatcttgaaggctaccatagttgtgcacaaggaactagtagatctgccagtattacgaagaaatacagcaaaaagactactagtcgtcctaaaagagaaaagagacaaacaatcctcccaaatggtgagataaaggaatgctctaaatgtaaagacacttggacaattcaatggcgtagtggacccgaccaaaacagggaactttgtagtccctgtggactcgcctatggaaaaagattaaagaaggagaatgaaaaaaaaaggcaagcagcagataaaaggatagatagaaacaatccatga

SEQ ID NO: 1165 - DNA, 1092 bp, Saccharomyces cerevisiae
atgatgaatgaagaggattctacagaaacgaaaagcctagtcataactaatggcatgtttatcatagacgacatcgagcgtagtaaatataatattcactataagaatgtcccaggaggcggagggacttttgccattttgggtgcatgcataatatcttccggcaatgtcacatccaaaggtttgaagtggatagtggacagaggctctgactttccaaaggaagttataagggaaatagactcatggggtactgatgtgaggtttcgagatgactttagcagattaactaccaaagggttgaattattacgagggaagtgatgatttgagaaagttcaagtttttgacgccgaagaagcagattaacgtcgatgactggatttccacatttgggcagaagataattgatgaaatgcatgcgtttcatttgctatgttctgggtctagatgcttagacataataaacgatctgctacgggtgaaaagttcaaagggcacaaaaccaatcgtgatttgggagccattcccagatctttgcgactttgatcatcaaaatgacattaaaagtgtaatgcagaggaacgatgttacggtaatattatctccaaatgccgaagaatcaagtcgcttatttggtttaagtagcaaggaaccgactagtttggaagaatgtctagcattagcgcatcgtttcgatgatttcatggatgaaaacaatatgtgtattctacgatgcggtgccctcggaagcatatcggtaagtgagaagtttaagaacggacgaacctatgaccatttccccgcctaccatttcaaaactcagtctaaagtactagatcctactggcgggggaaactcgttccttggcggctttgcagtttcttatgccctaacgaaaagcttagatattgctagtatatgtgggaacatcgctgcaggcgcaataattgaacaattcggaataccgaggtacgatccaattgctaaaacctggaacggaatcacattcttggatagactgaaattttacctttcacagtccggtcttcaatataatataaacgatctttacaaaagtctaacacgatga

SEQ ID NO: 1166 - DNA, 1092 bp, Artificial Sequence
  Description of Artificial Sequence: Synthetic polynucleotide
atgatgaatgaagaggattctacagaaacgaaaagcttagtcataactaatggcatgtttatcatagacgacatcgagcgtagtaaatataatattcactataagaatgtcccaggaggcggagggacttttgccattttgggtgcatgcataatatcttccggcaatgtcacatccaaaggtttgaagtggatagtggacagaggctctgactttccaaaggaagttataagggaaatagactcttggggtactgatgtgaggtttagagatgactttagcagattaactaccaaagggttgaattattacgagggaagtgatgatttgagaaagttcaagtttttgacgccgaagaagcagattaacgtcgatgactggatttccacatttgggcagaagataattgatgaaatgcatgcgtttcatttgttatgttctgggtctagatgcttagacataataaacgatttattaagagtgaaaagttccaagggcacaaaaccaatcgtgatttgggagccattcccagatctttgcgactttgatcatcaaaatgacattaaaagtgtaatgcagaggaacgatgttacggtaatattatctccaaatgccgaagaaagtagtcgcttatttggtttaagtagcaaggaaccgactagtttggaagaatgtttggcattagcgcatcgtttcgatgatttcatggatgaaaacaatatgtgtattttaagatgcggtgccctcggaagcatatctgtaagtgagaagtttaagaacggaagaacctatgaccatttccccgcctaccatttcaaaactcagtctaaagtattggatcctactggcgggggaaactctttccttggcggctttgcagtttcttatgccttgacgaaaagcttagatattgctagtatatgtgggaacatcgctgcaggcgcaataattgaacaattcggaataccgaggtacgatccaattgctaaaacctggaacggaatcacattcttggatagattgaaattttacctttctcagtccggtcttcaatataatataaacgatctttacaaaagtttgacaaggtga

SEQ ID NO: 1167 - DNA, 648 bp, Saccharomyces cerevisiae
atgagctgtaccactgataagttaatacaaaagtacgacgcccttgttaggaaaaccacagaacataaattcgctaaggaactatgtgccggaacattgaaggaccgtagtttgtacatctatttatcacaagatctgcaattttttgaaactagcttaaggttgatatgtaagacgacttctttagcaccaactactcacgctttaataaccttagccaaaaagattggatttttttctaatgatgaaaactcatactttcatgactgcttagaattattggcaccatccctcaccaaggaagaaagagataattttgacaataaagcgatccccggcgttgatgcgtatattaatttcttagatgagctgagaaaggacgcctcaattacatggccatccttagtaaccagcttatgggttgctgaggaactctattggagatgggctcgtgatactcctagagccccagggttgcattggaaatatcaaaaatggattgatttacatgatggtgagcattttcaaacttggtgtgaatttctaaaggctgaagttgacaagtttcccgtcgaagaagtggaaagcatatttgtgaaggtttcacagttcgagttcgaattttttgaatcttgttacaacgcctaa

SEQ ID NO: 1168 - DNA, 648 bp, Artificial Sequence
  Description of Artificial Sequence: Synthetic polynucleotide
atgagctgtaccactgataagttaatacaaaagtacgacgcccttgttaggaaaaccacagaacataaattcgctaaggaattatgtgccggaacattgaaggaccgtagtttgtacatctatttatctcaagatttgcaattttttgaaactagcttaaggttgatatgtaagacgacttctttagcaccaactactcacgctttaataaccttagccaaaaagattggatttttttctaatgatgaaaactcttactttcatgactgcttagaattattggcaccatccctcaccaaggaagaaagagataattttgacaataaagcgatccccggcgttgatgcgtatattaatttcttagatgagttaagaaaggacgcctctattacatggccatccttagtaaccagcttatgggttgctgaggaactctattggagatgggctcgtgatactcctagagccccagggttgcattggaaatatcaaaaatggattgatttacatgatggtgagcattttcaaacttggtgtgaatttttgaaggctgaagttgacaagtttcccgtcgaagaagtggaaagcatatttgtgaaggtttctcagttcgagttcgaattttttgaatcttgttacaacgcctga

SEQ ID NO: 1169 - DNA, 267 bp, Saccharomyces cerevisiae
atggacatcttgaaactgtcagattttattggaaatactttaatagtttcccttacagaagatcgtattttagttggaagcttggttgctgtagatgcccaaatgaatttgctattagatcatgttgaggaacgtatgggctccagtagtagaatgatgggcctagtcagcgtccctaggcgttccgttaagaccataatgattgataagcctgttctgcaggagcttactgcgaataaagttgaattgatggctaatattgtttag

SEQ ID NO: 1170 - DNA, 267 bp, Artificial Sequence
  Description of Artificial Sequence: Synthetic polynucleotide
atggacatcttgaaattaagtgattttattggaaatactttaatagtttcccttacagaagatcgtattttagttggaagcttggttgctgtagatgcccaaatgaatttgttattagatcatgttgaggaacgtatgggctccagtagtagaatgatgggccttgtcagcgtccctaggcgttccgttaagaccataatgattgataagcctgttttacaggagcttactgcgaataaagttgaattgatggctaatattgtttga

SEQ ID NO: 1171 - DNA, 237 bp, Saccharomyces cerevisiae
atgtcacagaacaacacaatcagctcaatgaatcctgaaagagcttacaacaatgtaacgctgaaaaatttaacagcatttcagttattatctcaaagagaaaacatatgcgagttattgaacttggtagaaagtacggaaagacacaatagtattatcaatcctgaaaggcaaaggatgagtttggaagaaatgaaaaaaatgctcgatgctttgaaaaatgaaaggaaaaagtag

SEQ ID NO: 1172 - DNA, 237 bp, Artificial Sequence
  Description of Artificial Sequence: Synthetic polynucleotide
atgtctcagaacaacacaatcagcagtatgaatcctgaaagagcttacaacaatgtaacgttgaaaaatttaacagcatttcagttattatctcaaagagaaaacatatgcgagttattgaacttggtagaaagtacggaaagacacaatagtattatcaatcctgaaaggcaaaggatgagtttggaagaaatgaaaaaaatgctcgatgctttgaaaaatgaaaggaaaaagtga

SEQ ID NO: 1173 - DNA, 999 bp, Saccharomyces cerevisiae
atgaacgatacgctatcaagctttttaaatcgtaacgaggctttagggcttaatccaccacatggcctggatatgcacattaccaagagaggttcggattggttatgggcagtgtttgcagtctttggctttatattgctatgctatgttgtgatgttcttcattgcggagaacaagggctccagattgactagatatgccttagctcctgcatttttgatcactttctttgaattttttgctttcttcacttatgcttctgatttaggttggactggtgttcaagctgaatttaaccacgtcaaggttagcaagtctatcacaggtgaagttcccggtattagacaaatcttttactcgaaatatattgcctggttcttgtcctggccatgccttttatttttaatcgagttagccgctagtactactggtgagaatgacgacatttccgccttggatatggtacattcgctgttaattcaaatcgtgggtaccttattctgggttgtttcgctattagttggttcattgatcaagtccacctacaagtggggttattacaccattggtgctgtcgctatgttggttacccaaggtgtgatatgccaacgtcaattcttcaatttgaaaactagagggttcaatgcacttatgctgtgtacctgcatggtaatcgtttggttgtactttatctgttggggtctaagtgatggtggtaaccgtattcaaccagacggtgaggctatcttttatggtgttttggatttatgtgtatttgccatttatccatgttacttgctaattgcagtcagccgtgatggcaaattgccaaggctatctttgacaggaggattctctcatcaccatgctacggacgatgtggaagatgcggctcctgaaacaaaagaagctgttccagagagcccaagagcatctggagagactgcaatccacgaacccgaacctgaagcagagcaagctgtcgaagatactgcttag

SEQ ID NO: 1174 - DNA, 999 bp, Artificial Sequence
  Description of Artificial Sequence: Synthetic polynucleotide
atgaacgatacgttatccagctttttaaatcgtaacgaggctttagggcttaatccaccacatggcttggatatgcacattaccaagagaggttctgattggttatgggcagtgtttgcagtctttggctttatattgctttgctatgttgtgatgttcttcattgcggagaacaagggctccagattgactagatatgccttagctcctgcatttttgatcactttctttgaattttttgctttcttcacttatgcttctgatttaggttggactggtgttcaagctgaatttaaccacgtcaaggttagcaagtctatcacaggtgaagttcccggtattagacaaatcttttactctaaatatattgcctggttcttgtcctggccatgccttttatttttaatcgagttagccgctagtactactggtgagaatgacgacatttccgccttggatatggtacattctttattaattcaaatcgtgggtaccttattctgggttgtttctttattagttggttctttgatcaagtccacctacaagtggggttattacaccattggtgctgtcgctatgttggttacccaaggtgtgatatgccaacgtcaattcttcaatttgaaaactagagggttcaatgcacttatgctttgtacctgcatggtaatcgtttggttgtactttatctgttggggtttgagtgatggtggtaaccgtattcaaccagacggtgaggctatcttttatggtgttttggatttatgtgtatttgccatttatccatgttacttgttaattgcagtcagccgtgatggcaaattgccaaggttatctttgacaggaggattctctcatcaccatgctacggacgatgtggaagatgcggctcctgaaacaaaagaagctgttccagagagcccaagagcatctggagagactgcaatccacgaacccgaacctgaagcagagcaagctgtcgaagatactgcttga

SEQ ID NO: 1175 - DNA, 345 bp, Saccharomyces cerevisiae
atggaaaaccgctgcagcaacccttgttacatacagtcggatccatctgacttactttccttgcgtctccctgcgcgattttgttggccattttccagatcctctagaatttttcaagggtcgagccgtaggaggattctctcagaaggcaaaaacgcatcgaaagcgtgctttgtaagaatatttggtatggctaaagtaagcaaagccatatcccgatcccgatcccgactcttattccgatcccttccgccacatcctgcatgtttattcgaataccaaattagctcatcttcgttatttcatcatccctttctgctatggcaaggacaagtttttttctag

SEQ ID NO: 1176 - DNA, 345 bp, Artificial Sequence
  Description of Artificial Sequence: Synthetic polynucleotide
atggaaaaccgctgcagcaacccttgttacatacagagcgatccatctgacttactttccttgcgtctccctgcgaggttttgttggccattttccagatcctctagaatttttcaagggtccagccgtaggaggattctctctgaaggcaaaaacgcatccaaagcgtgctttgtaagaatatttggtatggctaaagtaagcaaagccatatccagatccagatcccgtctcttattcagatcccttccgccacatcctgcatgtttattcgaataccaaattagctcttcttctttatttcatcatccctttttattatggcaaggacaagtttttttctga

SEQ ID NO: 1177 - DNA, 1836 bp, Saccharomyces cerevisiae
atggcgcgtcaaaagcttactttcaaagaacaaatggatggtttcccctgggtccaacttgttgttgtgtccttagttaggttcagcgaaccaattgcgttttcgtcactatttccttatgtttatttcatggttagagattttaatattgctcccaatgatgctcaagtgtccaaatattcaggttatttatcttcatcatttgcgttatgccaagtcatatctgcgtaccactggggtagattctctgaaaagcatggcagaaaaataacattgacttgcgggcttataggaacatctgtatcattgttaatactgggattttcacgcaatttctatcaggctttggtggcaagaagtttaatgggattgctaaatggtaacgtcggcgttattagaaccattattggtgaaatagcaactgaaagaaaacatcaggctttagctttcagtactatgcctttattatttcaatttggtgccgttgttgggcctatgatcggtgggtttcttgtatttagagatggaacaatgaatgaagtgccactatggtttccacattttgcaaaaagaataattaggtcatatccgtacgccttgccaaacgtggtagtgtgcatgtttttgatgtttggtttaactaatgcaacattgtttttggaagaaacacatcctgcttttaaagatagaagagattacggtttagaggtcggtgattttattaagaagaatatatttggtatacagccgaaaagaagaccctggcaaaagcgcattcaggatgattcggaaaacattcaccaccgtaatgagaatgtgaacagcattcgaggacaagatagtgaagaggatgaaaatagtcccctagtgaatactaccaatgacgatgatactgaaagcatacaatcgattgatcctattttaacaagaagacagtctgtaggcctgattaggacatattctctgcatgaaccaacagacgctgtgcatgccaatatagatacagctccagacggttgtaaagaaagtagtatatttcatcacgtttttcatacaaaagtattttaccctatatcggtgaattttattatggctttacatttgattgtatacaacgaatttttgcctgtttttttagcttatgatttagccgtagatccagaaaatccaaagaagctggcttcaaaatttccgtggaaaatatctggcggtataggttatgaaccagaacaaaccggtactcttttgtcgacaacaggtatctttggttgttttgtggttattttcatttttcccatagttgatcgaaatttcgattgtttaacaattttcagaactttagtcaagctgtaccctattatgtacgttatggttccttacgttgtttttctacagaatgaacggattcctagctggtatactgtcgtctacttgtacataatcacagggataaaaacattttgtggcgctttaacgtcaccacaaattatgttattaattcataattcgagtcccttgagttgtagatcagtcatcaatggcgccaccattagtatttctgcctctgctcgtttcataggtcccttagtatggggctatattatgtcttggtcccagcaaaatgacgtcgcctgggtcagttggtggtcgttaagtcttttttgtatggtagctctttatcaaagttataagatagcaccaattgatgataacgaaaatgagcttcatggacagggtagtgaagatgcctacaattcgcagtcacagtcttctgatttaagaatggctcatcgatctagtttaagcagcttaagtaaccaacgctgtaccacatga

SEQ ID NO: 1178 - DNA, 1836 bp, Artificial Sequence
  Description of Artificial Sequence: Synthetic polynucleotide
atggcgcgtcaaaagcttactttcaaagaacaaatggatggtttcccctgggtccaacttgttgttgtgtccttagttaggttcagcgaaccaattgcgttttcttctttatttccttatgtttatttcatggttagagattttaatattgctcccaatgatgctcaagtgtccaaatattctggttatttatcttcttcttttgcgttatgccaagtcatatctgcgtaccactggggtagattctctgaaaagcatggcagaaaaataacattgacttgcgggcttataggaacatctgtatctttgttaatattaggatttagccgcaatttctatcaggctttggtggcaagaagtttaatgggattgttgaatggtaacgtcggcgttattagaaccattattggtgaaatagcaactgaaagaaaacatcaggctttagctttcagtactatgcctttattatttcaatttggtgccgttgttgggcctatgatcggtgggtttcttgtatttagagatggaacaatgaatgaagtgccattatggtttccacattttgcaaaaagaataattaggagttatccgtacgccttgccaaacgtggtagtgtgcatgtttttgatgtttggtttaactaatgcaacattgtttttggaagaaacacatcctgcttttaaagatagaagagattacggtttagaggtcggtgattttattaagaagaatatatttggtatacagccgaaaagaagaccctggcaaaagcgcattcaggatgattctgaaaacattcaccaccgtaatgagaatgtgaacagcattagaggacaagatagtgaagaggatgaaaatagtcccttagtgaatactaccaatgacgatgatactgaaagcatacaatctattgatcctattttaacaagaagacagtctgtaggcttaattaggacatattctttgcatgaaccaacagacgctgtgcatgccaatatagatacagctccagacggttgtaaagaaagtagtatatttcatcacgtttttcatacaaaagtattttaccctatatctgtgaattttattatggctttacatttgattgtatacaacgaatttttgcctgtttttttagcttatgatttagccgtagatccagaaaatccaaagaagttggcttccaaatttccgtggaaaatatctggcggtataggttatgaaccagaacaaaccggtactcttttgagtacaacaggtatctttggttgttttgtggttattttcatttttcccatagttgatagaaatttcgattgtttaacaattttcagaactttagtcaagttgtaccctattatgtacgttatggttccttacgttgtttttttgcagaatgaaagaattcctagctggtatactgtcgtctacttgtacataatcacagggataaaaacattttgtggcgctttaacgtctccacaaattatgttattaattcataatagtagtcccttgagttgtagatctgtcatcaatggcgccaccattagtatttctgcctctgctcgtttcataggtcccttagtatggggctatattatgtcttggtcccagcaaaatgacgtcgcctgggtcagttggtggtctttaagtcttttttgtatggtagctctttatcaaagttataagatagcaccaattgatgataacgaaaatgagcttcatggacagggtagtgaagatgcctacaattctcagtctcagtcttctgatttaagaatggctcatagatctagtttaagcagcttaagtaaccaacgctgtaccacatga

SEQ ID NO: 1179 - DNA, 1479 bp, Saccharomyces cerevisiae
atgtttcatgctttcaccttccttaaaggtggtagattttactcttcactaacagttaaatcattgtacgagcaggtacaccatactagccatgatcccatttcaattaatggatggatcaaatccataagactattaaaacgtatagcgtttttggatttacaagatgggacttctgtgaacccattaagaatagttattccactcacaaatactgatgaagtacagttcctaaaaattctgaaaactggtcaaactttatctatatctaatgctacctggcaaagcacccctaatagaaaacaaccttttgaattgcaaatcaaaaatcctgtcaagtcaattaaacttgtgggtcccgtttcagaaaactatccattacaaaagaaatatcaaaccttacgttatttaaggtccttacctacactaaaatacagaaccgcttacttaagtgcaattttacggttaagatcctttgtagaattccagttcatgctatatttccagaaaaaccacttcaccaaagtttcaccaccaatattaacttcaaacgattgtgaaggtgccggcgagttgtttcaagtctccaccaatacgtcgccaactgcatcctcgtactttgggaagccgacttatttgactgtgtccactcaattgcacttggaaattttagcgttatcactgtcaaggtgttggacgttatctccttgctttagagccgaaaagagtgatactccaagacacctttcggagttttggatgcttgaagtggaaatgtgctttgttaatagcgtcaacgagctaacatcgtttgttgagactacaataaaacacataattaaagcttgtatagataaccaacaagaactcttgccgaagcaatttatctcttcacaagaaaataatgcatcgtcagagctatcaataaatcaagagacacaacaaattaaaacacgatgggaagatttaataaatgaaaaatggcacaatataacgtataccaatgcaatagaaattctcaagaaacgccacaatgaagtttcacactttaagtatgaacctaaatggggacagcctttgcaaactgaacatgaaaaatttttagccggagagtattttaagtccccagttttcgttaccgactatccacgtctttgtaaaccattctacatgaaacaaaattccactcctgacgatactgttggatgctttgatctactggttcctggaatgggtgaaataattggtgggagtttaagggaagatgactatgacaagttatgtagagaaatgaaagcacgcgggatgaatagatctggagaattggactggtatgtttctctgagaaaagaaggaagtgcaccacacggaggctttggtctagggtttgagagatttatctcatacttatatggcaaccataatataaaggatgccatacccttttatagaacatctgcagaatccatcgatttttga

SEQ ID NO: 1180 - DNA, 1479 bp, Artificial Sequence
  Description of Artificial Sequence: Synthetic polynucleotide
atgtttcatgctttcaccttccttaaaggtggtagattttactcttctttaacagttaaatctttgtacgagcaggtacaccatactagccatgatcccatttccattaatggatggatcaaatccataagattattaaaacgtatagcgtttttggatttacaagatgggacttctgtgaacccattaagaatagttattccactcacaaatactgatgaagtacagttcttgaaaattttgaaaactggtcaaactttatctatatctaatgctacctggcaaagcacccctaatagaaaacaaccttttgaattgcaaatcaaaaatcctgtcaagtctattaaacttgtgggtcccgtttctgaaaactatccattacaaaagaaatatcaaaccttacgttatttaaggtccttacctacattaaaatacagaaccgcttacttaagtgcaattttaagattaagatcctttgtagaattccagttcatgctttatttccagaaaaaccacttcaccaaagtttctccaccaatattaacttctaacgattgtgaaggtgccggcgagttgtttcaagtctccaccaatacgtctccaactgcatcctcttactttgggaagccgacttatttgactgtgtccactcaattgcacttggaaattttagcgttatctttatctaggtgttggacgttatctccttgctttagagccgaaaagagtgatactccaagacacctttctgagttttggatgcttgaagtggaaatgtgctttgttaatagcgtcaacgagttgacatcttttgttgagactacaataaaacacataattaaagcttgtatagataaccaacaagaactcttgccgaagcaatttatctcttctcaagaaaataatgcatcttctgagttatctataaatcaagagacacaacaaattaaaacaagatgggaagatttaataaatgaaaaatggcacaatataacgtataccaatgcaatagaaattctcaagaaacgccacaatgaagtttctcactttaagtatgaacctaaatggggacagcctttgcaaactgaacatgaaaaatttttagccggagagtattttaagtccccagttttcgttaccgactatccacgtctttgtaaaccattctacatgaaacaaaattccactcctgacgatactgttggatgctttgatttattggttcctggaatgggtgaaataattggtgggagtttaagggaagatgactatgacaagttatgtagagaaatgaaagcacgcgggatgaatagatctggagaattggactggtatgtttctttgagaaaagaaggaagtgcaccacacggaggctttggtttggggtttgagagatttatctcctacttatatggcaaccataatataaaggatgccatacccttttatagaacatctgcagaatccatcgatttttga

SEQ ID NO: 1181 - DNA, 267 bp, Saccharomyces cerevisiae
atgtgtgtgtgtgcgatacccttttttgaattctttctaccttttatccctcactatgcctttcttttatttgtttcgtccgttcgctttactgtaaatgaacgttgttactacttagtgtgcgtgctcaagttgaattgtgcttttttttttatggttatgatatttgaactaaaacgagtgtgtgtttcgtatttagacagatcccgtaaaatccaaattgttagcttttttccttttatcactattatttttttccactcttaa

SEQ ID NO: 1182 - DNA, 267 bp, Artificial Sequence
  Description of Artificial Sequence: Synthetic polynucleotide
atgtgtgtgtgtgcgatacccttttttgaattctttttaccttttatccctcactatgcctttcttttatttgtttcttccgttcgctttactgtaaatgaacgttgttactacttagtgtgcgtgctcaagttgaattgtgcttttttttttatggttatgatatttgaattgaaaagagtgtgtgtttcttatttagacagatcccgtaaaatccaaattgttagcttttttccttttatcactattatttttttccactcttga

SEQ ID NO: 1183 - DNA, 123 bp, Saccharomyces cerevisiae
atgactttaccaggtggtgttattttagttttcattttggtcggtttggcttgtattgccattattgctaccattatctacagaaaatggcaagctagacaaagaggattgcaaagattctaa

SEQ ID NO: 1184 - DNA, 123 bp, Artificial Sequence
  Description of Artificial Sequence: Synthetic polynucleotide
atgactttaccaggtggtgttattttagttttcattttggtcggtttggcttgtattgccattattgctaccattatctacagaaaatggcaagctagacaaagaggattgcaaagattctga

SEQ ID NO: 1185 - DNA, 411 bp, Saccharomyces cerevisiae
atgtcgtcatttggacatcgagcatttttcagctgttgtcctttactagaaggagaaactttgcattcaataaaattgcgcaaagaggcaacataccaaactcaatccgggtggccggttcgatggccgattcggtatccgcgcgcacttcccctagaatcccacgtgcacccataccatatgatcgttaaattaccgcacccacgcacccaaccgcggctgtttctatggctgtcgttgcattggacaggaattccttttttgggaaagccgggaataggtcgcaatcgggtaaaatcaaaacaattttcgcatttccaacagagtaaaatcaaaacaactatgagaaaaaaaacaacaaacagaaagcagaaagcagaaagatgtcaatatagacttgtcactgcgtaa

SEQ ID NO: 1186 - DNA, 411 bp, Artificial Sequence
  Description of Artificial Sequence: Synthetic polynucleotide
atgtcttcttttggacatagagcatttttcagctgttgtcctttattggaaggagaaactttgcattccataaaattgcgcaaagaggcaacataccaaactcaatccgggtggccggttcgttggccgattcgttatccgcgcgcacttcccttagaatcccacgtgcacccataccatatgatcgttaaattaccgcacccacgcacccaaccgcgtttgtttttatggttatctttgcattggacaggaattccttttttgggaaagccgggaataggtcgcaatagagtaaaatctaaacaattttctcatttccaacagagtaaaatcaaaacaactatgagaaaaaaaacaacaaacagaaagcagaaagcagaaagatgtcaatatagacttgtcactgcgtga

SEQ ID NO: 1187 - DNA, 2229 bp, Saccharomyces cerevisiae
atggaacttcagaatgatttagagtcgctcgataacgagctgaatgattttagtgaagatccatttcgtgatgatttcataacggatgaagatgctgtaagatcggggtggcgatctgcgtggaccaggatgaaatattggttttataagaatagactgaagtggacaaacaatcccatagtgattggcgacgcgaaagatagtagggatggttctaactttagaaggggtataccgctatatgaattagacgcgaatggtcaacccattgatactgaacttgttgatgagaatgaactttcttttggaacgggatttcattccaaagtgccttttaaaataatatttcgcacattgtttggctcgctggtgtttgccatttttttaattctgatgattaacatagcaaaaccccatcactccacgagagtgctatcgcactttggcagtcctgaatttgacccttacgtgaagtattttaacggtacgcatgaatttttccccttaacgatagtaatttcactagacggtttccatccttcactcatatctaagaggaacacaccgtttttacatgacttatatgaattgaaatatgatggaggtatgaatatcacgtccacaccttttatggtacccagcttccctacggagacctttcccaaccattggacgttggttactggacaatacccaatacaccacggtatagtctctaacgtattttgggatcctgatcttaatgaggaattccatccaggtgtattggaccctcgaatatggaacaataatgatacagaaccaatatggcaaactgttcagtctgcatttgacggtgatataccattcaaagctgctacccatatgtggccaggtagcgatgtgaattataccaagtataatgaagagaaactacaacctgaacataaaaatcctattgctagagagagaactccattttacttcgacgaattcaatgctaaagaaccactttcgcaaaaattatccaagattattgaatatgtggatatgagtacactgaacgaaagaccacagctaattctcggttatgtaccgaacgtagatgcctttggacataagcatggatatccgtcagagtcggaatactattatgaagacttcactgaaacactgggggaagtagatacatttctgaagcaactagtggaatcgctgcaagaaagaaatttaaccagctttactaatttggtcattgttagcgatcatggtatgagcgatatcgtagttccctcaaatgttattatatgggaagacttactggacgaaaaattgaggaaggattatgtatcgcacgcatatctagagggtccgatgatggctatatcgttgaaagattccggaaacatcaatgaggtttaccacaatttaaagacttctatagatgaagacaagtatacggtttacgttaatggaaatttccccaaagaatggaactttaatgatggaaaaaatcatcacatggcgtcaatctggattgtgcccgagcctgggtatgcagtgatgaagaaagaacaattgaagaaggtggcaaaaggtgatcataaggacaaaaacgaagacaatgtgttcacgattggatcacatggatacgacaataacgcgatcgatatgagatctgtatttattggtatggggccatattttccacagggatacattgagccgttccaaaataccgaaatttacaaccttttgtgtgatatttgcggtgtggcagaaaaggacagaaattccaatgatgggactgggatgcttatgaaccaactccgcgaaccccagagcagcgaagaagtagagattgaagatgactttgattatttggtcagtaagtttggtgaattcagcacttataatataatttggggcgggtaccccgaagagacagaacaagacaatgttgacaatgataatgatgacaacgacgatggaaacactgatgaaatagccgctatgccatcttcgtcattaacgataaaactagaaatgacaacttcaataccatcagcaactgagactctactgggcgaaacatcaccatcatcaagaagcagcagcagcagcagcatacaagctagcgctactgctagcacagtgggggattggcttcaagacataatcaacgacgcaaaagatctcattgacgacataattgacagcatcgacgatttagtcgattctgatacctaa

SEQ ID NO: 1188 - DNA, 2229 bp, Artificial Sequence
  Description of Artificial Sequence: Synthetic polynucleotide
atggaacttcagaatgatttagagtctctcgataacgagttgaatgattttagtgaagatccatttcgtgatgatttcataacggatgaagatgctgtaagaagcgggtggagatctgcgtggaccaggatgaaatattggttttataagaatagattaaagtggacaaacaatcccatagtgattggcgacgcgaaagatagtagggatggttctaactttagaaggggtataccgttatatgaattagacgcgaatggtcaacccattgatactgaacttgttgatgagaatgaactttcttttggaacgggatttcattccaaagtgccttttaaaataatatttcgcacattgtttggctctttggtgtttgccatttttttaattttgatgattaacatagcaaaaccccatcactccacgagagtgttatcccactttggcagtcctgaatttgacccttacgtgaagtattttaacggtacgcatgaatttttccccttaacgatagtaatttctttggacggtttccatccttctctcatatctaagaggaacacaccgtttttacatgacttatatgaattgaaatatgatggaggtatgaatatcacgtccacaccttttatggtacccagcttccctacggagacctttcccaaccattggacgttggttactggacaatacccaatacaccacggtatagtctctaacgtattttgggatcctgatcttaatgaggaattccatccaggtgtattggaccctagaatatggaacaataatgatacagaaccaatatggcaaactgttcagtctgcatttgacggtgatataccattcaaagctgctacccatatgtggccaggtagcgatgtgaattataccaagtataatgaagagaaattacaacctgaacataaaaatcctattgctagagagagaactccattttacttcgacgaattcaatgctaaagaaccactttctcaaaaattatccaagattattgaatatgtggatatgagtacattgaacgaaagaccacagttgattctcggttatgtaccgaacgtagatgcctttggacataagcatggatatccgagtgagagtgaatactattatgaagacttcactgaaacattaggggaagtagatacatttttgaagcaattagtggaatctttacaagaaagaaatttaaccagctttactaatttggtcattgttagcgatcatggtatgagcgatatcgtagttccctccaatgttattatatgggaagacttattagacgaaaaattgaggaaggattatgtaagccacgcatatttggagggtccgatgatggctatatctttgaaagattccggaaacatcaatgaggtttaccacaatttaaagacttctatagatgaagacaagtatacggtttacgttaatggaaatttccccaaagaatggaactttaatgatggaaaaaatcatcacatggcgtctatctggattgtgcccgagcctgggtatgcagtgatgaagaaagaacaattgaagaaggtggcaaaaggtgatcataaggacaaaaacgaagacaatgtgttcacgattggatctcatggatacgacaataacgcgatcgatatgagatctgtatttattggtatggggccatattttccacagggatacattgagccgttccaaaataccgaaatttacaaccttttgtgtgatatttgcggtgtggcagaaaaggacagaaattccaatgatgggactgggatgcttatgaaccaactccgcgaaccccagagcagcgaagaagtagagattgaagatgactttgattatttggtcagtaagtttggtgaattcagcacttataatataatttggggcgggtaccccgaagagacagaacaagacaatgttgacaatgataatgatgacaacgacgatggaaacactgatgaaatagccgctatgccatcttcttctttaacgataaaattagaaatgacaacttccataccatctgcaactgagactttattaggcgaaacatctccatcttctagaagcagcagcagcagcagcatacaagctagcgctactgctagcacagtgggggattggcttcaagacataatcaacgacgcaaaagatctcattgacgacataattgacagcatcgacgatttagtcgattctgatacctga

SEQ ID NO: 1189 - DNA, 630 bp, Saccharomyces cerevisiae
atggaatacgccactatgtcttcttcgaactccacacataactttcagagaaagattgctcttataggagctagaaatgtcggcaaaaccacattaacggttcgcttcgtagaatcgcggttcgttgaatcctattatcccactattgaaaatgaatttaccaggataattccttataaaagtcatgactgtactctggaaattctagatactgcaggccaagatgaagtttctctattaaacattaaatcgttgacgggcgtacgaggcataatactgtgctatagtataataaatcgtgctagctttgatcttattcccattctctgggacaagctggtagatcagctgggtaaggataacctcccggtaatacttgtgggtaccaaagctgatttgggaaggagtacaaaaggtgtaaaaaggtgtgtcacgaaagctgaaggagagaaactagcttcgacaattggcagtcaagataagaggaaccaggcagcatttatagaatgcagtgccgagttagattataatgttgaagaaacttttatgctccttttgaaacaaatggaacgtgtcgaaggaactctggggcttgatgccgaaaataataataaatgttctataatgtga

SEQ ID NO: 1190 - DNA, 630 bp, Artificial Sequence
  Description of Artificial Sequence: Synthetic polynucleotide
atggaatacgccactatgtcttcttccaactccacacataactttcagagaaagattgctcttataggagctagaaatgtcggcaaaaccacattaacggttcgcttcgtagaatctagattcgttgaatcctattatcccactattgaaaatgaatttaccaggataattccttataaaagtcatgactgtactttggaaattttagatactgcaggccaagatgaagtttctttattaaacattaaatctttgacgggcgtaagaggcataatattgtgctatagtataataaatcgtgctagctttgatcttattcccattctctgggacaagttggtagatcagttgggtaaggataacctcccggtaatacttgtgggtaccaaagctgatttgggaaggagtacaaaaggtgtaaaaaggtgtgtcacgaaagctgaaggagagaaattggcttctacaattggcagtcaagataagaggaaccaggcagcatttatagaatgcagtgccgagttagattataatgttgaagaaacttttatgctccttttgaaacaaatggaacgtgtcgaaggaactttggggcttgatgccgaaaataataataaatgttctataatgtga

SEQ ID NO: 1191 - DNA, 1539 bp, Saccharomyces cerevisiae
atgatgaaggaatcgaaatctatcactcaacatgaggttgagagagaatctgtttcttccaagcgtgccattaaaaagagattacttctgtttaaaatagacttgtttgtgctatcatttgtttgcttgcaatactggattaattatgtcgaccgtgtcggtttcaccaatgcatatatatccggtatgaaggaagatcttaagatggtcggaaacgatttgaccgtgtctaacacagttttcatgattggttacattgtaggtatggtccccaataatttaatgttattgtgtgttccgcccaggatatggctaagtttttgtacgtttgcttggggtttattgaccttgggaatgtacaaagttacatcgttcaaacatatttgcgcaattagattctttcaagccttatttgagagttgcacattttcaggaacacattttgttttgggttcgtggtataaagaagacgaattgcccattagaagtgctatttttacaggtagcggtttggtgggatctatgttcagtggatttatgcaaacaagtatctttactcatttgaatgggcggaatggcttggcgggttggagatggttattcattattgatttttgtatcacattacccattgcaatttatgggtttattttcttccccggccttcctgatcaaacaagtgctgttagcaaattttctatgacgagatacatttttaatgaacaagagctacattatgctaggagaaggctccccgctagggacgaaagcacccggttagactggtcgactattcctagagtcttaaaaaggtggcactggtggatgttctctcttgtttgggttctgggaggtgagaacttgggtttcgcatctaattctacatttgcattatggttacaaaaccaaaaatatacgttggcgcaaagaaataattatccttcggggatatttgccgtaggtatagtttctacgctttgttctgctgtatatatgagtaagatcccaagagctaggcattggcatgtttctgttttcatatcattggtaatggttattgttgcggtactaatacgtgcagacccactaaatccaaaagtcgtcttttctgcacagtatcttggaggcgtagcatacgctggacaagcggtttttttttcgtgggcaaacattatttgtcatgcagatcttcaagaacgtgctatcgttcttgcttccatgaatatgttttcaggggccgttaacgcatggtggtctatattattctttgcttcagatatggtgcccaagtttgagagaggttgctacgccctcttggctacggcaatatcaagcggaattgtctcggtcgtcatacgctcactacagataaaagagaatttgtctaagaaacaggttccttatatagatgctaatgacatgcccggagaagatgacgatgacgacaaccaggataatgaaaatgatggcgacgacgagagtatggaagttgaacttcataatgaggaaatggccgaaatttcaaatcctttccgatag

SEQ ID NO: 1192 - DNA, 1539 bp, Artificial Sequence
  Description of Artificial Sequence: Synthetic polynucleotide
atgatgaaggaaagtaaatctatcactcaacatgaggttgagagagaatctgtttcttccaagcgtgccattaaaaagagattacttttatttaaaatagacttgtttgtgctttcttttgtttgcttgcaatactggattaattatgtcgaccgtgtcggtttcaccaatgcatatatatccggtatgaaggaagatcttaagatggtcggaaacgatttgaccgtgtctaacacagttttcatgattggttacattgtaggtatggtccccaataatttaatgttattgtgtgttccgcccaggatatggttgagtttttgtacgtttgcttggggtttattgaccttgggaatgtacaaagttacatctttcaaacatatttgcgcaattagattctttcaagccttatttgagagttgcacattttctggaacacattttgttttgggttcttggtataaagaagacgaattgcccattagaagtgctatttttacaggtagcggtttggtgggatctatgttcagtggatttatgcaaacaagtatctttactcatttgaatgggagaaatggcttggcgggttggagatggttattcattattgatttttgtatcacattacccattgcaatttatgggtttattttcttccccggccttcctgatcaaacaagtgctgttagcaaattttctatgacgagatacatttttaatgaacaagagttacattatgctaggagaaggctccccgctagggacgaaagcaccagattagactggtctactattcctagagtcttaaaaaggtggcactggtggatgttctctcttgtttgggttttaggaggtgagaacttgggtttcgcatctaattctacatttgcattatggttacaaaaccaaaaatatacgttggcgcaaagaaataattatccttctgggatatttgccgtaggtatagtttctacgctttgttctgctgtatatatgagtaagatcccaagagctaggcattggcatgtttctgttttcatatctttggtaatggttattgttgcggtattaatacgtgcagacccattgaatccaaaagtcgtcttttctgcacagtatcttggaggcgtagcatacgctggacaagcggtttttttttcttgggcaaacattatttgtcatgcagatcttcaagaacgtgctatcgttcttgcttccatgaatatgttttctggggccgttaacgcatggtggtctatattattctttgcttctgatatggtgcccaagtttgagagaggttgctacgccctcttggctacggcaatatctagcggaattgtcagtgtcgtcatacgctctttgcagataaaagagaatttgtctaagaaacaggttccttatatagatgctaatgacatgcccggagaagatgacgatgacgacaaccaggataatgaaaatgatggcgacgacgagagtatggaagttgaacttcataatgaggaaatggccgaaatttctaatcctttcagatga

SEQ ID NO: 1193 - DNA, 408 bp, Saccharomyces cerevisiae
atgtttttacgtactcaagctcgtttcttccatgctactaccaagaagatggacttctcgaaaatgtccatcgtcggccgcattggctctgaattcactgaacatacttctgctaataacaatcgttatttgaaatatagtatcgcttcgcaaccaagaagagatggccaaaccaattggtataatatcaccgttttcaatgaacctcaaatcaattttttgacagaatatgttagaaaaggcgctttggtatatgttgaagcagatgctgctaactatgtcttcgagagagacgacggttctaagggtactactttgagcttagttcaaaaggacattaatttattgaagaatgggaagaaattagaagatgctgagggccaagaaaatgctgcttcttcagaataa

SEQ ID NO: 1194 - DNA, 408 bp, Artificial Sequence
  Description of Artificial Sequence: Synthetic polynucleotide
atgtttttacgtactcaagctcgtttcttccatgctactaccaagaagatggacttctccaaaatgtccatcgtcggccgcattggctctgaattcactgaacatacttctgctaataacaatcgttatttgaaatatagtatcgcttctcaaccaagaagagatggccaaaccaattggtataatatcaccgttttcaatgaacctcaaatcaattttttgacagaatatgttagaaaaggcgctttggtatatgttgaagcagatgctgctaactatgtcttcgagagagacgacggttctaagggtactactttgagcttagttcaaaaggacattaatttattgaagaatgggaagaaattagaagatgctgagggccaagaaaatgctgcttcttctgaatga

SEQ ID NO: 1195 - DNA, 2613 bp, Saccharomyces cerevisiae
atgacggaacaaagaaccaaatatgcagatagcatattgactactaagagtccttacgaggctaccgaaactattagaatcaggttatcgcaggtcaaattgttgaataaagacttttacctgttatttaaggaattggcaaatctgaagaggaactatgctcagcaattgagaaaaataatagctgaaaatgaagatataacaaagatcttaaacgctcaaatgattgaaagtaatgttttgactccgcaggaaatgagtgcattcagattcaactcgctgggagagctaagaaatgtatgggatactgtaattgaagaactaaaatcagatttgaagtcaagtacagaatactacaacactttggaccagcaagtcgttcgtgaattgaaggaatccgtggagaacaatactagctggagagaaagcaaggacttacattccaagcttagtaaaaatgcagcttcaattgagcactatagtaagaataacgaaaactctagtcacttagaagaggcaagaaggcaatgggaccagcaaagcccctatttgtttgagctgttcgagactattgactataaccgtttggacactttaaaaaactgtatgcttagatttcaaaccagttttagcgattatttactaaatactaccaaagaatgcgaaacggtgatgacgaaattcctggcattcgaaccgcaaagtgaaattgatcgttttgccaaagatgccagtcaatacaacttccaactatcctcttcttccaaagaagtagttcctaataatgcttcgccagcttctgccactggtgcccgcccggtctctgtatccaatggtgccgctaatacggaaagagaaaagaaatccccacaaaaggataagcgtaagagtgcatttggaaacattggacatcgtcttgcctctgcatcttccagtctcactcataatgatctcatgaataacgaattttcagactctactaataattcttccttgaaatcaaaaaagtcgtcccacaccctaagatctaaagtgggctcaattttcggtagaaataagaccaagaacaagagacaacaacaatcatcatcaaactctcatattcaggcatccatcactgagactccgaataattcttccaccagagtgtcttcaactgcaacttcttctatttatcagaagcaacgtcgacccacctattcatcatcaaaatcaaacaattggaccccgggtgaagctagtgacactcctcctcttcctccccatgctactcctaaaaacgtagatgcacctgttactgccgatacaccacctgcgcaaacttttactccttctgaagtgcctccttcaacgccacaacaaagttctccacccactgcgaaagaaccagactcaagtaacttacccaagacagtaccgatatcaatttctcaacctccacttcagccacaatcaaaaacaaaaccattaccagttgagcctgcctctcccagtatttcacttcctactgctacggttgataaccaaccttcaggtcaagttgattcaaggcccttgcatatccgcgcacctgctttaccaccctcaaggaaacaaaatttcattcataacagggattctcaactctatgactctttgcctaatcacggctcaggcgctacccctacttcttcttccttgtcctctattccccaggaacgtccagtttccacactctcctctcagattactggcgagctaagagaactaaatcctcaagccacgggctcttcaacatctttagttggtcaatcgttgtttcagcactcctctttagatacatctcaatttgggttgaatgctagtatcgcagaagtgctcaatgcttctttcaaagacggtatgttgcagaactcccaactgattggggaaattgccctcaactatttacccaattctgtcatgaattcgcctttacctatcggtattaatttgagaatcaataatggcgctaagttcgaaaaggtcattctgaaccaagcctttattgagcgtgttgctccagaagaattcaaagttaacccttcatttatcgattctagaaccttaggagctattaaatattccataaaggagccgatcgcgcctattgttattcatccggtctggagatttgaatctcaccaggcaagtgttgtattgactgtcaagatgtcaccaagcttacccgatgaaatatcacaaatcgtaatagaagacctcgttgtctttgtgaatatcgatggtgctaatgcaacaagcgctttatcaaaacctcagggctccttcagtaaagaaaagaagagaataacgtggagatttaaagaaccagttgttttgacaagaaatggtgaaggtcaaagattaatcgccagatttattacagacggcctggcacatgaatccgctaaaggcgtgattaccaaattcactatcagtgagacggataacgtggctctaccccatagcggagccggcagtggaatcaccttgacttgtcaggagctggatgaaaacaatccatttggtggtgagtggctcgatgtaaacacaaaaagaactttgaccactggtaactaccatggtctcgcttga

SEQ ID NO: 1196 - DNA, 2613 bp, Artificial Sequence
  Description of Artificial Sequence: Synthetic polynucleotide
atgacggaacaaagaaccaaatatgcagatagcatattgactactaagagtccttacgaggctaccgaaactattagaatcaggttatctcaggtcaaattgttgaataaagacttttacttattatttaaggaattggcaaatttgaagaggaactatgctcagcaattgagaaaaataatagctgaaaatgaagatataacaaagatcttaaacgctcaaatgattgaaagtaatgttttgactccgcaggaaatgagtgcattcagattcaactctttgggagagttaagaaatgtatgggatactgtaattgaagaattgaaatctgatttgaagagtagtacagaatactacaacactttggaccagcaagtcgttcgtgaattgaaggaatccgtggagaacaatactagctggagagaaagcaaggacttacattccaagcttagtaaaaatgcagcttccattgagcactatagtaagaataacgaaaactctagtcacttagaagaggcaagaaggcaatgggaccagcaaagcccctatttgtttgagcttttcgagactattgactataaccgtttggacactttaaaaaactgtatgcttagatttcaaaccagttttagcgattatttattgaatactaccaaagaatgcgaaacggtgatgacgaaattcttggcattcgaaccgcaaagtgaaattgatcgttttgccaaagatgccagtcaatacaacttccaattatcctcttcttccaaagaagtagttcctaataatgcttctccagcttctgccactggtgcccgcccggtctctgtatccaatggtgccgctaatacggaaagagaaaagaaatccccacaaaaggataagcgtaagagtgcatttggaaacattggacatcgtcttgcctctgcatcttccagtctcactcataatgatctcatgaataacgaattttctgactctactaataattcttccttgaaatctaaaaagtcttcccacaccttgagatctaaagtgggctccattttcggtagaaataagaccaagaacaagagacaacaacaatcttcttccaactctcatattcaggcatccatcactgagactccgaataattcttccaccagagtgtcttctactgcaacttcttctatttatcagaagcaacgtagacccacctattcttcttctaaaagtaacaattggaccccgggtgaagctagtgacactcctcctcttcctccccatgctactcctaaaaacgtagatgcacctgttactgccgatacaccacctgcgcaaacttttactccttctgaagtgcctccttctacgccacaacaaagttctccacccactgcgaaagaaccagacagcagtaacttacccaagacagtaccgatatctatttctcaacctccacttcagccacaaagtaaaacaaaaccattaccagttgagcctgcctctcccagtatttctcttcctactgctacggttgataaccaaccttctggtcaagttgatagtaggcccttgcatatccgcgcacctgctttaccaccctctaggaaacaaaatttcattcataacagggattctcaactctatgactctttgcctaatcacggcagtggcgctacccctacttcttcttccttgtcctctattccccaggaacgtccagtttccacactctcctctcagattactggcgagttaagagaattgaatcctcaagccacgggctcttctacatctttagttggtcaatctttgtttcagcactcctctttagatacatctcaatttgggttgaatgctagtatcgcagaagtgctcaatgcttctttcaaagacggtatgttgcagaactcccaattgattggggaaattgccctcaactatttacccaattctgtcatgaattctcctttacctatcggtattaatttgagaatcaataatggcgctaagttcgaaaaggtcattttgaaccaagcctttattgagcgtgttgctccagaagaattcaaagttaacccttcttttatcgattctagaaccttaggagctattaaatattccataaaggagccgatcgcgcctattgttattcatccggtctggagatttgaatctcaccaggcaagtgttgtattgactgtcaagatgtctccaagcttacccgatgaaatatctcaaatcgtaatagaagacctcgttgtctttgtgaatatcgatggtgctaatgcaacaagcgctttatccaaacctcagggctccttcagtaaagaaaagaagagaataacgtggagatttaaagaaccagttgttttgacaagaaatggtgaaggtcaaagattaatcgccagatttattacagacggcttggcacatgaatccgctaaaggcgtgattaccaaattcactatcagtgagacggataacgtggctcttccccatagcggagccggcagtggaatcaccttgacttgtcaggagttagatgaaaacaatccatttggtggtgagtggctcgatgtaaacacaaaaagaactttgaccactggtaactaccatggtctcgcttga

SEQ ID NO: 1197 - DNA, 414 bp, Saccharomyces cerevisiae
atgtctaacgttgttcaagctcgtgacaattcccaagtttttggtgttgctagaatttacgcttctttcaacgatactttcgttcatgttaccgatttatctggtaaggaaaccatcgccagagttactggtggtatgaaggttaaggctgacagagatgaatcttctccatacgctgctatgttggctgcccaagatgttgccgctaagtgtaaggaagtcggtatcactgccgttcacgttaagatcagagctaccggtggtactagaaccaagactccaggtccaggtggtcaagctgctttgagagctttggccagatctggtttgagaattggccgtatcgaagatgttaccccagttccatctgactccaccagaaagaagggtggtagaagaggtagaagattatga

SEQ ID NO: 1198 - DNA, 414 bp, Artificial Sequence; identical to SEQ ID NO: 1197
  Description of Artificial Sequence: Synthetic polynucleotide

SEQ ID NO: 1199 - DNA, 6504 bp, Saccharomyces cerevisiae
atgaattcaattattaatgctgcttcgaaagtcttaagactccaagacgatgtgaagaaggctactataatattaggagatatactgatattacaaccaattaatcacgaagttgaaccagatgtagaaaacttggtacagcatgaactaaccaagataatacaaggttatcccatacaggataatatgattattaatagcaaaaaaggcacagttgaagatgacttatgcgaactcaataactatacctgttttgcactttcgaaaagctttgatttatgccatgatagcagaaatttcaacatagcgcagccgaaacgatggatacaattattagagacattaactgactcagttagtttcgcagttattgttcaaattattctcactttatctaacatttcgctaataaataaacaaaccttggggaagttaaaaaaactgaggattcgaattttcgaaatactatcaaataaaaacgatagttggaaatctacattactacagaaaaatcttatagaatggtacatttttatgctttccgtggattgcacacctttagaattgcaaaacttatatctccataaggagttgaaattctgtaacggtatcttgaattcattaacactccaagtttctgatcctcgctcacaaaattacctgcaatttgagaacacgtataagctttttcaaatacaaaagtcatctagaattaacaactcgttccttttttacatagaattcaattccgttacctcaaataggataatgaccatagaaagacacatttatttggaaattaaggaaggccagttttgtatttcaaatgataactacataatcggtttatttgaaaacttcgaattcgaagcgggcactttgtactttattggagttttaattgatcacaataatcgaataactctttatgttgatggaagtatgatcaatcagctcacgttatttgaaaactctatatgccaattaagcacttgtgaactgggatccatgatttgttcaattaaagtatatagattttatttgtgggatggattattaacagaatttgcgataaatatacttcaagctatcggcaccaattaccaatatacatttagcaagaaaaaagaagggcctgaagttttatcgctctgccaagactttttgatcgctaaggctcatttaatggccaggcctacaacagaaatatcttccacaaaatacatcgatgagattgaacttcttgaaatggaaaatatcattattgatgttaacccaaatgatattcttcaagatttcaccgaatcgtctaattttacggtaaaatttgaggaaagcacgaactcgaaaaatattccggaagtgggtaagtgctatttctataggagttcaaacttggtttcaaaatttgtgtccattgattctatacggcttgcgtttttaaacatgacagaatccggtagtatagacgatctgtttcatcatgtatcacatctgatgaatcttttacgaaatattgatattcttaattggtttaaaaaagactttggctttcctttatttgcttatactttaaaacaaaaaataacacaagatttatctcagcctctgaatatccaatttttcaatttattcttagaattttgcgggtgggatttcaacgatatttccaaatccataattctagatactgatgcctacgaaaacatagtccttaacttggatttatggtatatgaatgaggatcaaagttctctggcgtcaggcggattagaaattatcagatttcttttcttccaaatttcaagtttgatggaagcctctatttattctaagttcaattccaataaattcaatgatatgaatatcctagaaaaactatgtttaagctatcaggctgtcacaaaaagagaaaatcagaacagtaaatttaatgagctatcaagtgatttaatttctgtatttgttactttattgaaaagcaatactgataaacgacatctgcagtggtttttacatctctcatattactttattaagagaaaagatgtacgttctacagagattatacttcaagcggtagatcaacttttttcgttttacttagatcaaggtagtgacgaaaatgcgaagatactttcagagattataccacttaagctaatactgatgattatggatcaaatagtggaaaataatgaatcaaaccctattacgtgcttgaatatcttatttaaggtagttctgaccaataaaccgcttttcaaacaattttacaaaaatgatggtttgaaactcatattgactatgctttgtaaggtagggaaaagctatcgagaggagattatttctttgcttctcacatattctattggcaattataccacagctaacgaaatattttcaggtgctgaagacatgattggaggaatttcaaacgacaagataactgcaaaagaaattatttatttggctgtcaacttcattgagtggcatgtgattaattctaatgccagtgattcttcttctgtattggacctgaacaaccatatattaagattcgtcgaagatctgaaatcgctgagcgctgttccgattaatgaatctgtatttgatcctaaaaaaagttatgtgatggtttcattattagatctctcgatagctttgaatgaatcggaggacatctcaaagttcaagagctcttcaaaagtgatttcagagctcattaaaggtaatataatgtgtgctcttacgaaatatgccgcttatgatttcgaagtctatatgagcacatttttttgtcacagtacagaatacaaactggtttatccaaaaactgtaatgaacaattccagttacttagagctatcatttatagtgacactcctacccgaaatacttaatgacctggtagatagcaataacaatttgaacctgatgatgttgaagcatccatacacgatgtcaaatctcctttattttcttcgcaaatttcgacctgatacgtcacagatagttatgcctaaagatttttatttctcaagttatacatgtctcttgcattgtgttattcagattgataaatcatcattttaccatttcaaaaacgtttctaagtcgcaactgttacaggacttcaaaatctgcataatgaacttaatatattccaatactctaaagcagataatctgggagaaagaagaatacgagatgttttctgagtcactgatggcgcatcaggaagttttatttgcacatggagcatgtgataatgagaccgttggcttattgttaatattttttgccaacagattacgtgattgtggatacaacaaagcagtcttcaattgtatgaaagtgatcattaagaacaaggaaaggaaactaaaggaggtggcgtgtttttttgacccagcgaataaaagtgaagtactcgaaggtttaagtaatatcctctcatgcaataactctgaaacaatgaacctcataactgaacaatacccattttttttcaacaatacacaacaggtacggttcataaacattgtcaccaatatcttgtttaagaacaacaatttttctccaataagcgttagacagatcaaaaaccaagtttacgaatggaaaaatgcaagatcagaatacgtcacccaaaacaataaaaagtgccttattttatttagaaaagacaacacatccttagattttaaaatcaaaaagtccatatcaagatacacttacaacctcaaaacggatagagaagaaaatgcagttttctatcgaaataatttaaatcttttgatttttcatctgaaacatacactggagatacaatcaaatccaaattcgtcctgcaagtggtcatcggactttgcagaagattttgatgggatgaaacggaggcttttgcctgcttgggaaccaaaatatgaaccactcattaacgaggaagatgctaatcaagatactataacaggtggtaacagacaaaggagagaaagtggaagcattttatcctacgaatttatcgaacatatggagactcttgagtcggagccagttggagatttgaatgagaatagaaaaattcttagacttttgaaggataacgattccattgcaactatttggaattgcagtttgattattggattagaaattaaggaggggattttaattcatggcagtaattacctttactttgtaagtgattactattttagtttagaggataaaaagattctaaaattatcagaagtatcgcaagaatcacgggatatgacggttagcttaattaacggccctgatgttaaaagggtatcaactttcctaaagcacgaagtctttgtttggaaacttctcgatatcactttcgttaccaaacgaccctttctacttcgggatgtcgccatcgaattattgttcaaagagagagttagcgctttttttagtttttacaacaaaagagtgagagatgacgttttacgggtactgaataagatcccgaagcaccttccagcagatccaattttttcaagcgttttacaagaaataaacgaccgaggaaatagtatagtggcaagaaatggaataggaaaggcaagcattgcttctaaattcactagcgtcttctcagcgaacaacagcctaatagatggatttgagatcagcaaaaaatgggttaggggagagatttctaatttttattacctgttgagtatcaacatcctagcgggaaggtcattcaacgatttgacccaatatccagtgtttccgtgggttattgcagattacgaaagtaacgtactcgatttagagaatcctaaaacttaccgggacctatcgaaacctatgggcgctcaaagtgagaaaaggaaattacagtttatagagcgttatgaagctttggcttccctggaaaatgctgattccgcaccatttcattatggcacgcattattcctcagctatgatagtatcttcatatctgataaggctgaagccctttgtcgaatcctttttgttattgcaaggcggaagttttggccctgcagatcgtttatttagttcgcttgaaagggcctggagctctgcttcttctgaaaatacaacggatgtcagggaattgacacctgaatttttttttctacctgaatttttgatcaacgttaatagttatgactttggtacagaccaaagcggtaaaaaagttgacgacgtcgtacttccaccctgggcaaatggtgacccaaaggttttcattcaaaagaatagagaagctttagaaagtccttatgtatcagcacatttacatgaatggattgatttgatatttggttacaaacaaaagggggacattgctgtgaaatctgttaacgtattcaacagattgagttacccaggcgctgtaaatctagataacattgacgatgaaaatgagcgcagagctatcacaggcattattcacaactttggtcaaacgcctttacaaatatttcaggaacctcatccggaaaaaatagcctgcaatgttcaacagctaacaacagaggtatggcgtaaggttccaatgaagccaatatttgagaagacaatctttaatttgaatgaaaagaacaggtccgtcgattatgttatacacgatcctagttacttcgattcattatactggaggggcttcgctttcccaaacttgtttttcagaacggaagaatcgttagtgtcattgagaattgtgcataaaaattggttaaaaattggactagatatttttaaaaagacgcatatggctcagattacatcgtttgcgtactggaagttgggcgaattcataactggcgataaaaatgggctgataaaagtttggaaatatcgtaaagataagcattcggtttcaggtaaccttgagaacaaaaaaacaatgtttgggcacctatgcgagctaaaggagatgcgctgttatcacgactacaatacgcttttaaccttagacatcagcggcttagtatatgtctgggacatgattaatttcgaactagtaaggcaaataacaaatgatgcgcaaaaggtcgcaatatctcaacatgcagggagcattatggtattgactaagaataacgccatttcgatcttcaatctaaatggacaaatatatacatcaaagaaattcgaaccagctaaaattgtaagctcaattgatttttttgacttcactaagttagacgcaggttacagaaagcatatctattggaaagagatggaaatactactagtgggctttgaagatggaactatagaaatttacgagctctttttgaattttcataatgaatgggcgataaagctactgaagcagctctgtaccgaaaaagggaaagccataactagcattaagggacaggggaagacatacctgtcccagaaaagacgcaaggatacagcagagcctcatgagatagaagtgattgcgggaacattagatggcagattagctatttggtactag

SEQ ID NO: 1200 - DNA, 6504 bp, Artificial Sequence
  Description of Artificial Sequence: Synthetic polynucleotide
atgaattctattattaatgctgcttccaaagtcttaagactccaagacgatgtgaagaaggctactataatattaggagatatattaatattacaaccaattaatcacgaagttgaaccagatgtagaaaacttggtacagcatgaattgaccaagataatacaaggttatcccatacaggataatatgattattaatagcaaaaaaggcacagttgaagatgacttatgcgaactcaataactatacctgttttgcactttctaaaagctttgatttatgccatgatagcagaaatttcaacatagcgcagccgaaaagatggatacaattattagagacattaactgactctgttagtttcgcagttattgttcaaattattctcactttatctaacatttctttgataaataaacaaaccttggggaagttaaaaaaattgaggattagaattttcgaaatattatccaataaaaacgatagttggaaatctacattattgcagaaaaatcttatagaatggtacatttttatgctttccgtggattgcacacctttagaattgcaaaacttatatctccataaggagttgaaattctgtaacggtatcttgaattctttaacactccaagtttctgatcctcgctctcaaaattacttacaatttgagaacacgtataagctttttcaaatacaaaagtcttctagaattaacaactctttccttttttacatagaattcaattccgttacctctaataggataatgaccatagaaagacacatttatttggaaattaaggaaggccagttttgtatttctaatgataactacataatcggtttatttgaaaacttcgaattcgaagcgggcactttgtactttattggagttttaattgatcacaataatagaataactctttatgttgatggaagtatgatcaatcagctcacgttatttgaaaactctatatgccaattaagcacttgtgaattaggatccatgatttgttctattaaagtatatagattttatttgtgggatggattattaacagaatttgcgataaatatacttcaagctatcggcaccaattaccaatatacatttagcaagaaaaaagaagggcctgaagttttatctctctgccaagactttttgatcgctaaggctcatttaatggccaggcctacaacagaaatatcttccacaaaatacatcgatgagattgaacttcttgaaatggaaaatatcattattgatgttaacccaaatgatattcttcaagatttcaccgaaagctctaattttacggtaaaatttgaggaaagcacgaactccaaaaatattccggaagtgggtaagtgctatttctataggagtagtaacttggtttccaaatttgtgtccattgattctataaggcttgcgtttttaaacatgacagaatccggtagtatagacgatttatttcatcatgtatctcatttaatgaatcttttaagaaatattgatattcttaattggtttaaaaaagactttggctttcctttatttgcttatactttaaaacaaaaaataacacaagatttatctcagcctttaaatatccaatttttcaatttattcttagaattttgcgggtgggatttcaacgatatttccaaatccataattttagatactgatgcctacgaaaacatagtccttaacttggatttatggtatatgaatgaggatcaaagttctttagcgtctggcggattagaaattatcagatttcttttcttccaaatttccagtttgatggaagcctctatttattctaagttcaattccaataaattcaatgatatgaatatcttggaaaaattatgtttaagctatcaggctgtcacaaaaagagaaaatcagaacagtaaatttaatgagttatccagtgatttaatttctgtatttgttactttattgaaaagcaatactgataaaagacatttacagtggtttttacatctctcttattactttattaagagaaaagatgtacgttctacagagattatacttcaagcggtagatcaacttttttctttttacttagatcaaggtagtgacgaaaatgcgaagatactttctgagattataccacttaagttaatattaatgattatggatcaaatagtggaaaataatgaatctaaccctattacgtgcttgaatatcttatttaaggtagttttaaccaataaaccgcttttcaaacaattttacaaaaatgatggtttgaaactcatattgactatgctttgtaaggtagggaaaagctatagagaggagattatttctttgcttctcacatattctattggcaattataccacagctaacgaaatattttctggtgctgaagacatgattggaggaatttccaacgacaagataactgcaaaagaaattatttatttggctgtcaacttcattgagtggcatgtgattaattctaatgccagtgattcttcttctgtattggacttgaacaaccatatattaagattcgtcgaagatttgaaatctttaagcgctgttccgattaatgaatctgtatttgatcctaaaaaaagttatgtgatggtttctttattagatctctccatagctttgaatgaaagtgaggacatctccaagttcaagagctcttctaaagtgatttctgagctcattaaaggtaatataatgtgtgctcttacgaaatatgccgcttatgatttcgaagtctatatgagcacatttttttgtcacagtacagaatacaaattggtttatccaaaaactgtaatgaacaattccagttacttagagttatcttttatagtgacactcttgcccgaaatacttaatgacttggtagatagcaataacaatttgaacttgatgatgttgaagcatccatacacgatgagtaatctcctttattttcttcgcaaatttagacctgatacgagccagatagttatgcctaaagatttttatttctctagttatacatgtctcttgcattgtgttattcagattgataaatcttctttttaccatttcaaaaacgtttctaagtctcaattattacaggacttcaaaatctgcataatgaacttaatatattccaatactttgaagcagataatctgggagaaagaagaatacgagatgttttctgagtctttgatggcgcatcaggaagttttatttgcacatggagcatgtgataatgagaccgttggcttattgttaatattttttgccaacagattacgtgattgtggatacaacaaagcagtcttcaattgtatgaaagtgatcattaagaacaaggaaaggaaattgaaggaggtggcgtgtttttttgacccagcgaataaaagtgaagtactcgaaggtttaagtaatatcctctcttgcaataactctgaaacaatgaacctcataactgaacaatacccattttttttcaacaatacacaacaggtaagattcataaacattgtcaccaatatcttgtttaagaacaacaatttttctccaataagcgttagacagatcaaaaaccaagtttacgaatggaaaaatgcaagaagtgaatacgtcacccaaaacaataaaaagtgccttattttatttagaaaagacaacacatccttagattttaaaatcaaaaagtccatatctagatacacttacaacctcaaaacggatagagaagaaaatgcagttttctatagaaataatttaaatcttttgatttttcatttgaaacatacattagagatacaaagcaatccaaattcttcctgcaagtggtccagtgactttgcagaagattttgatgggatgaaaagaaggcttttgcctgcttgggaaccaaaatatgaaccactcattaacgaggaagatgctaatcaagatactataacaggtggtaacagacaaaggagagaaagtggaagcattttatcctacgaatttatcgaacatatggagactcttgagagtgagccagttggagatttgaatgagaatagaaaaattcttagacttttgaaggataacgattccattgcaactatttggaattgcagtttgattattggattagaaattaaggaggggattttaattcatggcagtaattacctttactttgtaagtgattactattttagtttagaggataaaaagattttgaaattatctgaagtatctcaagaatctagagatatgacggttagcttaattaacggccctgatgttaaaagggtatccactttcttgaagcacgaagtctttgtttggaaacttctcgatatcactttcgttaccaaaaggccctttttacttagagatgtcgccatcgaattattgttcaaagagagagttagcgctttttttagtttttacaacaaaagagtgagagatgacgttttaagagtattgaataagatcccgaagcaccttccagcagatccaattttttctagcgttttacaagaaataaacgacagaggaaatagtatagtggcaagaaatggaataggaaaggcaagcattgcttctaaattcactagcgtcttctctgcgaacaacagcttgatagatggatttgagatcagcaaaaaatgggttaggggagagatttctaatttttattacttgttgagtatcaacatcttagcgggaaggtctttcaacgatttgacccaatatccagtgtttccgtgggttattgcagattacgaaagtaacgtactcgatttagagaatcctaaaacttacagagacctttctaaacctatgggcgctcaaagtgagaaaaggaaattacagtttatagagcgttatgaagctttggcttccttagaaaatgctgattccgcaccatttcattatggcacgcattattcctctgctatgatagtatcttcttatttgataaggttaaagccctttgtcgaatcctttttgttattgcaaggcggaagttttggccctgcagatcgtttatttagttctcttgaaagggcctggagctctgcttcttctgaaaatacaacggatgtcagggaattgacacctgaatttttttttttacctgaatttttgatcaacgttaatagttatgactttggtacagaccaaagcggtaaaaaagttgacgacgtcgtacttccaccctgggcaaatggtgacccaaaggttttcattcaaaagaatagagaagctttagaaagtccttatgtatctgcacatttacatgaatggattgatttgatatttggttacaaacaaaagggggacattgctgtgaaatctgttaacgtattcaacagattgagttacccaggcgctgtaaatttggataacattgacgatgaaaatgagcgcagagctatcacaggcattattcacaactttggtcaaacgcctttacaaatatttcaggaacctcatccggaaaaaatagcctgcaatgttcaacagttgacaacagaggtatggcgtaaggttccaatgaagccaatatttgagaagacaatctttaatttgaatgaaaagaacaggtccgtcgattatgttatacacgatcctagttacttcgattctttatactggaggggcttcgctttcccaaacttgtttttcagaacggaagaatctttagtgtctttgagaattgtgcataaaaattggttaaaaattggattagatatttttaaaaagacgcatatggctcagattacatcttttgcgtactggaagttgggcgaattcataactggcgataaaaatgggttgataaaagtttggaaatatcgtaaagataagcattctgtttctggtaaccttgagaacaaaaaaacaatgtttgggcacttatgcgagttgaaggagatgcgctgttatcacgactacaatacgcttttaaccttagacatcagcggcttagtatatgtctgggacatgattaatttcgaattggtaaggcaaataacaaatgatgcgcaaaaggtcgcaatatctcaacatgcagggagcattatggtattgactaagaataacgccatttccatcttcaatttgaatggacaaatatatacatccaagaaattcgaaccagctaaaattgtaagctctattgatttttttgacttcactaagttagacgcaggttacagaaagcatatctattggaaagagatggaaatattattggtgggctttgaagatggaactatagaaatttacgagctctttttgaattttcataatgaatgggcgataaagttattgaagcagctctgtaccgaaaaagggaaagccataactagcattaagggacaggggaagacatacttgtcccagaaaagacgcaaggatacagcagagcctcatgagatagaagtgattgcgggaacattagatggcagattagctatttggtactga

SEQ ID NO: 1201 - DNA, 3681 bp, Saccharomyces cerevisiae
atggggtatccgccacctacacgaaggcttggagataagaaaaggtaccattattccaataatcctaaccgaaggcatccttccgctgtttattccaagaatagctttccaaaatcaagcaataatggatttgtatcttctcctactgccgataattcaacaaatccgtctgtaactcccagtactgcatctgtacctcttcctacagcggcacctggaagcacgtttggtatcgaagcacccaggccatctcgatatgatccgagctcagtcagtaggccttcgtcatcatcttattcgtcaacaagaaaaattggaagccgttataacccagatgtggaaagatcctcttcaaccactagttcaactccggaaagtatgaatacgagcaccataacacacaccaatacggatatcggaaactcacgctattctcgaaaaaccatgagcagatataatcctcaatctactagttctacaaacgttacccactttccctcggcattatcaaacgctccaccgttttatgttgccaacgggagttctcggagacctcgatcaatggatgattatagtcctgatgtaacgaacaagctcgaaacaaataatgtttcatctgttaataataacagccctcattcttattactctaggagcaacaaatggagatccattggaacgccttccagaccaccatttgataatcatgtcggcaatatgacgaccaccagcaatactaactcgatccatcaaagggaacctttttggaaagcaaatagtactactattttaaaatcaactcattcacagtcatcgccttcccttcatactaaaaaatttcacgatgcgaataaattggacaaaccagaggcttcagttaaagttgaaacacccagtaaagatgagacaaaagccatatcgtaccatgataacaattttccaccaagaaaatcagtttctaaacctaatgcacctttagaacccgataatatcaaggttggcgaagaagatgcattggggaaaaaagaagtacataaaagtgggcgtgagatagcaaaggaacatcctactcctgtaaaaatgaaagagcatgatgaactagaagctcgcgctaaaaaagtaagtaaaatcaatattgatggaaagcaggacgaaatttggacgacggcaaaaacagtggccagtgcagtcgaagtttccaaagaaagtcaaaaggaactaacacgctctgttgaaaggaaggaaagcccagaaattagagattatgaaagagcatacgatccgaaagccctgaaaacagacgtaacaaagttgacagtagacaatgataataaaagttacgaagaacctcttgaaaaagtggaggggtgtattttcccattaccaaaagcagaaacgagattatgggaattgaaaaaccagaaaagaaacaaaataataagtgaacaaaagtacttactgaaaaaggcaattaggaatttctcagagtatcctttttacgcacagaacaaacttatacatcagcaggctaccggacttatcttgacgaaaattatatcaaagataaaaaaggaagaacatttgaaaaaaataaatttaaaacatgattatttcgatctccagaagaagtatgaaaaagaatgcgaaattttgactaaactgagtgaaaatttaaggaaggaagaaatcgaaaataaacgtaaagagcacgaactaatggagcagaaaagacgtgaagaaggtatcgaaacagaaaaggaaaaaagcttacggcatccatcctcgtcttcctcatctcgtcgcagaaatagggctgacttcgttgatgatgcggaaatggaaaatgtattgctacaaatcgacccaaattataaacattatcaggctgctgcaacaattcctccgctaattttagatccaatccgcaaacactcttacaaattctgtgatgtaaataacttggttacagacaaaaagctttgggcgtctagaatattgaaagacgcctctgacaactttactgaccatgagcactctttatttttggagggttatttaattcatcctaaaaaatttggtaaaatttctcactacatgggcggcttaagaagtcctgaagagtgtgtcctacattattatagaacaaagaaaactgtgaattataaacaacttcttatcgataagaacaagaaaagaaaaatgtcagccgctgccaagcgccgcaagaggaaggaaagaagtaatgacgaggaagtcgaagttgatgagagtaaagaagagtcaacgaacacgatagagaaggaagaaaaaagtgagaacaatgccgaggaaaatgttcagccggttctagttcaaggttctgaagtgaaaggtgatccattaggtacaccggaaaaagttgaaaatatgattgaacagagaggcgaagagtttgcaggtgaattggaaaatgctgagagggtaaacgacttaaaaagggcgcatgatgaagttggagaagagagcaataagtccagtgtaatagaaaccaacaatggggtacaaataatggatccaaaaggagctgttcagaatggttattatccagaggagaccaaagaacttgacttcagtttagagaatgcgttacagagaaagaaacacaaatctgcaccagagcataaaacaagttattggagtgttcgtgaatctcaactctttccagaattgttgaaggagtttggctctcaatggtctctcatatcagaaaaactgggtaccaaatctactacaatggtaaggaattactaccaaagaaatgcagctcgcaatggatggaaattactggttgatgaaaccgacttaaagcgagatgggactagttcagaatctgtacaacaatctcaaattttgatacaaccagaacgaccaaacatcaatgcctatagtaatattcctcctcaacaaagaccggctttgggttattttgttggacaaccaactcatgggcataatacatctatttcatctatcgatggctctataagaccatttgggcctgattttcatcgtgataccttttctaaaattagtgctcctttaaccactttaccaccaccaagactaccatctattcagtttcctcgttcagaaatggcagaacctacagtgacagatttgcgtaacaggcccttagaccatattgacacgttggctgatgcagcttcgtcagtaacaaataatcaaaacttcagtaatgaaaggaatgcaattgacattggccgtaaatcgacgacaatcagcaatctattgaataattcggatcgaagcatgaaatcttctttccaaagcgcttcaagacacgaagcacagctcgaagacactcccagcatgaacaatattgtagtacaagaaataaaaccgaatattactacgccaagatcgagttctatttctgcattactaaatcctgtaaatgggaatgggcaatcaaacccagatggaaggccgttgctgccatttcagcatgctatttctcaaggcactcctactttccctttaccggcccctcgcactagtccaataagtcgtgcgcctccaaagttcaatttttcgaatgatccgttggcagctttggctgcggttgcctccgcgccagatgcaatgagcagttttttatctaaaaaggaaaataataattga

SEQ ID NO: 1202 - DNA, 3681 bp, Artificial Sequence
  Description of Artificial Sequence: Synthetic polynucleotide
atggggtatccgccacctacaagaaggcttggagataagaaaaggtaccattattccaataatcctaacagaaggcatccttccgctgtttattccaagaatagctttccaaaaagtagcaataatggatttgtatcttctcctactgccgataattctacaaatccgtctgtaactcccagtactgcatctgtacctcttcctacagcggcacctggaagcacgtttggtatcgaagcacccaggccatctagatatgatccgagctctgtcagtaggccttcttcttcttcttattcttctacaagaaaaattggaagccgttataacccagatgtggaaagatcctcttccaccactagttctactccggaaagtatgaatacgagcaccataacacacaccaatacggatatcggaaactctcgctattctagaaaaaccatgagcagatataatcctcaatctactagttctacaaacgttacccactttccctctgcattatctaacgctccaccgttttatgttgccaacgggagttctagaagacctagaagtatggatgattatagtcctgatgtaacgaacaagctcgaaacaaataatgtttcttctgttaataataacagccctcattcttattactctaggagcaacaaatggagatccattggaacgccttccagaccaccatttgataatcatgtcggcaatatgacgaccaccagcaatactaactctatccatcaaagggaacctttttggaaagcaaatagtactactattttaaaatctactcattctcagtcttctccttcccttcatactaaaaaatttcacgatgcgaataaattggacaaaccagaggcttctgttaaagttgaaacacccagtaaagatgagacaaaagccatatcttaccatgataacaattttccaccaagaaaatctgtttctaaacctaatgcacctttagaacccgataatatcaaggttggcgaagaagatgcattggggaaaaaagaagtacataaaagtgggcgtgagatagcaaaggaacatcctactcctgtaaaaatgaaagagcatgatgaattggaagctcgcgctaaaaaagtaagtaaaatcaatattgatggaaagcaggacgaaatttggacgacggcaaaaacagtggccagtgcagtcgaagtttccaaagaaagtcaaaaggaattaacacgctctgttgaaaggaaggaaagcccagaaattagagattatgaaagagcatacgatccgaaagccttgaaaacagacgtaacaaagttgacagtagacaatgataataaaagttacgaagaacctcttgaaaaagtggaggggtgtattttcccattaccaaaagcagaaacgagattatgggaattgaaaaaccagaaaagaaacaaaataataagtgaacaaaagtacttattgaaaaaggcaattaggaatttcagtgagtatcctttttacgcacagaacaaacttatacatcagcaggctaccggacttatcttgacgaaaattatatccaagataaaaaaggaagaacatttgaaaaaaataaatttaaaacatgattatttcgatctccagaagaagtatgaaaaagaatgcgaaattttgactaaattaagtgaaaatttaaggaaggaagaaatcgaaaataaacgtaaagagcacgaattgatggagcagaaaagacgtgaagaaggtatcgaaacagaaaaggaaaaaagcttaagacatccatcctcttcttcctcttctcgtcgcagaaatagggctgacttcgttgatgatgcggaaatggaaaatgtattgttgcaaatcgacccaaattataaacattatcaggctgctgcaacaattcctccgttgattttagatccaatccgcaaacactcttacaaattctgtgatgtaaataacttggttacagacaaaaagctttgggcgtctagaatattgaaagacgcctctgacaactttactgaccatgagcactctttatttttggagggttatttaattcatcctaaaaaatttggtaaaatttctcactacatgggcggcttaagaagtcctgaagagtgtgtcttgcattattatagaacaaagaaaactgtgaattataaacaacttcttatcgataagaacaagaaaagaaaaatgtctgccgctgccaagcgccgcaagaggaaggaaagaagtaatgacgaggaagtcgaagttgatgagagtaaagaagagtctacgaacacgatagagaaggaagaaaaaagtgagaacaatgccgaggaaaatgttcagccggttttggttcaaggttctgaagtgaaaggtgatccattaggtacaccggaaaaagttgaaaatatgattgaacagagaggcgaagagtttgcaggtgaattggaaaatgctgagagggtaaacgacttaaaaagggcgcatgatgaagttggagaagagagcaataagtccagtgtaatagaaaccaacaatggggtacaaataatggatccaaaaggagctgttcagaatggttattatccagaggagaccaaagaacttgacttcagtttagagaatgcgttacagagaaagaaacacaaatctgcaccagagcataaaacaagttattggagtgttcgtgaatctcaactctttccagaattgttgaaggagtttggctctcaatggtctctcatatctgaaaaattgggtaccaaatctactacaatggtaaggaattactaccaaagaaatgcagctcgcaatggatggaaattattggttgatgaaaccgacttaaagagagatgggactagttctgaatctgtacaacaatctcaaattttgatacaaccagaaagaccaaacatcaatgcctatagtaatattcctcctcaacaaagaccggctttgggttattttgttggacaaccaactcatgggcataatacatctatttcttctatcgatggctctataagaccatttgggcctgattttcatcgtgataccttttctaaaattagtgctcctttaaccactttaccaccaccaagattaccatctattcagtttcctcgttctgaaatggcagaacctacagtgacagatttgcgtaacaggcccttagaccatattgacacgttggctgatgcagcttcttctgtaacaaataatcaaaacttcagtaatgaaaggaatgcaattgacattggccgtaaatctacgacaatcagcaatttattgaataattctgatagaagcatgaaatcttctttccaaagcgcttccagacacgaagcacagctcgaagacactcccagcatgaacaatattgtagtacaagaaataaaaccgaatattactacgccaagaagtagttctatttctgcattattgaatcctgtaaatgggaatgggcaaagtaacccagatggaaggccgttgttaccatttcagcatgctatttctcaaggcactcctactttccctttaccggcccctcgcactagtccaataagtcgtgcgcctccaaagttcaatttttctaatgatccgttggcagctttggctgcggttgcctccgcgccagatgcaatgagcagttttttatctaaaaaggaaaataataattga

SEQ ID NO: 1203 - DNA, 1044 bp, Saccharomyces cerevisiae
atgaattcactcgttactcaatatgctgctccgttgttcgagcgttatccccaacttcatgactatttaccaactttggagcgaccattttttaatatttcgttgtgggaacatttcgatgatgtcgtcactcgtgtaactaacggtagatttgttccaagcgaattccaattcattgcaggtgaattaccattaagcactttgccccctgtgctatacgccatcactgcctattacgttattatttttggtggcaggtttttgttaagtaagtcgaaaccatttaaattaaatggccttttccaattgcataatttggttttaacttcactttcattgacgcttttattgcttatggttgaacaattagtgccaattattgttcagcacgggttatacttcgctatctgtaatattggtgcttggactcaaccgctcgttacattatattacatgaattacattgtcaagtttattgaatttatagacacctttttcttggtgctaaaacataaaaaattgacatttttgcatacttatcaccatggcgctactgccttattatgttacacccaattgatgggcaccacatctatttcttgggtccctatttcattgaaccttggtgttcacgtggttatgtattggtactatttcttggctgccagaggcatcagggtctggtggaaggaatgggttaccagatttcaaattatccaatttgttttggatatcggtttcatatattttgctgtctaccaaaaagcagttcacttgtatttcccaattttgccacattgtggtgactgtgtgggttcaacaactgccacctttgcaggttgtgccattatttcttcatatttggtactatttatttcattttacattaacgtttataaacgtaaaggcaccaaaaccagtagagtggtaaagcgtgcccacggcggtgttgccgcaaaggttaatgagtatgttaacgttgacttgaaaaacgttcctactccatctccatcaccaaaacctcaacacagaagaaaaaggtaa

SEQ ID NO: 1204 - DNA, 1044 bp, Artificial Sequence
  Description of Artificial Sequence: Synthetic polynucleotide
atgaatagtctcgttactcaatatgctgctccgttgttcgagcgttatccccaacttcatgactatttaccaactttggagagaccattttttaatatttctttgtgggaacatttcgatgatgtcgtcactcgtgtaactaacggtagatttgttccaagcgaattccaattcattgcaggtgaattaccattaagcactttgccccctgtgttatacgccatcactgcctattacgttattatttttggtggcaggtttttgttaagtaagagtaaaccatttaaattaaatggccttttccaattgcataatttggttttaacttctctttctttgacgcttttattgcttatggttgaacaattagtgccaattattgttcagcacgggttatacttcgctatctgtaatattggtgcttggactcaaccgctcgttacattatattacatgaattacattgtcaagtttattgaatttatagacacctttttcttggtgttgaaacataaaaaattgacatttttgcatacttatcaccatggcgctactgccttattatgttacacccaattgatgggcaccacatctatttcttgggtccctatttctttgaaccttggtgttcacgtggttatgtattggtactatttcttggctgccagaggcatcagggtctggtggaaggaatgggttaccagatttcaaattatccaatttgttttggatatcggtttcatatattttgctgtctaccaaaaagcagttcacttgtatttcccaattttgccacattgtggtgactgtgtgggttctacaactgccacctttgcaggttgtgccattatttcttcttatttggtattatttatttccttttacattaacgtttataaacgtaaaggcaccaaaaccagtagagtggtaaagcgtgcccacggcggtgttgccgcaaaggttaatgagtatgttaacgttgacttgaaaaacgttcctactccatctccatctccaaaacctcaacacagaagaaaaaggtga

SEQ ID NO: 1205 - DNA, 1185 bp, Saccharomyces cerevisiae
atggctgaaagtaccacgttagaaactattgagatacacccaattacttttccacctgaagttcttgcgagaatatctccagaattgtctttacaaagacacttatccctaggaatcaggccatgtctaagaaaatatgaagaatttagagatgttgctatagaaaataatactttatcgcgttatgcggatgctggtaatatagacactaaaaacaacattttaggctcaaatgttttgaaaagtgggaaaaccatagtcataacttctattacgggtggaataatagaagaaactagcgccgcgattaaagatttggatgatttcggtgaggaagaattgttcgaagtgaccaaagaggaggacataattgcaaattatgcttctgtctatccggtggtggaagttgaaagaggtagagtgggcgcttgcaccgatgaagaaatgactatatcacaaaaactacacgattccatattgcactctaggatattgcctaaaaaagccttgaaggtaaaagctggtgttcgtagtgcgaatgaagacggtacgttttccgtcttgtatcccgatgaattagaagatgatacgctgaatgaaacaaacctgaaaatgaaaagaaaatggtcatacgttttgtatgcgaaaattgtagtcttgagtcgcactggtccagtcttcgatttgtgttggaattctttgatgtacgctttacagagcgtaaagttacctagagcatttatagatgagcgtgcgtccgatttaagaatgactataagaacaagaggaagaagtgccaccataagagaaacgtatgaaattatttgcgaccaaactaagtcagtaccgttaatgataaacgcaaagaatattgcatttgcttcaaattatgggatagtggagttagaccccgaatgccaattacaaaactctgataactctgaagaagaggaagtggacattgatatggataaattgaacactgtgctaatagcagacctagatactgaagcggaagaaacaagtatacacagtacgatctccatcctcgctgctccttcaggtaactataagcaattaacattagtgggaggaggcgctaaaataacgccagaaatgataaaaagatcattgttgttatctagggttagagcggacgatttgtcaacaagatttaacatataa

SEQ ID NO: 1206 - DNA, 1185 bp, Artificial Sequence
  Description of Artificial Sequence: Synthetic polynucleotide
atggctgaaagtaccacgttagaaactattgagatacacccaattacttttccacctgaagttcttgcgagaatatctccagaattgtctttacaaagacacttatccttgggaatcaggccatgtttgagaaaatatgaagaatttagagatgttgctatagaaaataatactttatctcgttatgcggatgctggtaatatagacactaaaaacaacattttaggcagtaatgttttgaaaagtgggaaaaccatagtcataacttctattacgggtggaataatagaagaaactagcgccgcgattaaagatttggatgatttcggtgaggaagaattgttcgaagtgaccaaagaggaggacataattgcaaattatgcttctgtctatccggtggtggaagttgaaagaggtagagtgggcgcttgcaccgatgaagaaatgactatatctcaaaaattacacgattccatattgcactctaggatattgcctaaaaaagccttgaaggtaaaagctggtgttcgtagtgcgaatgaagacggtacgttttccgtcttgtatcccgatgaattagaagatgatacgttgaatgaaacaaacttgaaaatgaaaagaaaatggagttacgttttgtatgcgaaaattgtagtcttgagtcgcactggtccagtcttcgatttgtgttggaattctttgatgtacgctttacagagcgtaaagttacctagagcatttatagatgagcgtgcgtccgatttaagaatgactataagaacaagaggaagaagtgccaccataagagaaacgtatgaaattatttgcgaccaaactaagagtgtaccgttaatgataaacgcaaagaatattgcatttgcttctaattatgggatagtggagttagaccccgaatgccaattacaaaactctgataactctgaagaagaggaagtggacattgatatggataaattgaacactgtgttgatagcagacttggatactgaagcggaagaaacaagtatacacagtacgatctccatcctcgctgctccttctggtaactataagcaattaacattagtgggaggaggcgctaaaataacgccagaaatgataaaaagaagtttgttgttatctagggttagagcggacgatttgagtacaagatttaacatatga

SEQ ID NO: 1207 - DNA, 1002 bp, Saccharomyces cerevisiae
atgggtattacagtaataggttctctaaactatgatttggacacatttacggatagattacctaacgctggagaaactttcagggctaaccacttcgaaacacatgctggtggtaagggattgaaccaagctgcggccattggtaaattaaaaaaccccagcagcagatatagtgttcgaatgattggtaatgttggaaatgatacatttggtaaacaattgaaggacactttatccgattgcggagtcgatatcactcacgtcggtacttacgaaggcattaatacgggtaccgctaccatactaattgaagagaaagctggtggccaaaataggatattgattgtagaaggtgctaacagcaagactatttatgacccgaaacagttgtgtgaaatttttccagagggcaaggaggaagaagagtatgttgtttttcaacacgaaattcctgatcctctttccattattaaatggatacatgcgaacaggccgaattttcagatcgtatataacccctcacctttcaaggccatgcctaagaaagattgggagttggtagaccttttggtcgttaatgaaattgagggtcttcaaatcgtggaaagtgtatttgataatgaacttgttgaagaaataagggagaagataaaggacgactttttaggagaatatcgtaaaatttgtgagcttttgtatgaaaaactcatgaatcgaaagaaaagaggaattgtggttatgactttgggttcgagaggggtgcttttctgttcgcacgaaagccctgaagtacaattccttccggctattcaaaatgtttcggttgttgatactacaggagctggagatactttcctgggcggtttggttactcaattgtatcaaggagagaccttgtctacggctataaagttctctacattagctagttcattgaccattcaaagaaaaggtgctgctgaaagcatgccactgtataaagatgttcagaaagatgcataa

SEQ ID NO: 1208 - DNA, 1002 bp, Artificial Sequence
  Description of Artificial Sequence: Synthetic polynucleotide
atgggtattacagtaataggttctttgaactatgatttggacacatttacggatagattacctaacgctggagaaactttcagggctaaccacttcgaaacacatgctggtggtaagggattgaaccaagctgcggccattggtaaattaaaaaaccccagcagcagatatagtgttagaatgattggtaatgttggaaatgatacatttggtaaacaattgaaggacactttatccgattgcggagtcgatatcactcacgtcggtacttacgaaggcattaatacgggtaccgctaccatattgattgaagagaaagctggtggccaaaataggatattgattgtagaaggtgctaacagcaagactatttatgacccgaaacagttgtgtgaaatttttccagagggcaaggaggaagaagagtatgttgtttttcaacacgaaattcctgatcctctttccattattaaatggatacatgcgaacaggccgaattttcagatcgtatataacccctctcctttcaaggccatgcctaagaaagattgggagttggtagaccttttggtcgttaatgaaattgagggtcttcaaatcgtggaaagtgtatttgataatgaacttgttgaagaaataagggagaagataaaggacgactttttaggagaatatcgtaaaatttgtgagcttttgtatgaaaaactcatgaatagaaagaaaagaggaattgtggttatgactttgggttccagaggggtgcttttctgttctcacgaaagccctgaagtacaattccttccggctattcaaaatgtttctgttgttgatactacaggagctggagatactttcttgggcggtttggttactcaattgtatcaaggagagaccttgtctacggctataaagttctctacattagctagttctttgaccattcaaagaaaaggtgctgctgaaagcatgccattgtataaagatgttcagaaagatgcatga

SEQ ID NO: 1209 - DNA, 2772 bp, Saccharomyces cerevisiae
atgagattctcacactttctcaaatacaacgctgtccctgaatggcagaatcattacctagattataacgaattgaaaaatttgatctacacattacagacagatgaattgaaacaagaaacgccaaccggtgacttaaacgatgacgctgactctcagactccaggtccaatcgctgatatagaaagcaacatagctgcaggagaaccatcttcatcgaaaagaagatttacacataaactcaagcgtaagctctttggttctaaaacaccttcaggaagcaaaaggggagactccgacgaaaaggccatagatgggaacaatattaacgaggaaacaattgagttagacgagttatctcctcaagggaaaaccacctctttcaataagaattttatacgtaagaaattctttgaatcacgcagctcatctgtgagtagcgagggaaagacgctcttcagttcttatgatacattcgtaactaacctgagcgacgagaaattgaaagtagatgatttctacaaaagaatggaagctaagttctatgaaagatttgaccacttgattaatgatttggagaaggaaggcattgtaacaagattgaatgaaactttcaatcctgaaattcaagcattgcctcctttaagagaaattatttctggtacatcagagacacattcatctaataacccatttgaaatacactcttcaaacatcgacagtgaattgagaaataggtttgattacagcgaagaagaaatggatgaagatgatgacgttgacgtgtttgctgacactaccgacaataccgccctcttgaattattcgcaatttaacattaaatctcagaaaaagtcattattaaaacagacaataataaatctttacatagacctttgccagttgaaatcttttatcgaattgaacagaatgggtttcagtaaaattactaagaagtctgataaagtattgcacatgaacactaggcaagaattaatagaaagtgaagaatttttcaaagacacctacatcttccagcatgaaactttaagcagtttaaacagtaaaattgcacaacttattgaattttatgctgttctcatgggtcagcctgggaacgtagattcatgcaagcaagagttaaagtcgtacctgcacgaccacattgtttgggaaagaagcaacacatggaaagacatgttgggcctctcttcgcaaaataacgatataataactattgaagatgaagctgagaaacttatgcaagaaaagcttcaaattgaatatttcaagtatccattgcctaagccaattaatttgaagtttactaaaattgaaaatttggcagttcctaagctattttttgggaaaagagcaatgaaaataggcttcattatcattgtcacaggtgttttgttgggtgttaaaactttcaatgaccctgtcgaacaccggtgtatggcattggtagaatgctgtgctttcttatgggctagtgaagccattccattacacatcacaggtttattggttccccttctaactgtcctttttagggtactaaaagacgatgacggtaaggtaatgggagcagcagctgcctctacagaaatcttaggtacaatgtggtcgtcaacaattatgattttattagcaggtttcacattgggtgaagccttgtcgcaatataacgttgcgaaagttttggcatcgtggttattggcccttgcaggtaccaagccaagaaatgtccttttaatggcaatgagtgttgtattctttctttcgatgtggatttccaacgttgcctccccagtattgacatattctctattaacacccttactagatccgctggactacacttcaccgtttgctaaggcattagtcatgggtgttgcactttcggcagatattggtggtatggcttcacctatttcttcgccacagaatatcatctccatgcagtacttaaaaccttatggaatcggctgggggcaattttttgctgtcgctctgcctacaggtattctatcgatgctgtgctcctgggccttgatgatactcacctttaaaataggcaaaactaaactggaaaaatttaaaccaataaggaccagatttactataaagcaatattttatcatcattgtaactattgctactattcttctatggtgtgtagagtcacaaatagaaagtgcttttggatcgtccggtgaaattgcagtaataccgatagtcctgttttttggtacaggtctactatcaacaaaggatttcaacacattcccttggtcaattgttgttcttgctatgggtggtatagcccttggtaaggcagtttcatcttcaggcttgttggtaactattgcaagagcattacaaaagaaaattcagaacgatggtgtttttgctatcttatgtattttcggtattttaatgttagttgtgggcacttttgtctcacatactgtgtcagcaatcatcattattcccttggtgcaagaagttggtgacaaattatccgatccaaaggcagctccaattcttgtgttcggttgcgccttgttagcctcatgcggtatggggttggcttcatctggatttccaaacgttactgctatttctatgaccgataaaaagggtaatagatggctaactgtaggcgcttttatctccagaggtgttcctgcttcgttgttagcgtttgtctgcgtaattactctcggttatggtattagttcttccgtcttaaaaggtagcacttaa

SEQ ID NO: 1210 - DNA, 2772 bp, Artificial Sequence
  Description of Artificial Sequence: Synthetic polynucleotide
atgagattctctcactttctcaaatacaacgctgtccctgaatggcagaatcattacttggattataacgaattgaaaaatttgatctacacattacagacagatgaattgaaacaagaaacgccaaccggtgacttaaacgatgacgctgactctcagactccaggtccaatcgctgatatagaaagcaacatagctgcaggagaaccatcttcttctaaaagaagatttacacataaactcaagcgtaagctctttggttctaaaacaccttctggaagcaaaaggggagactccgacgaaaaggccatagatgggaacaatattaacgaggaaacaattgagttagacgagttatctcctcaagggaaaaccacctctttcaataagaattttatacgtaagaaattctttgaatctcgcagctcttctgtgagtagcgagggaaagacgctcttcagttcttatgatacattcgtaactaacttgagcgacgagaaattgaaagtagatgatttctacaaaagaatggaagctaagttctatgaaagatttgaccacttgattaatgatttggagaaggaaggcattgtaacaagattgaatgaaactttcaatcctgaaattcaagcattgcctcctttaagagaaattatttctggtacaagtgagacacattcttctaataacccatttgaaatacactcttccaacatcgacagtgaattgagaaataggtttgattacagcgaagaagaaatggatgaagatgatgacgttgacgtgtttgctgacactaccgacaataccgccctcttgaattattctcaatttaacattaaatctcagaaaaagtctttattaaaacagacaataataaatctttacatagacctttgccagttgaaatcttttatcgaattgaacagaatgggtttcagtaaaattactaagaagtctgataaagtattgcacatgaacactaggcaagaattaatagaaagtgaagaatttttcaaagacacctacatcttccagcatgaaactttaagcagtttaaacagtaaaattgcacaacttattgaattttatgctgttctcatgggtcagcctgggaacgtagattcctgcaagcaagagttaaagtcctacttgcacgaccacattgtttgggaaagaagcaacacatggaaagacatgttgggcctctcttctcaaaataacgatataataactattgaagatgaagctgagaaacttatgcaagaaaagcttcaaattgaatatttcaagtatccattgcctaagccaattaatttgaagtttactaaaattgaaaatttggcagttcctaagttattttttgggaaaagagcaatgaaaataggcttcattatcattgtcacaggtgttttgttgggtgttaaaactttcaatgaccctgtcgaacacagatgtatggcattggtagaatgctgtgctttcttatgggctagtgaagccattccattacacatcacaggtttattggttccccttttgactgtcctttttagggtattgaaagacgatgacggtaaggtaatgggagcagcagctgcctctacagaaatcttaggtacaatgtggtcttctacaattatgattttattagcaggtttcacattgggtgaagccttgtctcaatataacgttgcgaaagttttggcatcttggttattggcccttgcaggtaccaagccaagaaatgtccttttaatggcaatgagtgttgtattctttctttctatgtggatttccaacgttgcctccccagtattgacatattctttattaacacccttattagatccgttagactacacttctccgtttgctaaggcattagtcatgggtgttgcactttctgcagatattggtggtatggcttcccctatttcttctccacagaatatcatctccatgcagtacttaaaaccttatggaatcggctgggggcaattttttgctgtcgctttacctacaggtattttatctatgttgtgctcctgggccttgatgatactcacctttaaaataggcaaaactaaattagaaaaatttaaaccaataaggaccagatttactataaagcaatattttatcatcattgtaactattgctactattcttttatggtgtgtagagtctcaaatagaaagtgcttttggatcttccggtgaaattgcagtaataccgatagtcttgttttttggtacaggtttattatctacaaaggatttcaacacattcccttggtctattgttgttcttgctatgggtggtatagcccttggtaaggcagtttcttcttctggcttgttggtaactattgcaagagcattacaaaagaaaattcagaacgatggtgtttttgctatcttatgtattttcggtattttaatgttagttgtgggcacttttgtctctcatactgtgagcgcaatcatcattattcccttggtgcaagaagttggtgacaaattatccgatccaaaggcagctccaattcttgtgttcggttgcgccttgttagccagttgcggtatggggttggcttcttctggatttccaaacgttactgctatttctatgaccgataaaaagggtaatagatggttgactgtaggcgcttttatctccagaggtgttcctgcttctttgttagcgtttgtctgcgtaattactctcggttatggtattagttcttccgtcttaaaaggtagcacttga

SEQ ID NO: 1211 - DNA, 1929 bp, Saccharomyces cerevisiae
atgagcccgaaaaacaaatatgtatatatctgtgtagaatatatatatatatatttcgcaaaaatacataaacaatcaaccctctcctcagacactactaagatgtttgtactgatagataatgtcctcgcctaccttcttgaacaagacgacctatttgtaaccgcacgcttcgctatccagggccaaatcgtctcaagaagagttaacaaaatacatatctccaacatcacagacgtccttctacaacaattcataagtcacacactgccctataatgacaatatcgtcccaaaaaaaatcctcgacagcatgagaacggccgtacggcagttgctggaagcaactgcctgtgtctctagagaatgccccctcgtcaaaagaagtcaggacataaaaagagcaagaaaacgtctactcagtgactggtataggctcggcgctgatgcaaacatggatgccgtattactagttgttaactccgcctggaggtttctggccgtctggcgacccttcgtaaactcaatccaacatgcaactcaggaattgtatcaaaatatcgcccattaccttcttcatggcaacgtaaatatacagagggtcacagcactaatacagctcgtaatgggacaggacgatttactttttagtatggatgatgttctacaagaggtcttcagaatacagctctatttgaataagatgctgccgcacaactctcacaaatggcaaaagccatccccctttgactccgcaaacttactacttaacttcagagactggacaactgacaatgctctcctccaagagttgctactatcctatcccacaattaataaaaacaaacacaaaaatcactccgtccctcgtctaatacaaatctgggtagagtcttattggcaagatagtgagacaacattaaaagatatcctcaatttttggtacagtcacttggctgaatattatgaataccaagaactgtttgcagacatagttcagctgtttataaacaaaaaaagaacgaggcaattgaagattcattacattggtctaactgataaggaaatcgaagaaaataaaccgcccctggactacgaaaacttatttctccaatacgagatagacaaaacgaacgcaaatgatgaattgtgcggtgcaactgacctcagtgatttacttttccaatggaaacagggtgaacttctagaagtcgaagccttcgctctaaacgtatctccatggtcacttgcaaagacattgactctcttagaatcttctctttacttggatattgaaacaatagaattcacaagacatttcaaacacaacgatacaacaattgactccgtgtttacgctttccaaccagttatcgtcctacgttcttgagacaactttgcagcaaacgcacaccatttcctactggttacaagttgcactgtcttgtctatacttacgaaacttaaactcacttgcttcaatcattacatcattgcaaaatcattcaatagaaagactatctctcccgatagatgttaaatcagaccacctttttcagcgcctaaaagtcgtcgtacatccaaacaacaactacaacgtttatagaagaacaattaaacatattttccacagtcagcttccttgtgtaccttttacatcactgcttatcagggacattaccttcataagagacggaaacgatacattcactaaagatggtaataacgtgaatatgcaaaagttcaaccaaatcacaaagatagtcgcttttgcgcaatatttacaacaaaagcaatatgaagatatacactgttcaaatactactgcaagaagcttattaggggctatgataaaggtgcacactttatataacgacaacaaagacagggcgtatcaagtcagtatagctaaggttccaaggcttacctaa

SEQ ID NO: 1212 - DNA, 1929 bp, Artificial Sequence
  Description of Artificial Sequence: Synthetic polynucleotide
atgagcccgaaaaacaaatatgtatatatctgtgtagaatatatatatatatatttcgcaaaaatacataaacaatccaccctctccagtgacactactaagatgtttgtattaatagataatgtcctcgcctaccttcttgaacaagacgacttatttgtaaccgcacgcttcgctatccagggccaaatcgtctctagaagagttaacaaaatacatatctccaacatcacagacgtccttttacaacaattcataagtcacacattaccctataatgacaatatcgtcccaaaaaaaatcctcgacagcatgagaacggccgtaagacagttgttggaagcaactgcctgtgtctctagagaatgccccctcgtcaaaagaagtcaggacataaaaagagcaagaaaacgtttgctcagtgactggtataggctcggcgctgatgcaaacatggatgccgtattattggttgttaactccgcctggaggtttttggccgtctggaggcccttcgtaaactctatccaacatgcaactcaggaattgtatcaaaatatcgcccattaccttcttcatggcaacgtaaatatacagagggtcacagcattaatacagctcgtaatgggacaggacgatttactttttagtatggatgatgttttgcaagaggtcttcagaatacagctctatttgaataagatgttaccgcacaactctcacaaatggcaaaagccatccccctttgactccgcaaacttattacttaacttcagagactggacaactgacaatgctctcctccaagagttgttattatcctatcccacaattaataaaaacaaacacaaaaatcactccgtccctcgtttaatacaaatctgggtagagtcttattggcaagatagtgagacaacattaaaagatatcctcaatttttggtacagtcacttggctgaatattatgaataccaagaattatttgcagacatagttcagttatttataaacaaaaaaagaacgaggcaattgaagattcattacattggtttgactgataaggaaatcgaagaaaataaaccgcccttagactacgaaaacttatttctccaatacgagatagacaaaacgaacgcaaatgatgaattgtgcggtgcaactgacctcagtgatttacttttccaatggaaacagggtgaacttttagaagtcgaagccttcgctttgaacgtatctccatggagtcttgcaaagacattgactctcttagaatcttctctttacttggatattgaaacaatagaattcacaagacatttcaaacacaacgatacaacaattgactccgtgtttacgctttccaaccagttatcttcctacgttcttgagacaactttgcagcaaacgcacaccatttcctactggttacaagttgcattatcttgtctttacttaagaaacttaaactctcttgcttctatcattacatctttgcaaaatcattccatagaaagattatctctcccgatagatgttaaaagtgaccacctttttcagcgcttaaaagtcgtcgtacatccaaacaacaactacaacgtttatagaagaacaattaaacatattttccacagtcagcttccttgtgtaccttttacatctttacttatcagggacattaccttcataagagacggaaacgatacattcactaaagatggtaataacgtgaatatgcaaaagttcaaccaaatcacaaagatagtcgcttttgcgcaatatttacaacaaaagcaatatgaagatatacactgttctaatactactgcaagaagcttattaggggctatgataaaggtgcacactttatataacgacaacaaagacagggcgtatcaagtcagtatagctaaggttccaaggcttacctga

SEQ ID NO: 1213 - DNA, 633 bp, Saccharomyces cerevisiae; identical to SEQ ID NO: 1011

SEQ ID NO: 1214 - DNA, 633 bp, Artificial Sequence; identical to SEQ ID NO: 1012
  Description of Artificial Sequence: Synthetic polynucleotide

SEQ ID NO: 1215 - DNA, 528 bp, Saccharomyces cerevisiae; identical to SEQ ID NO: 1013

SEQ ID NO: 1216 - DNA, 528 bp, Artificial Sequence; identical to SEQ ID NO: 1014
  Description of Artificial Sequence: Synthetic polynucleotide

SEQ ID NO: 1217 - DNA, 333 bp, Saccharomyces cerevisiae
atgctgaagtacgtggtgacggatattgggaagatgtgtttgtacatttggccttatagagtgtggtcgtggcggaggttgtttatctttcgagtactgaatgttgtcagtatagctatcctatttgaaactccccatcgtcttgctcttgttcccaatgtttgtttatacactcatatggctatacccttatctacttgcctcttttgtttatgtctatgtatttgtataaaatatgatattactcagactcaagcaaacaatcaattcttagcatcattctttgttcttatcttaaccataaacgatcttgatgtgacttttgtaatttga

SEQ ID NO: 1218 - DNA, 333 bp, Artificial Sequence
  Description of Artificial Sequence: Synthetic polynucleotide
atgttgaagtacgtggtgacggatattgggaagatgtgtttgtacatttggccttatagagtgtggtcctggagaaggttgtttatctttagagtattgaatgttgtcagtatagctatcttatttgaaactccccatcgtcttgctcttgttcccaatgtttgtttatacactcatatggctatacccttatctacttgcctcttttgtttatgtttatgtatttgtataaaatatgatattactcagactcaagcaaacaatcaattcttagcatctttctttgttcttatcttaaccataaacgatcttgatgtgacttttgtaatttga

SEQ ID NO: 1219 - DNA, 4224 bp, Saccharomyces cerevisiae
atgatgtccttttccaaaaacgccactcctagagccattgttagtgaatctagcactttgcatgagatgaagtttagaaattttagagttgcccatgaaaaaatctcgttggatatagatctagctactcactgcattaccggtagcgctactataataatcattccgttgatccaaaacctagaatatgtaacttttgattgcaaggaaatgactattaaagatgttctggtcgaaaatcgtcgatgtgatcaatttattcatgacgacccacttcaaacaaatttgaatggattgacttcacaaaatgtattatacagcgacaattccattgaacagtcacattttttgagatctaagtttgctagcttgaatgaatacccagaaacggactctaaatcccagttaactataaaaataccatcttccatcaaaatatctttggaggacgccaatgcattaagtaattacactccgattactccttcaattaagactacccctgggtttcaagaatctgttttcactccaattacattacaaattgaatatgaaatcagaaacccaaagtcgggtattaaattcgatactgtgtatgctgacaagccctggttatggaacgtttacacttcaaatggtgagatttgcagttctgcatcatattgggtcccatgtgtcgatttgcttgatgaaaaatctacatgggagttagaattcagcgtaccgagattggttaaaaatataggtacttcgaaattaatcggacaaaatggagaagagagtgaaaaagagaaggaggatacgcctgagcacgatgaagaggaagaggggaagccggcaagagttatcaaagacgaagataaggattctaacttgaaaaatgacgaagaaggcaaaaatagtaaaagcaaagatgcacaagataatgatgaagaagaagaggaaggcgaaagtgacgaagaggaagaggaaggggaagaggaaaggcggaatattgaggaaagcaacaatccgagtttgagggatgtgattgtgtgttgttcagaatattcaaatattaaagaacttccgcacccgattgatttgacgaaaaaaaaatgcatatttcagataattaatcctgtggctccacatcacattggttgggctataggcgcctttaattcatggtctttacctttgatatcacctccaagtgttgatgccgaggacgaagtagaggaagacaagttgagagagaatgttgtggacaatgttaacgatactatggatgacgacattggttcggatattatacccattcaaattttcacacttccgacgcaggaaacagatgagttaacagttataaattcgacagttgtctgccaaaaaattatagatttctactcgaaagaatttgggtcttatcctttcacttgttactctatggtgtttttacctaccgcaccttctaagcatatggattttgcagcattaggcatttgtaataccagattattgtaccctctagaagttattgataaagcattcagtactacgaatgagttagcatgggcacttgctaaccaatggtcttgtgtgaatataactcctttagatatgaacgactactggtgctgtcttggtattgctggttatatggtgtttcaggtaaccaaaaaattaatgggtaataacacgtataaatatcaattaaagcgtaatagtgaggcgattgtggaacaagacttcgagaaaccgcctattgggagcacttttaccggcagttctaggccaatatcttggtcttctaaagatttgtcctttatacaattgaaggcaccgatgatactacacatacttgacagaaggatgactaaaacagaacgatctttcggtatgtctcgagtattacctaaaattttccttcaagctatgtctggtgatttaccgaataattcgttgacttcatcgcattttcaacatgtttgcgaaagagttaataaaagtaaattagagaattttttcaacgaatgggtatatgggtctggggtacccatattacgtgtcacccaaagatttaataggaagaggatggttatagaactgggtataaggcaagttcaagatgaagaacttggccacgaaaaagtggtaggggaggaaggatttttcaaaagtgcactagaccacttagaacatccagatttgaaccgaaccgaatgcttcacgggctcgatgactataaggatccatgaacacgatggtactccgtatgagcatattgtggaaatcaaagatacattcacaaaaatagatattcagtacaatacaaagtacagaagattaaggaaaagaggtggtggtgcaaatgatgaaaatggtgttgaaaacaataatgaggagaagcctattgttgtggatgtgaattgtctaggaaatgtatacatgtcgcccgaagagtgttcccgattcagtttgacggaatttaatcgtacgtctgagagtaatgaattgcttaagcaaaacgaagcatttgagtggatacgcatagactctgatctggaatggatttgccaaatgcacattaatcagccggattacatgttttcttctcagttgagacaagatggggacatagaggcccaactagaagccatacgatattatgaggacgtcgttgttaatggtggtgtgaaatcacttgtttattcaagtattttgtttagaacggcgatcgacgagcgttacttttttggcataagactcgcggcgtgcgaagcgcttagtaaatacgtatatgatccggattttactggcggtgttaagcatttaattcagatttttcagattttgttttgcctagaagactctaatattccaaagagtaataactttgagaatcctaagttgtatttcttacagtgtaatattcccaaatatttggctaaagtgaaaaatgaaaatggtaaatgtccaaaattggtgaagcaatttttactggatattcttgtttataatgagaatggtgaaaataaatacagtgatgatgcgtacgtccgcagcttgattgaaaatgttgttaaagttgctttaaatgagtataaagataaagcatatatggaaaaagttaagactcagttattgaggtacgaaaatttggtgaattggctttcatcatacgagtctttgattaagactactatcatgtatgctaagtacaaattgcataaagtgggtgcttatgactttacggaattgacaggaatgataatgcatacattaacattaggtataaataacggagatatttccagggaaagctttcagaatgagtttttaatggttttgaaaatcatgcttttagaaggtggtttaaaaaacaaggatgcccttgttttgtttactgaaatactttgcttccatgaggattcttatattagggataaaagtgttgatgtgctttctgaatgtgtaaatctagttgttatggatggtagtttggataccataagtgacgatattaagtcctccgtccaatctgtgcacaatgaagttaaaaatataaaaagtgaggatgatattgagttgtttttaagtggtcattacgtcgatgatatgaaaataaaaatagaaaagattggccgtcaaaatattagtgggttaatacaaatatgccgagatatgtttaaagggtatagccctttgaagatattactctgggatgttttgaatttacctgttcttagcttgtaccagaggaagcaaatacatgatcttgttagggtgatgtacaccctaatcaacagttttgtagttagattggaaacaccaagggagagaagacttgtggcgaagatgaatagtaatgaagaaggtaaacttgatattgttataaagcgtgaaagtatcctaaaagtacatattaaaaaggaagtaacctctactgtggaggcacccaagaaggcgaataagataaagataagtttgaaaggtgataaacctgttagaaaagtggaaaaacaaattgtgaagccgaaggtaactagcaaacaaaggaaagtcaaaagtcatgtgaaccgcatgggcagtttacctttacggtttgttaagatccaacaacaacctagagtaatggtgcatttgtcatccgtcccgtatagccaattcgttcaaattacaaaagtcacatcaagatcgtttatggttaagataagaacaaagaatgatgctaagaattga

SEQ ID NO: 1220 - DNA, 4224 bp, Artificial Sequence
  Description of Artificial Sequence: Synthetic polynucleotide
atgatgtccttttccaaaaacgccactcctagagccattgttagtgaatctagcactttgcatgagatgaagtttagaaattttagagttgcccatgaaaaaatctctttggatatagatttggctactcactgcattaccggtagcgctactataataatcattccgttgatccaaaacttggaatatgtaacttttgattgcaaggaaatgactattaaagatgttttggtcgaaaatcgtcgttgtgatcaatttattcatgacgacccacttcaaacaaatttgaatggattgacttctcaaaatgtattatacagcgacaattccattgaacagtctcattttttgagatctaagtttgctagcttgaatgaatacccagaaacggactctaaatcccagttaactataaaaataccatcttccatcaaaatatctttggaggacgccaatgcattaagtaattacactccgattactccttctattaagactacccctgggtttcaagaatctgttttcactccaattacattacaaattgaatatgaaatcagaaacccaaagtctggtattaaattcgatactgtgtatgctgacaagccctggttatggaacgtttacacttccaatggtgagatttgcagttctgcaagttattgggtcccatgtgtcgatttgcttgatgaaaaatctacatgggagttagaattcagcgtaccgagattggttaaaaatataggtacttctaaattaatcggacaaaatggagaagagagtgaaaaagagaaggaggatacgcctgagcacgatgaagaggaagaggggaagccggcaagagttatcaaagacgaagataaggattctaacttgaaaaatgacgaagaaggcaaaaatagtaaaagcaaagatgcacaagataatgatgaagaagaagaggaaggcgaaagtgacgaagaggaagaggaaggggaagaggaaaggagaaatattgaggaaagcaacaatccgagtttgagggatgtgattgtgtgttgttctgaatattctaatattaaagaacttccgcacccgattgatttgacgaaaaaaaaatgcatatttcagataattaatcctgtggctccacatcacattggttgggctataggcgcctttaattcttggtctttacctttgatatctcctccaagtgttgatgccgaggacgaagtagaggaagacaagttgagagagaatgttgtggacaatgttaacgatactatggatgacgacattggttctgatattatacccattcaaattttcacacttccgacgcaggaaacagatgagttaacagttataaattctacagttgtctgccaaaaaattatagatttctactctaaagaatttgggtcttatcctttcacttgttactctatggtgtttttacctaccgcaccttctaagcatatggattttgcagcattaggcatttgtaataccagattattgtaccctttggaagttattgataaagcattcagtactacgaatgagttagcatgggcacttgctaaccaatggtcttgtgtgaatataactcctttagatatgaacgactactggtgctgtcttggtattgctggttatatggtgtttcaggtaaccaaaaaattaatgggtaataacacgtataaatatcaattaaagcgtaatagtgaggcgattgtggaacaagacttcgagaaaccgcctattgggagcacttttaccggcagttctaggccaatatcttggtcttctaaagatttgtcctttatacaattgaaggcaccgatgatattacacatacttgacagaaggatgactaaaacagaaagatctttcggtatgtctagagtattacctaaaattttccttcaagctatgtctggtgatttaccgaataattctttgacttcttctcattttcaacatgtttgcgaaagagttaataaaagtaaattagagaattttttcaacgaatgggtatatgggtctggggtacccatattacgtgtcacccaaagatttaataggaagaggatggttatagaattgggtataaggcaagttcaagatgaagaacttggccacgaaaaagtggtaggggaggaaggatttttcaaaagtgcattggaccacttagaacatccagatttgaacagaaccgaatgcttcacgggctctatgactataaggatccatgaacacgatggtactccgtatgagcatattgtggaaatcaaagatacattcacaaaaatagatattcagtacaatacaaagtacagaagattaaggaaaagaggtggtggtgcaaatgatgaaaatggtgttgaaaacaataatgaggagaagcctattgttgtggatgtgaattgtttaggaaatgtatacatgtctcccgaagagtgttccagattcagtttgacggaatttaatcgtacgtctgagagtaatgaattgcttaagcaaaacgaagcatttgagtggatacgcatagactctgatttggaatggatttgccaaatgcacattaatcagccggattacatgttttcttctcagttgagacaagatggggacatagaggcccaattggaagccataagatattatgaggacgtcgttgttaatggtggtgtgaaatctcttgtttattctagtattttgtttagaacggcgatcgacgagcgttacttttttggcataagactcgcggcgtgcgaagcgcttagtaaatacgtatatgatccggattttactggcggtgttaagcatttaattcagatttttcagattttgttttgcttagaagactctaatattccaaagagtaataactttgagaatcctaagttgtatttcttacagtgtaatattcccaaatatttggctaaagtgaaaaatgaaaatggtaaatgtccaaaattggtgaagcaatttttattagatattcttgtttataatgagaatggtgaaaataaatacagtgatgatgcgtacgtccgcagcttgattgaaaatgttgttaaagttgctttaaatgagtataaagataaagcatatatggaaaaagttaagactcagttattgaggtacgaaaatttggtgaattggctttcttcctacgagtctttgattaagactactatcatgtatgctaagtacaaattgcataaagtgggtgcttatgactttacggaattgacaggaatgataatgcatacattaacattaggtataaataacggagatatttccagggaaagctttcagaatgagtttttaatggttttgaaaatcatgcttttagaaggtggtttaaaaaacaaggatgcccttgttttgtttactgaaatactttgcttccatgaggattcttatattagggataaaagtgttgatgtgctttctgaatgtgtaaatttggttgttatggatggtagtttggataccataagtgacgatattaagtcctccgtccaatctgtgcacaatgaagttaaaaatataaaaagtgaggatgatattgagttgtttttaagtggtcattacgtcgatgatatgaaaataaaaatagaaaagattggccgtcaaaatattagtgggttaatacaaatatgcagagatatgtttaaagggtatagccctttgaagatattactctgggatgttttgaatttacctgttcttagcttgtaccagaggaagcaaatacatgatcttgttagggtgatgtacaccttaatcaacagttttgtagttagattggaaacaccaagggagagaagacttgtggcgaagatgaatagtaatgaagaaggtaaacttgatattgttataaagcgtgaaagtatcttgaaagtacatattaaaaaggaagtaacctctactgtggaggcacccaagaaggcgaataagataaagataagtttgaaaggtgataaacctgttagaaaagtggaaaaacaaattgtgaagccgaaggtaactagcaaacaaaggaaagtcaaaagtcatgtgaaccgcatgggcagtttacctttaagatttgttaagatccaacaacaacctagagtaatggtgcatttgtcttccgtcccgtatagccaattcgttcaaattacaaaagtcacatctagatcttttatggttaagataagaacaaagaatgatgctaagaattga

SEQ ID NO: 1221 - DNA, 384 bp, Saccharomyces cerevisiae
atgatcccagctccacttgatgcttccttattgagagaacatgcattccaaggaactaatgatctaagcacagttttgagtccaagtacgtttaccgatgaaggtggatataaacctgtattgaaatacggactcggttatttcaattatggactggttatagacgatgaagtgtatgattattcagtgtgtgatatcataaggggtcacgtttacgatcatttttggtgttatttctgttgtttcatgattttgtttactatctggttaataagtttaaattggtgtcccagcagcaagaaaagcaagtttgattggagcaagaagaaggacgactttaagatggaaggaggtgatttagagtaccaacatgtaaagatctaa

SEQ ID NO: 1222 - DNA, 384 bp, Artificial Sequence
  Description of Artificial Sequence: Synthetic polynucleotide
atgatcccagctccacttgatgcttccttattgagagaacatgcattccaaggaactaatgatttgagcacagttttgagtccaagtacgtttaccgatgaaggtggatataaacctgtattgaaatacggactcggttatttcaattatggattggttatagacgatgaagtgtatgattattctgtgtgtgatatcataaggggtcacgtttacgatcatttttggtgttatttctgttgtttcatgattttgtttactatctggttaataagtttaaattggtgtcccagcagcaagaaaagcaagtttgattggagcaagaagaaggacgactttaagatggaaggaggtgatttagagtaccaacatgtaaagatctga

SEQ ID NO: 1223 - DNA, 1074 bp, Saccharomyces cerevisiae
atgaggttagctgtggttgtgaccctacttgttcactgtttcctagtgacatgctctccaggagataatttagatgagtttatagactgtacgtatgcgtgcgagtataacagaagatgtccgaattcccaaataaactacattgaccctgaaaccaacatgtttcatgatattgagtttttcgataccccgcctttgtactctaagttattgttctgggattgtatctcagattgtgattaccaatgtcagcacatcattacgcgctggagaattgacgaagaggaagaaatataccaattccatgggaaatggccatttttgagagtattggggactcaggaattcttctcgacgatattcagtataggtaactttattccacattataagggatttgtaaagttttctagaatcatacgcgaagagggagataggaggagaaaaaacagcagaagtatactgatttggaactacctttacgttactgtggcgggaatgttggcttggacagcaagctcggtctttcactgtcgtgatttgatcataacggagaagctagattactttttcgcaggtttaactgtcctaacagggtttcatgcaatatttgcaagaatgacttccatgttcctgtaccccaagatagcacaagcgttcactgcgtcagttgcggcaatctttgccctgcacatcttgagactctatgttgactggtcgtacacatacaacatgagattcaacatttttttcggtgttttacagtatattttattgataatgttatcatgccaaaactaccatgctctgcaaaagcaaaagctaatgggcgaattcaagaaaaccgcgtactccagcttcaagcggcaaatcttcaaactgtgtgtcattccaattcttcttgtgattgtaaccacaatggccatgtcattggaactgtttgacttttttagttacgaatggcagattgatgcccatgcgctatggcatctgtgcacaatatggccctcgtgggtattgtacgactttttcctcgaggattatgcctattggggtaatagacaattgtactaa

SEQ ID NO: 1224 - DNA, 1074 bp, Artificial Sequence
  Description of Artificial Sequence: Synthetic polynucleotide
atgaggttagctgtggttgtgaccttacttgttcactgtttcttggtgacatgctctccaggagataatttagatgagtttatagactgtacgtatgcgtgcgagtataacagaagatgtccgaattcccaaataaactacattgaccctgaaaccaacatgtttcatgatattgagtttttcgataccccgcctttgtactctaagttattgttctgggattgtatcagtgattgtgattaccaatgtcagcacatcattacgcgctggagaattgacgaagaggaagaaatataccaattccatgggaaatggccatttttgagagtattggggactcaggaattcttcagtacgatattcagtataggtaactttattccacattataagggatttgtaaagttttctagaatcatacgcgaagagggagataggaggagaaaaaacagcagaagtatattgatttggaactacctttacgttactgtggcgggaatgttggcttggacagcaagctctgtctttcactgtcgtgatttgatcataacggagaagttggattactttttcgcaggtttaactgtcttaacagggtttcatgcaatatttgcaagaatgacttccatgttcttgtaccccaagatagcacaagcgttcactgcgtccgttgcggcaatctttgccttgcacatcttgagactctatgttgactggagttacacatacaacatgagattcaacatttttttcggtgttttacagtatattttattgataatgttaagttgccaaaactaccatgctttacaaaagcaaaagttgatgggcgaattcaagaaaaccgcgtactccagcttcaagagacaaatcttcaaattatgtgtcattccaattcttcttgtgattgtaaccacaatggccatgtctttggaattatttgacttttttagttacgaatggcagattgatgcccatgcgctttggcatttgtgcacaatatggcccagctgggtattgtacgactttttcctcgaggattatgcctattggggtaatagacaattgtactga

SEQ ID NO: 1225 - DNA, 1476 bp, Saccharomyces cerevisiae
atgaagccacagtgcatactcatctctttgctggtcaacctcgcatacgcagaggagtatttggtgaggttcaaaaatcccacagcattccaacaattcacttcgaattccaacaggtcatggagacagttcatcgacaacaaaattgagaagaaattctccatcggatccttccgcggcgtgaccatgaacctgtccaagaacttagtgaacaagctgaagaaaagcccactggtggctgatattgtgcccaacttcaggttcgaagcttttgaaggcgacagtgtaaatagcgccgagtcgagttatacgtttaacgctaccgccaaatactcgtacgaagacgtcgaggaagagcaaaatataacgtatcaaccagacgcaccccgtcacttggcccggatttcccgccactaccaactcccattcgacgttggggacaaggaccgctacaaaagctggttcaattactactatgaacacgactatcaaggtcaagacgtcaacgcctatatcatggatacgggtatcttcgcggaccatccggaattcgaagacagagtcatccaggggattgacttgaccaaagaagggtttggcgaccagaatggccacggaacgcacgtggcgggactcgtaggttccaaaacgtatggagcggcaaagagggtcaatcttgtggaggtcaaagtcttgggcaaagacgggtctggcgaggccagtaacgttcttagtggtctggagttcatcgtggaacattgcacaaaggtcagtcgcccacagggtaaaaaatgcgtggccaatctaagtctagggagtttcaggagccccataatcaacatggcagtggagggggccattgaagaaggtattgtatttgttgccgcggcggggaacttcaatttagacgcctactgggcctcacctgcgtctgcagaaaacgttatcaccgtaggggcctttgatgaccacattgacacgattgccaagttcagcaattgggggccctgtgtaaacatctttgccccaggcgtggaaattgagtcgctatctcatctgaactacaacgacactttaattttgtcaggtacatctatgtcgacgcccattgtcaccggagttgcagcgatcctactctcgaagggaattgagcctgaaatgatagcacaggagattgagtatttgtccacgcgtaatgttttccatagaagaacgttgtttttcaagccttctacgccaaaccagattctttacaacggcgtcgataaactggacgatccatatgacgacgaaacgttccctcgattgaacatagaggcaattgctaaggaactggaggagtacaatgccactttacaaactcctatgtctgagaatcttcaatctggttcaaaactgtggggttggaataacgatgtcacactacctcttggtgagattcgattgaagaggcgtgattttatgaaaaatttgtag

SEQ ID NO: 1226 - DNA, 1476 bp, Artificial Sequence
  Description of Artificial Sequence: Synthetic polynucleotide
atgaagccacagtgcatactcatctctttgttggtcaacctcgcatacgcagaggagtatttggtgaggttcaaaaatcccacagcattccaacaattcacttccaattccaacaggagttggagacagttcatcgacaacaaaattgagaagaaattctccatcggatccttccgcggcgtgaccatgaacctttccaagaacttagtgaacaagttgaagaaaagcccattggtggctgatattgtgcccaacttcaggttcgaagcttttgaaggcgacagtgtaaatagcgccgagagcagttatacgtttaacgctaccgccaaatactcctacgaagacgtcgaggaagagcaaaatataacgtatcaaccagacgcaccccgtcacttggccagaatttcccgccactaccaactcccattcgacgttggggacaaggaccgctacaaaagctggttcaattactactatgaacacgactatcaaggtcaagacgtcaacgcctatatcatggatacgggtatcttcgcggaccatccggaattcgaagacagagtcatccaggggattgacttgaccaaagaagggtttggcgaccagaatggccacggaacgcacgtggcgggactcgtaggttccaaaacgtatggagcggcaaagagggtcaatcttgtggaggtcaaagtcttgggcaaagacgggtctggcgaggccagtaacgttcttagtggtttagagttcatcgtggaacattgcacaaaggtcagtcgcccacagggtaaaaaatgcgtggccaatttgagtttagggagtttcaggagccccataatcaacatggcagtggagggggccattgaagaaggtattgtatttgttgccgcggcggggaacttcaatttagacgcctactgggcctctcctgcgtctgcagaaaacgttatcaccgtaggggcctttgatgaccacattgacacgattgccaagttcagcaattgggggccctgtgtaaacatctttgccccaggcgtggaaattgagtctttatctcatttgaactacaacgacactttaattttgtctggtacatctatgtctacgcccattgtcaccggagttgcagcgatcttactctctaagggaattgagcctgaaatgatagcacaggagattgagtatttgtccacgcgtaatgttttccatagaagaacgttgtttttcaagccttctacgccaaaccagattctttacaacggcgtcgataaattagacgatccatatgacgacgaaacgttccctagattgaacatagaggcaattgctaaggaattagaggagtacaatgccactttacaaactcctatgtctgagaatcttcaatctggttccaaattatggggttggaataacgatgtcacattgcctcttggtgagattagattgaagaggcgtgattttatgaaaaatttgtga

SEQ ID NO: 1227 - DNA, 510 bp, Saccharomyces cerevisiae
atgtggagcaggaacgtcagattgcttggatcatggacaaggtcctacatggtccccgccaccaagagaaaaaccatccccgtgtacccacctgtgcagcgcatagcttcgtcgcagattatgaagcaggtggccctctcagaaatagagtctctggatcccggggccgttaagaggaagctcatcagtaaaaagaacaaggaccgcttgaaggcaggcgacgtggtccggattgtgtacgactcgtccaagtgctcgtacgacacctttgttggctacatcctttccatagaccgcaaacaactggtgcaagacgcctcgttgctgttgcggaaccagatagccaagacggccgtcgagattagagtgccattgttttcgccgctgatcgagagaatcgacttgctaaccccccacgtctcgagcagacaaagaaacaaacactactacatcagaggtacaaggttggatgtcggcgacctcgaggcaggtctaagaagaaagaaatag

SEQ ID NO: 1228 - DNA, 510 bp, Artificial Sequence
  Description of Artificial Sequence: Synthetic polynucleotide
atgtggagcaggaacgtcagattgcttggatcttggacaaggtcctacatggtccccgccaccaagagaaaaaccatccccgtgtacccacctgtgcagcgcatagcttcttctcagattatgaagcaggtggccctctctgaaatagagtctttagatcccggggccgttaagaggaagctcatcagtaaaaagaacaaggaccgcttgaaggcaggcgacgtggtcagaattgtgtacgactcttccaagtgctcttacgacacctttgttggctacatcctttccatagaccgcaaacaattagtgcaagacgcctctttgttgttgagaaaccagatagccaagacggccgtcgagattagagtgccattgttttctccgttgatcgagagaatcgacttgttgaccccccacgtctccagcagacaaagaaacaaacactactacatcagaggtacaaggttggatgtcggcgacctcgaggcaggtttaagaagaaagaaatga

SEQ ID NO: 1229 - DNA, 828 bp, Saccharomyces cerevisiae
atgtcacgtcctgaggagttggcaccaccggagattttctataatgatagcgaagcacacaagtacacgggttcgaccagagtgcagcatatccaggcgaagatgacgctgagggcgttggagcttttgaatctgcagccgtgcagtttcattctggatatcgggtgcgggtccggactgtctggggagattttgacgcaggagggagaccatgtgtggtgtggtttggatatatcgcccagcatgcttgcgaccggtcttagtagagagctggagggcgacttgatgttgcaggatatgggcaccgggataccgttccgggcgggctcgtttgacgcggctattagtatcagtgcgatccaatggctgtgcaatgcggacacttcatacaacgatcctaaacagcggttgatgaggtttttcaacacattgtatgctgcactgaagaagggagggaaatttgtggcccagttctacccgaaaaacgacgaccaggtggacgacatactgcagtctgccaaggtggcagggttcagtggcgggcttgtggtggacgacccagagtctaaaaagaataagaagtactaccttgtgttgagcagtggggccccaccgcagggggaggagcaggtgaatttggacggtgtgaccatggacgaggagaacgtcaacttgaagaaacaactgcgccagcgcttgaagggaggcaaagacaaggagtctgccaagagtttcattctaagaaagaaggagctcatgaaaagacgtgggaggaaagttgcgaaggactccaagttcaccgggaggaaaagaagacacaggttctag

SEQ ID NO: 1230 - DNA, 828 bp, Artificial Sequence
  Description of Artificial Sequence: Synthetic polynucleotide
atgtcccgtcctgaggagttggcaccaccggagattttctataatgatagcgaagcacacaagtacacgggttctaccagagtgcagcatatccaggcgaagatgacgttgagggcgttggagcttttgaatttacagccgtgcagtttcattttagatatcgggtgcgggtccggattatctggggagattttgacgcaggagggagaccatgtgtggtgtggtttggatatatctcccagcatgcttgcgaccggtcttagtagagagttagagggcgacttgatgttgcaggatatgggcaccgggataccgttcagagcgggctcttttgacgcggctattagtatcagtgcgatccaatggttgtgcaatgcggacacttcttacaacgatcctaaacagcgtttgatgaggtttttcaacacattgtatgctgcattgaagaagggagggaaatttgtggcccagttctacccgaaaaacgacgaccaggtggacgacatattacagtctgccaaggtggcagggttcagtggcgggcttgtggtggacgacccagagtctaaaaagaataagaagtactaccttgtgttgagcagtggggccccaccgcagggggaggagcaggtgaatttggacggtgtgaccatggacgaggagaacgtcaacttgaagaaacaattgcgccagcgcttgaagggaggcaaagacaaggagtctgccaagagtttcattttaagaaagaaggagctcatgaaaagacgtgggaggaaagttgcgaaggactccaagttcaccgggaggaaaagaagacacaggttctga

SEQ ID NO: 1231 - DNA, 1833 bp, Saccharomyces cerevisiae
atgacggagactaaggatttgttgcaagacgaagagtttcttaagatccgcagactcaattccgcagaagccaacaaacggcattcggtcacgtacgataacgtgatcctgccacaggagtccatggaggtttcgccacggtcgtctaccacgtcgctggtggagccagtggagtcgactgaaggagtggagtcgactgaggcggaacgtgtggcagggaagcaggagcaggaggaggagtaccctgtggacgcccacatgcaaaagtacctttcacacctgaagagcaagtctcggtcgaggttccaccgaaaggatgctagcaagtatgtgtcgttttttggggacgtgagttttgatcctcgccccacgctcctggacagcgccatcaacgtgcccttccagacgactttcaaaggtccggtgctggagaaacagctcaaaaatttacagttgacaaagaccaagaccaaggccacggtgaagactacggtgaagactacggagaaaacggacaaggcagatgcccccccaggagaaaaactggagtcgaacttttcagggatctacgtgttcgcatggatgttcttgggctggatagccatcaggtgctgcacagattactatgcgtcgtacggcagtgcatggaataagctggaaatcgtgcagtacatgacaacggacttgttcacgatcgcaatgttggacttggcaatgttcctgtgcactttcttcgtggttttcgtgcactggctggtgaaaaagcggatcatcaactggaagtggactgggttcgttgcagtgagcatcttcgagttggctttcatccccgtgacgttccccatttacgtctactactttgatttcaactgggtcacgagaatcttcctgttcctgcactccgtggtgtttgttatgaagagccactcgtttgccttttacaacgggtatctttgggacataaagcaggaactcgagtactcttccaaacagttgcaaaaatacaaggaatctttgtccccagagacccgcgagattctgcaaaaaagttgcgacttttgccttttcgaattgaactaccagaccaaggataacgacttccccaacaacatcagttgcagcaatttcttcatgttctgtttgttccccgtcctcgtgtaccagatcaactacccaagaacgtcgcgcatcagatggaggtatgtgttggagaaggtgtgcgccatcattggcaccatcttcctcatgatggtcacggcacagttcttcatgcacccggtggccatgcgctgtatccagttccacaacacgcccaccttcggcggctggatccccgccacgcaagagtggttccacctgctcttcgacatgattccgggcttcactgttctgtacatgctcacgttttacatgatatgggacgctttattgaattgcgtggcggagttgaccaggtttgcggacagatatttctacggcgactggtggaattgcgtttcgtttgaagagtttagcagaatctggaacgtccccgttcacaaatttttactaagacacgtgtaccacagctccatgggcgcattgcatttgagcaagagccaagctacattatttacttttttcttgagtgccgtgttccacgaaatggccatgttcgccattttcagaagggttagaggatatctgttcatgttccaactgtcgcagtttgtgtggactgctttgagcaacaccaagtttctacgggcaagaccgcagttgtccaacgttgtcttttcgtttggtgtctgttcagggcccagtatcattatgacgttgtacctgaccttatga

SEQ ID NO: 1232 - DNA, 1833 bp, Artificial Sequence
  Description of Artificial Sequence: Synthetic polynucleotide
atgacggagactaaggatttgttgcaagacgaagagtttcttaagatccgcagactcaattccgcagaagccaacaaaagacattctgtcacgtacgataacgtgatcttgccacaggagtccatggaggtttctccaagatcttctaccacgtccttagtggagccagtggagtctactgaaggagtggagtctactgaggcggaacgtgtggcagggaagcaggagcaggaggaggagtaccctgtggacgcccacatgcaaaagtacctttctcacttgaagagcaagtctaggagtaggttccacagaaaggatgctagcaagtatgtgtccttttttggggacgtgagttttgatcctcgccccacgctcttggacagcgccatcaacgtgcccttccagacgactttcaaaggtccggtgttggagaaacagctcaaaaatttacagttgacaaagaccaagaccaaggccacggtgaagactacggtgaagactacggagaaaacggacaaggcagatgcccccccaggagaaaaattagagagcaacttttctgggatctacgtgttcgcatggatgttcttgggctggatagccatcaggtgctgcacagattactatgcgtcttacggcagtgcatggaataagttggaaatcgtgcagtacatgacaacggacttgttcacgatcgcaatgttggacttggcaatgttcttgtgcactttcttcgtggttttcgtgcactggttggtgaaaaagagaatcatcaactggaagtggactgggttcgttgcagtgagcatcttcgagttggctttcatccccgtgacgttccccatttacgtctactactttgatttcaactgggtcacgagaatcttccttttcttgcactccgtggtgtttgttatgaagagccacagttttgccttttacaacgggtatctttgggacataaagcaggaactcgagtactcttccaaacagttgcaaaaatacaaggaatctttgtccccagagacccgcgagattttacaaaaaagttgcgacttttgccttttcgaattgaactaccagaccaaggataacgacttccccaacaacatcagttgcagcaatttcttcatgttctgtttgttccccgtcctcgtgtaccagatcaactacccaagaacgtcccgcatcagatggaggtatgtgttggagaaggtgtgcgccatcattggcaccatcttcctcatgatggtcacggcacagttcttcatgcacccggtggccatgcgctgtatccagttccacaacacgcccaccttcggcggctggatccccgccacgcaagagtggttccacctcctcttcgacatgattccgggcttcactgttctttacatgctcacgttttacatgatatgggacgctttattgaattgcgtggcggagttgaccaggtttgcggacagatatttctacggcgactggtggaattgcgtttcttttgaagagtttagcagaatctggaacgtccccgttcacaaatttttattaagacacgtgtaccacagctccatgggcgcattgcatttgagcaagagccaagctacattatttacttttttcttgagtgccgtgttccacgaaatggccatgttcgccattttcagaagggttagaggatatcttttcatgttccaattatctcagtttgtgtggactgctttgagcaacaccaagtttttaagagcaagaccgcagttgtccaacgttgtcttttcttttggtgtctgttctgggcccagtatcattatgacgttgtacttgaccttatga

SEQ ID NO: 1233 - DNA, 309 bp, Saccharomyces cerevisiae
atggtggcagttcataaggtcaggtacaacgtcataatgatactgggccctgaacagacaccaaacgaaaagacaacgttggacaactgcggtcttgcccgtagaaacttggtgttgctcaaagcagtccacacaaactgcgacagttggaacatgaacagatatcctctaacccttctgaaaatggcgaacatggccatttcgtggaacacggcactcaagaaaaaagtaaataatgtagcttggctcttgctcaaatgcaatgcgcccatggagctgtggtacacgtgtcttagtaaaaatttgtga

SEQ ID NO: 1234 - DNA, 309 bp, Artificial Sequence
  Description of Artificial Sequence: Synthetic polynucleotide
atggtggcagttcataaggtcaggtacaacgtcataatgatattgggccctgaacagacaccaaacgaaaagacaacgttggacaactgcggtcttgcccgtagaaacttggtgttgctcaaagcagtccacacaaactgcgacagttggaacatgaacagatatcctttgacccttttgaaaatggcgaacatggccatttcttggaacacggcactcaagaaaaaagtaaataatgtagcttggctcttgctcaaatgcaatgcgcccatggagttatggtacacgtgtcttagtaaaaatttgtga

SEQ ID NO: 1235 - DNA, 669 bp, Saccharomyces cerevisiae
atgaacgctaatatatgggtggctgcttcagatggtaatttggaccgagtggaacatatcctccgcgagagtaaaggcgccatgaccccgcaatccaaggacattaacggctacactccaatgcatgctgccgccgcatacggccacctggatttgctgaagaaaatgtgcaatgagtacaatggagacattaatgtgttggacaacgacggcgataccccgttgcaccatgtggaggatgtggccactgccaggttgatcgtggaagagctgggtggagacttcactatcaggaatgtggagggccaaacgccatacgactcgttcgtcgagaacggtgaagatggtgagctaatcgagtacatgaggattaagtccggcgtggccgatgttcacggagtggacggcgtgcagggtgagggtgtcatcgacagcaaattgctggaagagttcaaggacaacgtgagatacaccttggaaaatgaccctgaggaaggagccgatgaggccactctgcaacgcaggaggcagttggaacagatcattacgggagacaacgctgaggaggagttggaaaggtacatccgtgctatggtcagagagcagatgctgggccagggctccatggcgggttccggggacgaaccagattccaagagaagaaaataa

SEQ ID NO: 1236 - DNA, 669 bp, Artificial Sequence
  Description of Artificial Sequence: Synthetic polynucleotide
atgaacgctaatatatgggtggctgcttctgatggtaatttggacagagtggaacatatcctccgcgagagtaaaggcgccatgaccccgcaatccaaggacattaacggctacactccaatgcatgctgccgccgcatacggccacttggatttgttgaagaaaatgtgcaatgagtacaatggagacattaatgtgttggacaacgacggcgataccccgttgcaccatgtggaggatgtggccactgccaggttgatcgtggaagagttaggtggagacttcactatcaggaatgtggagggccaaacgccatacgactctttcgtcgagaacggtgaagatggtgagttgatcgagtacatgaggattaagtccggcgtggccgatgttcacggagtggacggcgtgcagggtgagggtgtcatcgacagcaaattgttggaagagttcaaggacaacgtgagatacaccttggaaaatgaccctgaggaaggagccgatgaggccactttacaacgcaggaggcagttggaacagatcattacgggagacaacgctgaggaggagttggaaaggtacatccgtgctatggtcagagagcagatgcttggccagggctccatggcgggttccggggacgaaccagattccaagagaagaaaatga

SEQ ID NO: 1237 - DNA, 1452 bp, Saccharomyces cerevisiae
atggtaacacagaccaatccggtccctgttacatatccaacggatgcttatatccccacgtatctgcccgatgataaggtctccaatctggcagatttgaaaaaattgatagaaatggattccagactagatttgtatctgacaagaaggaggctggatacgtccatcaatttacctacaaacaccaagaccaaggaccatccccccaataaagagatgctgaggatttacgtctacaacactacggaaagcagccctcgcagcgattctggcaccccagcggactcaggcaagactacatggacactgagaatagaaggtaagcttctgcacgagtccgcaaacggaaagcacccatttagtgagtttttggaaggtgtcgcggtcgactttaaaagactgaaaccgctgggcatgggcaagaagaggaaacgcgattcgtcattgagccttcctttgaatctgcaacaacccgaatacaatgatcaagatagcaccatgggcgataacgacaacggcgaggatgaggacagtgcagaggcagaatccagggaggaaattgtagacgcactggaatggaactacgatgaaaacaacgttgtggagtttgatggtatcgacatcaagaggcaaggcaaggataatttgcgatgcagtataaccatccagttgaggggtgtcgacggtggaaaagtacagtactcgcccaacttagctaccttgataggtatgcaaacgggctccgttaatgacgcggtttattcgatctacaagtacattttgatcaacaatctgtttgttacggaacaaacagaggctcaagatggttccaacgatgccgaagacagcagtaacgagaataacaataaaaacggtgctggtgacgatgatggcgtcgagggaagtactccaaaggataagcccgaattgggtgaagtgaagctagattcactcttacaaaaggtattggatacaaacgccgcgcacctccccttgatgaatgttgtgcaaaccgtgaacaaactggtatcacccctaccgcccatcatcctagattatacaattgatctttccaaagataccacctatggtgctaccaccttggatgtagatgtgtcgcacattctccaccagcctcaaccccagccaaatttacaaaaagaggaagaaacagatgctgaagacacagcaaaactacgtgaaatcacaaagcttgccttgcagttgaactctagtgctcaaaaataccagtttttccacgaactgtctttgcatccaagagaaacgctgactcactacttatggtcttccaagcaaaacgagcttgtgctgcagggcgaccaatacttcaatgaagatgctgcaagaacgagtgacatatacagtaacaacaacaatgacaggtcactaatgggcaatatctcactactgtactcccaaggaagactataa

SEQ ID NO: 1238 - DNA, 1452 bp, Artificial Sequence
  Description of Artificial Sequence: Synthetic polynucleotide
atggtaacacagaccaatccggtccctgttacatatccaacggatgcttatatccccacgtatttacccgatgataaggtctccaatttggcagatttgaaaaaattgatagaaatggattccagattagatttgtatttgacaagaaggaggttagatacgtccatcaatttacctacaaacaccaagaccaaggaccatccccccaataaagagatgttaaggatttacgtctacaacactacggaaagcagccctcgcagcgattctggcaccccagcggacagtggcaagactacatggacattaagaatagaaggtaagcttttacacgagtccgcaaacggaaagcacccatttagtgagtttttggaaggtgtcgcggtcgactttaaaagattgaaaccgttgggcatgggcaagaagaggaaacgcgattcttctttgagccttcctttgaatttacaacaacccgaatacaatgatcaagatagcaccatgggcgataacgacaacggcgaggatgaggacagtgcagaggcagaatccagggaggaaattgtagacgcattggaatggaactacgatgaaaacaacgttgtggagtttgatggtatcgacatcaagaggcaaggcaaggataatttgagatgcagtataaccatccagttgaggggtgtcgacggtggaaaagtacagtactctcccaacttagctaccttgataggtatgcaaacgggctccgttaatgacgcggtttattctatctacaagtacattttgatcaacaatttatttgttacggaacaaacagaggctcaagatggttccaacgatgccgaagacagcagtaacgagaataacaataaaaacggtgctggtgacgatgatggcgtcgagggaagtactccaaaggataagcccgaattgggtgaagtgaagttggattctctcttacaaaaggtattggatacaaacgccgcgcacctccccttgatgaatgttgtgcaaaccgtgaacaaattagtatctcccttgccgcccatcatcttagattatacaattgatctttccaaagataccacctatggtgctaccaccttggatgtagatgtgtctcacattctccaccagcctcaaccccagccaaatttacaaaaagaggaagaaacagatgctgaagacacagcaaaattacgtgaaatcacaaagcttgccttgcagttgaactctagtgctcaaaaataccagtttttccacgaattatctttgcatccaagagaaacgttgactcactacttatggtcttccaagcaaaacgagcttgtgttacagggcgaccaatacttcaatgaagatgctgcaagaacgagtgacatatacagtaacaacaacaatgacaggtccttgatgggcaatatctctttattgtactcccaaggaagattatga

SEQ ID NO: 1239 - DNA, 1545 bp, Saccharomyces cerevisiae
atgcctaacgcttcccaagtttacagatctaccagatccagctctccaaagacaatctcttttgaagaggctatcattcaaggtctggccactgacggtggtcttttcattccaccaactattccacaagtggaccaagccactcttttcaatgattggtcaaagctctccttccaagacttagcctttgctatcatgagactatacattgcccaagaagagattccagatgctgatctaaaggacttgatcaagagatcttattctactttccgttctgatgaagtcacccccttggtgcaaaacgtcactggtgacaaggagaatttgcacattttagaattattccacggtcctacctacgctttcaaagacgttgctttacaatttgtcggtaatctttttgaatacttcttacaaagaaccaacgccaatttacctgaaggcgagaaaaagcaaatcactgtggtcggtgctacttccggtgacactggttctgcagccatctacggtttaagaggcaaaaaggacgtttccgttttcatcttatatccaaccggtagaatttccccaattcaagaagaacaaatgaccaccgttccagatgaaaacgtccagactttgtctgttaccggtactttcgacaactgtcaagatatcgtcaaagctattttcggtgacaaagaattcaactctaaacacaacgtcggtgctgttaactccatcaactgggcaagaatcttggcccaaatgacctattacttttattcattcttccaagccaccaacggtaaggactccaagaaggtcaagttcgttgtgccaagtgggaacttcggtgatatattggccggttattttgccaagaaaatgggtttgcctattgaaaaactggccatcgctaccaatgaaaacgacattttggacagatttttgaaatctggtctatacgaaagatcagacaaggttgctgctactttatccccagcaatggatatcttaatctcttctaactttgaaagactactatggtacctagctcgtgaatacctagctaatggtgatgatttgaaagccggtgaaatcgtcaacaattggttccaggaattgaagaccaacggtaagttccaagttgacaaatccatcattgaaggcgcatcaaaggactttacatcagaaagagtttccaatgaagaaacatctgaaacaatcaagaagatctacgaatcatctgtaaatccaaaacattacatcttagatcctcacacagctgtcggtgtttgcgccacagaaagattgattgcaaaagataatgacaagtccatccaatacatttctctatctaccgctcacccagctaaatttgccgatgctgtaaacaatgcattgtctggattttccaattattcatttgaaaaggatgttttgcctgaggaattgaagaaactatccacattaaagaagaaattaaaattcatcgaaagagctgacgttgaattggtcaaaaacgctattgaagaagaacttgctaaaatgaaattataa

SEQ ID NO: 1240 - DNA, 1545 bp, Artificial Sequence
  Description of Artificial Sequence: Synthetic polynucleotide
atgcctaacgcttcccaagtttacagatctaccagatccagctctccaaagacaatctcttttgaagaggctatcattcaaggtttagccactgacggtggtcttttcattccaccaactattccacaagtggaccaagccactcttttcaatgattggtccaagctctccttccaagacttagcctttgctatcatgagattatacattgcccaagaagagattccagatgctgatttgaaggacttgatcaagagatcttattctactttccgttctgatgaagtcacccccttggtgcaaaacgtcactggtgacaaggagaatttgcacattttagaattattccacggtcctacctacgctttcaaagacgttgctttacaatttgtcggtaatctttttgaatacttcttacaaagaaccaacgccaatttacctgaaggcgagaaaaagcaaatcactgtggtcggtgctacttccggtgacactggttctgcagccatctacggtttaagaggcaaaaaggacgtttccgttttcatcttatatccaaccggtagaatttccccaattcaagaagaacaaatgaccaccgttccagatgaaaacgtccagactttgtctgttaccggtactttcgacaactgtcaagatatcgtcaaagctattttcggtgacaaagaattcaactctaaacacaacgtcggtgctgttaactccatcaactgggcaagaatcttggcccaaatgacctattacttttattctttcttccaagccaccaacggtaaggactccaagaaggtcaagttcgttgtgccaagtgggaacttcggtgatatattggccggttattttgccaagaaaatgggtttgcctattgaaaaattggccatcgctaccaatgaaaacgacattttggacagatttttgaaatctggtttatacgaaagaagtgacaaggttgctgctactttatccccagcaatggatatcttaatctcttctaactttgaaagattattatggtacttggctcgtgaatacttggctaatggtgatgatttgaaagccggtgaaatcgtcaacaattggttccaggaattgaagaccaacggtaagttccaagttgacaaatccatcattgaaggcgcatccaaggactttacaagtgaaagagtttccaatgaagaaacatctgaaacaatcaagaagatctacgaaagctctgtaaatccaaaacattacatcttagatcctcacacagctgtcggtgtttgcgccacagaaagattgattgcaaaagataatgacaagtccatccaatacatttctttatctaccgctcacccagctaaatttgccgatgctgtaaacaatgcattgtctggattttccaattattcttttgaaaaggatgttttgcctgaggaattgaagaaactttccacattaaagaagaaattaaaattcatcgaaagagctgacgttgaattggtcaaaaacgctattgaagaagaacttgctaaaatgaaattatga

SEQ ID NO: 1241 - DNA, 1692 bp, Saccharomyces cerevisiae
atgcctatgaacaattttctagatgaattcaatttatttgattcaatcattaccatgatgaagaacgacccatgttgcgtcgaggattatgagccaatcgtcgaaaacctgaaccgtatatttcaaaggacgtttaatgatgaagaacataggaaatcaatggctaactcccagcttttttgggaacgattaagagacaccttggaagcaatgctgttgccagcgtcgttaaatgagaatagctcaataccgtatacaagaacagtgaggggccttatcttaatgatgagaaaccttgccgctgaaaaccaggaaataccccaaaagcttttactacaaaacctcgtaattcgtggttttctgcatgcaactagtgagtatgtcgttgacactccgctaatcaaacatctatacatcgcatgtttaacgtgccttttcaatatacagcagaactactctacagtggatatgactacttttccagctcttttacaatttcttcaatacccttatgggatcaaattggaagacggtgaagaagaagagcatttctggctaccatatttatttcttttcaagacgtatctcaacaatgatgaattttccaacgaatttttcagggataatgatacaccccagaaagactattattgtgttagggatagaatatttttcgatatagtgacagccaaattcatccaggatcaagagaattcctttttaattgagaagggcagaaactatctggatgattcaaaattggaaataacttctattgacctatctgtcttagaatgtattagcaaaagtcttacaactgcttcttttggtaaatacctcaatgggttagaagaaagacagccaggaaaattcaccactttgttgcagatattgcaattggttgtaacgagtaaagaagattggaatacctatgagttgactgcaattatgtcatggtgctaccccattctgcaacgtcttgcatgcaaggatattcctgcctttttcaataaaagttgtaacgattatgctccttcagttgccatccaattacactccactttactttcttgcctggacataatttctgacttgtgcaaattcaatcatgttagaaaattcttaatttcgtatgactctgtgaaaatattggtatctctcttggatactttccaaaagaatttgttgaggattaattttttgaaaggaaacggtgatacggtgaatgaaattaaaatcacagatcatgaaggtaacaaaatcgaggaccggttattaattttcaaccgtgttaataccaacgaatcctttattagggctgataattttccccattgtaaattagtaataatcgaaatattggcatcgttagtgtatgcacatcctgaaatccaagatcaaataagagaattaggtggtcttgcattaattctttccaattgtgtcatcgatgataatgatccgtttatcaaggaaagatctattgtttgcttgaagtttttgttaaagaataatgccaagaatcaggaatatgtcaaaaaaatggaagctcaagacgttgttcaagacgatgcattgagcaaagctgggtttgaaatatcagttgaaaagggcgggaaagttagattagtatctaaagaagaagaccctgggaacgagaattctgagattattagcatagatgaagattaa

SEQ ID NO: 1242 - DNA, 1692 bp, Artificial Sequence
  Description of Artificial Sequence: Synthetic polynucleotide
atgcctatgaacaattttttggatgaattcaatttatttgattctatcattaccatgatgaagaacgacccatgttgcgtcgaggattatgagccaatcgtcgaaaacttgaaccgtatatttcaaaggacgtttaatgatgaagaacataggaaatctatggctaactcccagcttttttgggaaagattaagagacaccttggaagcaatgcttttgccagcgtctttaaatgagaatagcagtataccgtatacaagaacagtgaggggccttatcttaatgatgagaaaccttgccgctgaaaaccaggaaataccccaaaagcttttattacaaaacctcgtaattcgtggttttttacatgcaactagtgagtatgtcgttgacactccgttgatcaaacatctttacatcgcatgtttaacgtgccttttcaatatacagcagaactactctacagtggatatgactacttttccagctcttttacaatttcttcaatacccttatgggatcaaattggaagacggtgaagaagaagagcatttctggttaccatatttatttcttttcaagacgtatctcaacaatgatgaattttccaacgaatttttcagggataatgatacaccccagaaagactattattgtgttagggatagaatatttttcgatatagtgacagccaaattcatccaggatcaagagaattcctttttaattgagaagggcagaaactatttggatgattctaaattggaaataacttctattgacttgtctgtcttagaatgtattagcaaaagtcttacaactgcttcttttggtaaatacctcaatgggttagaagaaagacagccaggaaaattcaccactttgttgcagatattgcaattggttgtaacgagtaaagaagattggaatacctatgagttgactgcaattatgtcttggtgctaccccattttacaacgtcttgcatgcaaggatattcctgcctttttcaataaaagttgtaacgattatgctccttctgttgccatccaattacactccactttactttcttgcttggacataatttctgacttgtgcaaattcaatcatgttagaaaattcttaatttcttatgactctgtgaaaatattggtatctctcttggatactttccaaaagaatttgttgaggattaattttttgaaaggaaacggtgatacggtgaatgaaattaaaatcacagatcatgaaggtaacaaaatcgaggacagattattaattttcaaccgtgttaataccaacgaatcctttattagggctgataattttccccattgtaaattagtaataatcgaaatattggcatctttagtgtatgcacatcctgaaatccaagatcaaataagagaattaggtggtcttgcattaattctttccaattgtgtcatcgatgataatgatccgtttatcaaggaaagatctattgtttgcttgaagtttttgttaaagaataatgccaagaatcaggaatatgtcaaaaaaatggaagctcaagacgttgttcaagacgatgcattgagcaaagctgggtttgaaatatctgttgaaaagggcgggaaagttagattagtatctaaagaagaagaccctgggaacgagaattctgagattattagcatagatgaagattga

SEQ ID NO: 1243 - DNA, 2772 bp, Saccharomyces cerevisiae
atgaaatccgatttcaagttctctaaccttttaggtacggtctacaggcaaggtaacatcaccttttccgatgatggcaagcaactactctcaccggtggggaatagggtcagcgtgtttgacttaatcaacaacaaatcgttcacgtttgaatacgagcatcgcaaaaatattgctgccattgatctgaacaaacaaggcacattgctgatttctattgacgaggacggtcgcgccatccttgtcaatttcaaagcccgtaacgtgcttcaccatttcaacttcaaagaaaaatgctccgctgtgaagttcagccctgatgggagactctttgcattagcctcaggcaggtttttacagatttggaagactccagatgttaataaagacagacagtttgctcccttcgtccgccatagggtgcatgcgggacactttcaagacataacgtctttgacgtggtcacaagattccagatttatccttacgacttccaaagacttaagcgcaaaaatatggtccgtagattcagaggaaaagaaccttgcggcgacaacatttaatgggcacagagactacgttatgggtgcgttcttcagtcatgatcaggaaaaaatctacactgtaagcaaagacggtgctgtctttgtctgggaatttaccaagaggccatccgatgacgacgacaatgaaagtgaagacgacgacaagcaagaagaagtagatatttcgaaatacagctggagaatcacaaagaaacattttttttacgcaaaccaagccaaagtaaagtgtgtcaccttccatccagcaacaaggcttttagctgtcggatttactagtggggaattccgtctttacgatttgcctgatttcactttgattcaacagctttctatggggcaaaacccagtcaacaccgttagcgtcaaccaaaccggcgaatggctggcgtttggttccagcaaactgggccaattactagtttacgaatggcaatcggaatcgtatatcttgaagcagcagggccatttcgattccacaaatagtcttgcatactctccggatggttcacgtgtagtgacagcatccgaagatgggaaaatcaaagtttgggacattacatcagggttttgtttggccacttttgaagaacacacctcttcagttactgctgtacagtttgcgaaaaggggtcaggtcatgttctcatcatcgttagatggtacggtgagagcgtgggacttaatcaggtatcgtaattttagaacattcactggtactgaaagaatccaattcaattgtttagcggtggatccatcaggtgaagtggtttgtgccgggtccctggacaattttgacattcatgtttggtccgtgcaaactggtcaattattagatgctttgtccggacatgaaggccctgtttcgtgtctttcatttagtcaagagaacagtgtcttagcttctgcatcatgggataaaacaattagaatctggtccatatttggtagaagccaacaagtagaacctatagaagtttattccgatgttttagccttatcaatgagaccagatggtaaagaagttgcagtatctaccttaaagggtcaaatatccattttcaacatagaagatgccaagcaggtgggcaacattgactgtagaaaggatataatatctggtaggtttaatcaagataggttcactgccaaaaattctgaacgatccaaattttttactacaatacattacagttttgatggtatggctattgtggctggtggtaataataactccatttgtctatatgatgttccaaatgaagtcttgttaaaaagattcattgtgtccagaaacatggctttgaatggtactctcgaatttttaaacagtaagaaaatgactgaagcaggttcattagatttgattgacgatgcaggcgaaaattcagatttggaggatcgtattgataattctttaccagggtctcaaagaggtggcgacctgtccacaagaaaaatgagaccagaggttagagttacttcggtgcaattctccccaacggcgaatgcatttgccgctgcttcaacggaaggtttattgatatattccaccaatgacacgatattatttgatccctttgatctggatgtggacgtcaccccccattctactgtagaggcgctacgagaaaagcagtttttaaatgcattagtaatggcgttcaggttaaatgaagaatatttgatcaataaagtctatgaagccatacctattaaggaaatccccttggttgcaagtaatattcctgcaatatatttaccgaggattctgaagttcatcggtgattttgccattgaatcccaacacattgagtttaacctaatttggatcaaagctctattatctgcgagcggtggttacataaatgaacacaaatatctcttctcgacggctatgaggtcgatacaaagatttattgttagagtggctaaggaagtagtcaataccactactgataacaaatacacctatagatttttggtatcaactgatgggtccatggaagatggcgcggctgatgatgacgaggttctattaaaagatgacgcagatgaagataacgaagagaacgaagagaacgatgtagtcatggaatctgacgacgaggaaggatggattggtttcaatgggaaggataacaaattacccttgtctaatgaaaatgattccagtgatgaagaagaaaatgagaaagagcttccttga

SEQ ID NO: 1244 - DNA, 2772 bp, Artificial Sequence
  Description of Artificial Sequence: Synthetic polynucleotide
atgaaatccgatttcaagttctctaaccttttaggtacggtctacaggcaaggtaacatcaccttttccgatgatggcaagcaattgctctctccggtggggaatagggtcagcgtgtttgacttaatcaacaacaaatctttcacgtttgaatacgagcatcgcaaaaatattgctgccattgatttgaacaaacaaggcacattgttaatttctattgacgaggacggtcgcgccatccttgtcaatttcaaagcccgtaacgtgcttcaccatttcaacttcaaagaaaaatgctccgctgtgaagttcagccctgatgggagactctttgcattagcctctggcaggtttttacagatttggaagactccagatgttaataaagacagacagtttgctcccttcgtccgccatagggtgcatgcgggacactttcaagacataacgtctttgacgtggtctcaagattccagatttatccttacgacttccaaagacttaagcgcaaaaatatggtccgtagattctgaggaaaagaaccttgcggcgacaacatttaatgggcacagagactacgttatgggtgcgttcttcagtcatgatcaggaaaaaatctacactgtaagcaaagacggtgctgtctttgtctgggaatttaccaagaggccatccgatgacgacgacaatgaaagtgaagacgacgacaagcaagaagaagtagatatttccaaatacagctggagaatcacaaagaaacattttttttacgcaaaccaagccaaagtaaagtgtgtcaccttccatccagcaacaaggcttttagctgtcggatttactagtggggaattccgtctttacgatttgcctgatttcactttgattcaacagctttctatggggcaaaacccagtcaacaccgttagcgtcaaccaaaccggcgaatggttagcgtttggttccagcaaattgggccaattattggtttacgaatggcaaagtgaaagttatatcttgaagcagcagggccatttcgattccacaaatagtcttgcatactctccggatggttctcgtgtagtgacagcatccgaagatgggaaaatcaaagtttgggacattacatctgggttttgtttggccacttttgaagaacacacctcttctgttactgctgtacagtttgcgaaaaggggtcaggtcatgttctcttcttctttagatggtacggtgagagcgtgggacttaatcaggtatcgtaattttagaacattcactggtactgaaagaatccaattcaattgtttagcggtggatccatctggtgaagtggtttgtgccgggtccttggacaattttgacattcatgtttggtccgtgcaaactggtcaattattagatgctttgtccggacatgaaggccctgtttcttgtctttcttttagtcaagagaacagtgtcttagcttctgcatcttgggataaaacaattagaatctggtccatatttggtagaagccaacaagtagaacctatagaagtttattccgatgttttagccttatctatgagaccagatggtaaagaagttgcagtatctaccttaaagggtcaaatatccattttcaacatagaagatgccaagcaggtgggcaacattgactgtagaaaggatataatatctggtaggtttaatcaagataggttcactgccaaaaattctgaaagatccaaattttttactacaatacattacagttttgatggtatggctattgtggctggtggtaataataactccatttgtttgtatgatgttccaaatgaagtcttgttaaaaagattcattgtgtccagaaacatggctttgaatggtactctcgaatttttaaacagtaagaaaatgactgaagcaggttctttagatttgattgacgatgcaggcgaaaattctgatttggaggatcgtattgataattctttaccagggtctcaaagaggtggcgacttatccacaagaaaaatgagaccagaggttagagttacttctgtgcaattctccccaacggcgaatgcatttgccgctgcttccacggaaggtttattgatatattccaccaatgacacgatattatttgatccctttgatttggatgtggacgtcaccccccattctactgtagaggcgcttagagaaaagcagtttttaaatgcattagtaatggcgttcaggttaaatgaagaatatttgatcaataaagtctatgaagccatacctattaaggaaatccccttggttgcaagtaatattcctgcaatatatttaccgaggattttgaagttcatcggtgattttgccattgaatcccaacacattgagtttaacttgatttggatcaaagctttattatctgcgagcggtggttacataaatgaacacaaatatctcttcagtacggctatgaggtctatacaaagatttattgttagagtggctaaggaagtagtcaataccactactgataacaaatacacctatagatttttggtatccactgatgggtccatggaagatggcgcggctgatgatgacgaggttttattaaaagatgacgcagatgaagataacgaagagaacgaagagaacgatgtagtcatggaatctgacgacgaggaaggatggattggtttcaatgggaaggataacaaattacccttgtctaatgaaaatgattccagtgatgaagaagaaaatgagaaagagcttccttga

SEQ ID NO: 1245 - DNA, 777 bp, Saccharomyces cerevisiae
atggatgacgatcacgaacagttggtcgaagaactggaggccgtcgaggccatctatccggatcttctctccaagaagcaggaagacggaagcatcatcgttgtgaaagtgccgcagcatgaatacatgacactgcagatctccttcccgacacactacccctccgaggaggctcctaatgtcatcgaagttggtgtctgcacttctttggctaagcgcgatctctacgataccaagtaccttcagcatttgttccaggaagtgatggactctgttttccaccgcggatctgtctgtctatttgacttcctcacagaactcgacggtgtcttgtacgttgaaccagaggaggagacagaaccggtccagcagagtgacattcccacagaccccttcgagggctggaccgcgtcggaccccattactgatagaggctcgactttcatggcctttgcagcacatgttacctccgaggaacaagcgtttgccatgctagacctactgaagaccgactccaagatgcgtaaggcaaaccatgtcatgagtgcatggcgaatcaagcaggatggctctgcggcaacatatcaagattccgatgatgacggtgaaacggccgccggctccagaatgctgcacctcatcaccatcatggatgtgtggaacgtcatcgttgtggtggcccgttggttcggcggtgcccacataggtcccgaccggtttaaacacatcaattctacggcaagagaagctgttgtcagggccggcttcgactcgtaa

SEQ ID NO: 1246 - DNA, 777 bp, Artificial Sequence
  Description of Artificial Sequence: Synthetic polynucleotide
atggatgacgatcacgaacagttggtcgaagaattagaggccgtcgaggccatctatccggatcttctctccaagaagcaggaagacggaagcatcatcgttgtgaaagtgccgcagcatgaatacatgacattacagatctccttcccgacacactacccctccgaggaggctcctaatgtcatcgaagttggtgtctgcacttctttggctaagcgcgatctctacgataccaagtaccttcagcatttgttccaggaagtgatggactctgttttccaccgcggatctgtctgtttatttgacttcctcacagaactcgacggtgtcttgtacgttgaaccagaggaggagacagaaccggtccagcagagtgacattcccacagaccccttcgagggctggaccgcgtctgaccccattactgatagaggctccactttcatggcctttgcagcacatgttacctccgaggaacaagcgtttgccatgttggacttattgaagaccgactccaagatgcgtaaggcaaaccatgtcatgagtgcatggagaatcaagcaggatggctctgcggcaacatatcaagattccgatgatgacggtgaaacggccgccggctccagaatgttgcacctcatcaccatcatggatgtgtggaacgtcatcgttgtggtggcccgttggttcggcggtgcccacataggtcccgacagatttaaacacatcaattctacggcaagagaagctgttgtcagggccggcttcgacagttga

SEQ ID NO: 1247 - DNA, 336 bp, Saccharomyces cerevisiae
atgagccaatttgaaaagcagaaggaacagggcaattctttgttcaaacagggcctgtatcgcgaggctgtgcactgttatgaccaactaattactgctcaaccgcagaacccggtcgggtacagcaacaaagccatggcgctgatcaaactgggtgaatatacacaggctattcaaatgtgccagcaaggactgcggtacacctcaacggcagagcatgtagctatcagatccaaattgcaatatcgtctagagctggcacagggagcggtaggttcagtacagatccctgttgtagaggttgatgaactaccggagggatacgaccggtcctga

SEQ ID NO: 1248 - DNA, 336 bp, Artificial Sequence
  Description of Artificial Sequence: Synthetic polynucleotide
atgagccaatttgaaaagcagaaggaacagggcaattctttgttcaaacagggcttgtatcgcgaggctgtgcactgttatgaccaattgattactgctcaaccgcagaacccggtcgggtacagcaacaaagccatggcgttgatcaaattgggtgaatatacacaggctattcaaatgtgccagcaaggattgagatacacctctacggcagagcatgtagctatcagatccaaattgcaatatcgtttagagttggcacagggagcggtaggttctgtacagatccctgttgtagaggttgatgaattaccggagggatacgacagatcctga

SEQ ID NO: 1249 - DNA, 1896 bp, Saccharomyces cerevisiae
atggtgcgttttgtttcaattttaagtttattcggctgcgcggcgacgcttgtcacggcccatgatgacatggacatggacatggatatggacatggatatggacatgaatatcgatacgacaacgtctcaatccatagatgtctcatccacggcttcaatcgtccccgtgccacatgaaccaaaacatttgcatggccttcctatactgcaatcgccctcgcttacccctgcggagagattgtactgggaaaactacaacaccacaacctactttactacacaggctgggaataggtctgcccttcgctaccacattattacgctgctcttggttgcatttgtgctctaccctgtgtccctggcgctaagcgccgcccgttctaggtggtacttacccctgctgtttgttaatctatgcatttgtatttcgtccgtaatggcattgtccgtgttcaaaaatactttcccggaagaagactggtatgcgcataatatctatggcaccacttctgtgctacttctcgtttttatgcttgttcacttcttcgctgcggtgctttctgtccccgtctcattagcatcgaaaaaggagtaccgtccggttgacaccatccctctgaatgatcttgaatctacgcccgtcatggtgaatagtgcacgtggctctccaagtccttcttccaacagagacacgttgttctcgctctcttcagacaccacgaccgccacggccaccaataataataaacggagacgcgctgaaggcgaagacgagggtgataacacctccaaccacgacactttgcgcgacgaagactacgataatgatgacgacgaaattgcttccattgaagcgccacctctgcttcctcaagacatacccgttttccgaatcttgtttaccaacacgaagtaccagatgcttgccgcgcacctctcgtgcgtcgccaacgtggtctttcacatgcttacctacccgctattcatgtacatctttgtagacctaatcatcggcttcgctgtaggtaacttgctcggcaagggcatccgcatctttaatctcttggcccactggattaagggcggcgtattttttactctgggcgttgtctctttagcaagatactgcggtttcgcagctaagtacggctgggcatggaacaacatcagcttcacctctcaactcacacaaacgcgttcctccaatcttcttttccggtttgctcctgcggggactttcaccatggaattcgttgaatccttcctcattttcttttacgggtccaccaacatcttcttggagcacctggcaggaaacggcggcgcatggactgccaaggatttacagcatgtgtcgatcgcgtttatgttcataggaaccggattgtgtgggctactcacggagtacaagctcaaccattggcgattcgagcatgcccgcaaacggccacagaccgatgtagttgctgccacaccggggtactctccaaacccgttccccgctttcaccatattttggactgggattctgatgtcccagcacgcacagtcctcgcaattttctactaccattcacacgcaatggggatacttgttgtcctatgggtccttcttccgtctgctaacatttttgattctgtttttggtgcccaacaccaacagtgccgcatccaagcctttcacggagttgatcacctcgttctgtctcctctgtggtggtctggtatttatggagtccacggatcagtccattgaagccatggaatatagggggtttacccccatgttcactttcaacctcagtgttggattcgtttctttgttgatggcttgggaaatgattttatttatttggaaagactggctcatcaaaaccaggaaaaccagtctttaa

SEQ ID NO: 1250 - DNA, 1896 bp, Artificial Sequence
  Description of Artificial Sequence: Synthetic polynucleotide
atggtgcgttttgtttctattttaagtttattcggctgcgcggcgacgcttgtcacggcccatgatgacatggacatggacatggatatggacatggatatggacatgaatatcgatacgacaacgtctcaatccatagatgtctcttccacggcttctatcgtccccgtgccacatgaaccaaaacatttgcatggccttcctatattgcaatctccctcccttacccctgcggagagattgtactgggaaaactacaacaccacaacctactttactacacaggctgggaataggtctgcccttcgctaccacattattacgcttctcttggttgcatttgtgctctaccctgtgtccttagcgttgagcgccgcccgttctaggtggtacttacccttactttttgttaatttatgcatttgtatttcttccgtaatggcattgtccgtgttcaaaaatactttcccggaagaagactggtatgcgcataatatctatggcaccacttctgtgttgcttctcgtttttatgcttgttcacttcttcgctgcggtgctttctgtccccgtctctttagcatccaaaaaggagtaccgtccggttgacaccatccctttaaatgatcttgaatctacgcccgtcatggtgaatagtgcacgtggctctccaagtccttcttccaacagagacacgttgttctctctctcttctgacaccacgaccgccacggccaccaataataataaaagaagacgcgctgaaggcgaagacgagggtgataacacctccaaccacgacactttgcgcgacgaagactacgataatgatgacgacgaaattgcttccattgaagcgccacctttacttcctcaagacatacccgttttcagaatcttgtttaccaacacgaagtaccagatgcttgccgcgcacctctcttgcgtcgccaacgtggtctttcacatgcttacctacccgcttttcatgtacatctttgtagacttgatcatcggcttcgctgtaggtaacttgctcggcaagggcatccgcatctttaatctcttggcccactggattaagggcggcgtattttttactttgggcgttgtctctttagcaagatactgcggtttcgcagctaagtacggctgggcatggaacaacatcagcttcacctctcaactcacacaaacgcgttcctccaatcttcttttcagatttgctcctgcggggactttcaccatggaattcgttgaatccttcctcattttcttttacgggtccaccaacatcttcttggagcacttggcaggaaacggcggcgcatggactgccaaggatttacagcatgtgtccatcgcgtttatgttcataggaaccggattgtgtgggttactcacggagtacaagctcaaccattggagattcgagcatgcccgcaaaaggccacagaccgatgtagttgctgccacaccggggtactctccaaacccgttccccgctttcaccatattttggactgggattttgatgtcccagcacgcacagtcctctcaattttctactaccattcacacgcaatggggatacttgttgtcctatgggtccttcttccgtttgttgacatttttgattttatttttggtgcccaacaccaacagtgccgcatccaagcctttcacggagttgatcaccagtttctgtctcctctgtggtggtttagtatttatggagtccacggatcagtccattgaagccatggaatatagggggtttacccccatgttcactttcaacctcagtgttggattcgtttctttgttgatggcttgggaaatgattttatttatttggaaagactggctcatcaaaaccaggaaaaccagtctttga

SEQ ID NO: 1251 - DNA, 474 bp, Saccharomyces cerevisiae
atgccgcgcataaagaccagaagatccaagcctgcacctgacgggttcgaaaaaatcaagccaaccctcacagatttcgaaatccaactcagagatgcccaaaaggacaagtcgtctaagctcgcagcaaagtccaatgagcagctctgggagataatgcaactccaccaccagcgctctagatacatatatactctgtactacaagagaaaggccatctccaaagacctttacgattggttgataaaggaaaagtatgctgataaattgctaattgccaaatggcgcaaaaccgggtatgaaaaactgtgctgtctgcgctgcattcaaaagaacgaaactaacaacggtagcacttgcatctgcagggtgcctcgtgcacagttagaggaagaagcacgcaaaaagggcacacaggtgtccttccatcagtgcgtccactgcggctgccgtggatgtgcaagcacagactaa

SEQ ID NO: 1252 - DNA, 474 bp, Artificial Sequence
  Description of Artificial Sequence: Synthetic polynucleotide
atgccgcgcataaagaccagaagatccaagcctgcacctgacgggttcgaaaaaatcaagccaaccctcacagatttcgaaatccaactcagagatgcccaaaaggacaagtcttctaagctcgcagcaaagtccaatgagcagctctgggagataatgcaactccaccaccagcgctctagatacatatatactttgtactacaagagaaaggccatctccaaagacctttacgattggttgataaaggaaaagtatgctgataaattgttaattgccaaatggcgcaaaaccgggtatgaaaaattatgctgtttacgctgcattcaaaagaacgaaactaacaacggtagcacttgcatctgcagggtgcctcgtgcacagttagaggaagaagcacgcaaaaagggcacacaggtgtccttccatcagtgcgtccactgcggctgccgtggatgtgcaagcacagactga

SEQ ID NO: 1253 - DNA, 1695 bp, Saccharomyces cerevisiae
atgatgaatgaagacatatccatcattgatggccataatagttttttaacggaaaaaagcaccgtgctattaacccaagccaagagaacactagaagacgaaaaggaaatgattactcccccgagctcaactgtgagaaaaacaatgaaggaagtaaataagaggccgtcgcatcccctctcaccggatcactcgtccccaattgctccatctaaggccaagcgccaaagatcggacacatgcgctcggtccaatggtaacctaaccttggaagaaattcttcaatctttggaaagaagaagaataaatggtgaactcgccaagaaacctccatattcgtatgcaactttgatttgcttggccattttgcaatctcaggagggaaagctaacgctatcccagatatatcattggatccacgttcacttcccttattacaagcagaaagatgctagttggcaaaattcaataagacataacttgtctttaaatgatgcgttcatcaagactgaaaagtcctgcgatggtaagggtcatttctgggaggtcagaccgggtgccgaaacaaaatttttcaaaggtgaaaatcgtggttatgaatttgtaaaggactccttacaagacattgggaagtattttgaaatagattctacacttgatgaattagaacaagttgagagtggagaaggcaatgatgatcttcctgacgaggaagaaagagaggaagcagggaaattcccttccattgaaattcaattgaactcctcccctatactgagagtttcccagttacatcacataccgcaattgaaaacagacaacagtgtactgaaccctcacgaaaacctagaatcgatgcggaacatgatagaaaacgatgtcaacaatatagattccttggaacctccttatgtcatgaagaaatatcatacttctttaggcttaccgtcgctggtgaatgccaaagatcatttccaggcgggtgtgaaaaacaataatatcacccaggcaaatagatttaatacactccctataactagcgcaaagtctcctcagaatttcagaaaatatttcacctcattcaattcaaattttgaagatttatctccacttcgaagtaatgtaggggctggttctctactcgacccacttccgtattccccattgaagctgtacgatcagaaaaatcttgcgctcatgtcgaaaccacaatctcagcaatcatattccaattctcaacttccacctccaccttcctctcatggttcggacttacttaaaacacccaagatgaggcattccgatggcttagagaaaaccccatcgcggttgataagcacacctaaggacggtaactcgattttgaggaaatggcagactccttcacacctttttgaagatttgtactgttctccgctatttagagctatagagactccaatcaggtatatcacgacgccggggggcactttggaaacccaaatttcaccaagaaagtcctctgcacccgatgtcctcacaagcgcaacgaattccaaatttgcttcaagcgggctgtttggcgtggatgtttattctgtttggaagcgcgcaactgaaaagatttctgatggtaacaatactacggatagcaatcaaaaacatcatccttatcataatcacccttccaacgatagcggtaatgaaaagaattga

SEQ ID NO: 1254 - DNA, 1695 bp, Artificial Sequence
  Description of Artificial Sequence: Synthetic polynucleotide
atgatgaatgaagacatatccatcattgatggccataatagttttttaacggaaaaaagcaccgtgttattaacccaagccaagagaacattagaagacgaaaaggaaatgattactcccccgagctctactgtgagaaaaacaatgaaggaagtaaataagaggccgtctcatcccctctctccggatcactcttccccaattgctccatctaaggccaagcgccaaagaagtgacacatgcgctagatccaatggtaacttgaccttggaagaaattcttcaatctttggaaagaagaagaataaatggtgaactcgccaagaaacctccatattcttatgcaactttgatttgcttggccattttgcaatctcaggagggaaagttgacgttatcccagatatatcattggatccacgttcacttcccttattacaagcagaaagatgctagttggcaaaattctataagacataacttgtctttaaatgatgcgttcatcaagactgaaaagtcctgcgatggtaagggtcatttctgggaggtcagaccgggtgccgaaacaaaatttttcaaaggtgaaaatcgtggttatgaatttgtaaaggactccttacaagacattgggaagtattttgaaatagattctacacttgatgaattagaacaagttgagagtggagaaggcaatgatgatcttcctgacgaggaagaaagagaggaagcagggaaattcccttccattgaaattcaattgaactcctcccctatattaagagtttcccagttacatcacataccgcaattgaaaacagacaacagtgtattgaaccctcacgaaaacttggaaagtatgagaaacatgatagaaaacgatgtcaacaatatagattccttggaacctccttatgtcatgaagaaatatcatacttctttaggcttaccgtccttagtgaatgccaaagatcatttccaggcgggtgtgaaaaacaataatatcacccaggcaaatagatttaatacactccctataactagcgcaaagtctcctcagaatttcagaaaatatttcaccagtttcaatagtaattttgaagatttatctccacttaggagtaatgtaggggctggttctttactcgacccacttccgtattccccattgaagttgtacgatcagaaaaatcttgcgctcatgtccaaaccacaatctcagcaaagttattccaattctcaacttccacctccaccttcctctcatggttctgacttacttaaaacacccaagatgaggcattccgatggcttagagaaaaccccaagcagattgataagcacacctaaggacggtaactctattttgaggaaatggcagactccttctcacctttttgaagatttgtactgttctccgttgtttagagctatagagactccaatcaggtatatcacgacgccggggggcactttggaaacccaaatttctccaagaaagtcctctgcacccgatgtcctcacaagcgcaacgaattccaaatttgcttctagcgggttgtttggcgtggatgtttattctgtttggaagcgcgcaactgaaaagatttctgatggtaacaatactacggatagcaatcaaaaacatcatccttatcataatcacccttccaacgatagcggtaatgaaaagaattga

SEQ ID NO: 1255 - DNA, 1464 bp, Saccharomyces cerevisiae
atggaccaccaaataaccactgcaagcgacttcacgactacttcaataccgagcctgtaccaattggatacacttttgagatgtcacatttgtaaagattttctaaaagtccccgtcttaacaccttgtggccatacattttgttccctttgtattagaacacatttgaataaccaaccaaattgtcctctctgccttttcgagttcagagagtccttgctgagaagtgagttcctggtcagtgaaataattcaaagttatacatccctacgatcttccttactagatgcactaaggataccgaagcctacccctgtccctgagaatgaggaagtaccaggtcctgaaaattcttcatggatagaactcatatcagagtctgaaagtgacagtgtaaatgccgctgatgatgacttgcaaattgttgcaacaagtgaaagaaaacttgccaaaagatccatgactgatatattaccactgagttccaaaccatccaaaaggaattttgcaatgttcagaagtgaacgtatcaagaaaaaatcaaagccaaatgaacaaatggcccagtgccccatatgtcaacaattttatcctcttaaagcccttgaaaaaacacatttggatgaatgcctaactttacaatcactaggcaaaaaaccaaaaatttctaccactttccctacagagtcaaatccacataacaaaagttcatccagattcaaggtacgaactccagaagtcgacaaaagctcatgtggtgagacctcacatgtggataagtatttaaactcaatgatgagtgcagaacaccaaagattgccgaagatcaattttacgtctatgactcaatcccaaataaaacaaaaactgtcatcgttgggactgtcaactaatggtactaggcaaaacatgattaaaagatacaatcactacgaaatgctttggaattctaatttttgtgattctctagaacctgttgatgaagctgaactaaaaagacagttgttaagctgggatgtttcacacaataaaaccccccaaaatagtagcaacaagggtggaatttctaaattaatgataatgaagagtaatgggaaatcttcttcatataggaaattacttgaaaatttcaaaaacgataaatttaataggaaaggatggatggttatgtttcggaaggattttgctaggcttatcagggaagcaaaaatgaaaataaaaacaggttcatcggacagttcaggttcagtgggacattctaatgatggagatggtgttgaaaaagttcaaagtgaccagggaaccgaggatcagcaaatggagaaggatcaggacactgttatcaacgaagatagagttgctggtgaaagaaatttgcctaacgaagattcaactgatgctgacttatcaagagaattaatggacttgaatgaatatagtaaagacccacccggtaacaattaa

SEQ ID NO: 1256 - DNA, 1464 bp, Artificial Sequence
  Description of Artificial Sequence: Synthetic polynucleotide
atggaccaccaaataaccactgcaagcgacttcacgactacttccataccgagcttgtaccaattggatacacttttgagatgtcacatttgtaaagattttttgaaagtccccgtcttaacaccttgtggccatacattttgttccctttgtattagaacacatttgaataaccaaccaaattgtcctctctgccttttcgagttcagagagtccttgttaagaagtgagttcttggtcagtgaaataattcaaagttatacatccttgagatcttccttattagatgcattaaggataccgaagcctacccctgtccctgagaatgaggaagtaccaggtcctgaaaattcttcttggatagaactcatatctgagtctgaaagtgacagtgtaaatgccgctgatgatgacttgcaaattgttgcaacaagtgaaagaaaacttgccaaaagatccatgactgatatattaccattaagttccaaaccatccaaaaggaattttgcaatgttcagaagtgaacgtatcaagaaaaaatccaagccaaatgaacaaatggcccagtgccccatatgtcaacaattttatcctcttaaagcccttgaaaaaacacatttggatgaatgcttgactttacaatctttaggcaaaaaaccaaaaatttctaccactttccctacagagagcaatccacataacaaaagttcttccagattcaaggtaagaactccagaagtcgacaaaagcagttgtggtgagaccagtcatgtggataagtatttaaactccatgatgagtgcagaacaccaaagattgccgaagatcaattttacgtctatgactcaatcccaaataaaacaaaaattatcttctttgggattatctactaatggtactaggcaaaacatgattaaaagatacaatcactacgaaatgctttggaattctaatttttgtgattctttggaacctgttgatgaagctgaattgaaaagacagttgttaagctgggatgtttctcacaataaaaccccccaaaatagtagcaacaagggtggaatttctaaattaatgataatgaagagtaatgggaaatcttcttcttataggaaattacttgaaaatttcaaaaacgataaatttaataggaaaggatggatggttatgtttagaaaggattttgctaggcttatcagggaagcaaaaatgaaaataaaaacaggttcttctgacagttctggttctgtgggacattctaatgatggagatggtgttgaaaaagttcaaagtgaccagggaaccgaggatcagcaaatggagaaggatcaggacactgttatcaacgaagatagagttgctggtgaaagaaatttgcctaacgaagattctactgatgctgacttatctagagaattaatggacttgaatgaatatagtaaagacccacccggtaacaattga

SEQ ID NO: 1257 - DNA, 3198 bp, Saccharomyces cerevisiae
atgagtggcaactctgcaaactatgacgtcggatatccgatatatggtgctaaatttataaatgaaggcactctactggtggctggtggtggaggccagttcaattcctcgtttccaaacaaaattacagctttaaaggtgaacttccagaaaaagaaacacattagaaggtttcgtgagatcacattagattcgattgacgatgcgcccacttcattggattgtaataataacctgattctagttggttgcaatgaactgtttaatgattcctccatggagaacgttaaccaccacttgaggaagtttgtgtttgaacaagaacatctaaaattcgtggccagtattgatttcaacagaactacagacccatccgttttcactaagtttgtttacattaatcaaagggccacagtagctgcaattgcgtcctctgaagtgcccactgtgataagaatcattgacccgcgtaatttgacggaaaattacgaaattgaaacgggtagggaagttaatgatttgcacttcgcccctaacggtattcttttgtcatatatcacttctaattctttggaagtagcgtctgttagggacggaaattttgtagcaaggaaaacggattttgataaaaatcttgttctttctaatatcaggtttctcaatgacaatacgctattagtggcagcatcattatcgaactctgatggagtttccttgttaaaactaggtgtgagttccaaaggtgttaaaattttaaaaacagcatccttcatgttcgatttgaatggaataacatcgatggatgtctccccaaataagaagttcgttgcattatcatctaacgataacttggttgccatcgtcagcgttgaaaagctaaagcttgttcagttggttccaagagtacatgaatctactataacaaaagttactttttctccagattctagatatttggcaagcacttctatggggaacacgatcaacgttctgaagctttccggtacatcgtcatcaattttacgaaatatttggaaatttttcttgaattttgttttgttagtggttttggctggcgctattcaactaggctacaaacataatgtgcacggctttatttacaaacatgctcatgatatatataagtcgaaattcaaggaaaacactaccatagaccaaggatcttcttcttatttcactattaatgacgattacagaggcattactgaaagtgcagatatcatcagcgctacagatgttgctagcgatatagagactgaattttcctcatttgacactagcactatgagaaccaccacagaagatgagcaaaaatttgtttggatatcgtcatcagctgattcacaattcacttctgcagatatcccaacatcagcttcttcttcttcttcttcttcttcttcttctttctatgaagagagtgtcactaatgaaccaattgtgtcttcacctacctctgaaattacgaagccgctagcctctcctacagaaccgaatattgtcgaaaaaccatcgcttccactgaattcagagtcgatagatttgttatcctcatcttcaaattctatcacagaatatcctgagccgactcctgacttggaggagaaattgtcctcgttaatagtagaacaatcagaaagcgaaataacaacagatagagaaagcgtttcaaaactcttaagtactgaatcaccttcgctatcacacatgccgtcttcatcttcatcttcattatctctttcctcatcgttaacaactagccctactacagcattatccacaagtaccgcgactgcggttaccaccacacaaacaaaccccaccaatgatgcagccaacacatcttttctagacaactcaaaaccggcatccacgagagagatttataagacaaaaataatcactgaagtcattacaaaaattgagtataggaatatacctgcatcagattccaatgcagaagccgagcagtatgttacaacatcttcttcaatgttgttgacgcccacagacactatggtttcttcgcccgtctccgaaattgatcccatagcatcagaattagagcgtatggttgaaacacctacgcattctatttctatagcatccgaatttgactcagttgcgtctaatttgatcccaaatgaagaaattttgtcaacatcagcatcccaggactctatttcctcgcatccgagtacattttctgattcatctataacctctggcttccagtcaatagaagtatcgactgtaacttcttctgttcttgcttctgaatcaatcccttcaatctcagattccactttttctaaatttcattccatctctgaacctgtttcatcagctattgtggagacggcaactagctcattctcaaaaacagaaacgaagacttcgagagtaattgctttctctaccgaggattcagaacgctccagtgccttgattgataattcggaatacaccagtgtgttggctgacaatttggaacccactagtgttttggctgacaattcggaacccactagtgttttggctgacagttcggaacccactagtgttttcactgatgctgtacaatcacctaagacgagtgttggtcaatcttccctatcagaatccacaaatattgaagggacttctatggcatctatgatctttagtagtagtggtgcttcaattggcgctctgtctgatataggcaagggaactttatccgtggagagcgcgtcaagcacagtagctcagccgatgccaggtgtaaccacaacagcaccatcttttgtaagtagccctcacaaaatatctgctagttcaattgatgcatcaggatttgtacagaaagaaataatgatagaagtacagtcatcaaaagattcatctgaagcgtttggggtacgccacaaaatcagcgaaaatgtaaatactcctgtttcccgaatgcttacgacggaaatgcaggcatctggtacggtagatgttaccgaagacgtctctctatctagtgaagttatttcagcacttaacgtggagatcacttctttgcctaatccagtggcccctccgcaaacaattgcagcacctttgaataataattcgaatacaaacattgtcaacgatgataatgcagtagcaggaaccgtaaactacgctggccttcatgacgaattgtga

SEQ ID NO: 1258 - DNA, 3198 bp, Artificial Sequence
  Description of Artificial Sequence: Synthetic polynucleotide
atgagtggcaactctgcaaactatgacgtcggatatccgatatatggtgctaaatttataaatgaaggcactttattggtggctggtggtggaggccagttcaattcctcttttccaaacaaaattacagctttaaaggtgaacttccagaaaaagaaacacattagaaggtttcgtgagatcacattagattctattgacgatgcgcccacttctttggattgtaataataacttgattttggttggttgcaatgaattatttaatgattcctccatggagaacgttaaccaccacttgaggaagtttgtgtttgaacaagaacatttgaaattcgtggccagtattgatttcaacagaactacagacccatccgttttcactaagtttgtttacattaatcaaagggccacagtagctgcaattgcgtcctctgaagtgcccactgtgataagaatcattgacccgcgtaatttgacggaaaattacgaaattgaaacgggtagggaagttaatgatttgcacttcgcccctaacggtattcttttgagttatatcacttctaattctttggaagtagcgtctgttagggacggaaattttgtagcaaggaaaacggattttgataaaaatcttgttctttctaatatcaggtttctcaatgacaatacgttattagtggcagcatctttatctaactctgatggagtttccttgttaaaattgggtgtgagttccaaaggtgttaaaattttaaaaacagcatccttcatgttcgatttgaatggaataacatctatggatgtctccccaaataagaagttcgttgcattatcttctaacgataacttggttgccatcgtcagcgttgaaaagttgaagcttgttcagttggttccaagagtacatgaatctactataacaaaagttactttttctccagattctagatatttggcaagcacttctatggggaacacgatcaacgttttgaagctttccggtacatcttcttccattttaagaaatatttggaaatttttcttgaattttgttttgttagtggttttggctggcgctattcaattaggctacaaacataatgtgcacggctttatttacaaacatgctcatgatatatataagagtaaattcaaggaaaacactaccatagaccaaggatcttcttcttatttcactattaatgacgattacagaggcattactgaaagtgcagatatcatcagcgctacagatgttgctagcgatatagagactgaattttcctcttttgacactagcactatgagaaccaccacagaagatgagcaaaaatttgtttggatatcttcttctgctgattctcaattcacttctgcagatatcccaacatctgcttcttcttcttcttcttcttcttcttcttctttctatgaagagagtgtcactaatgaaccaattgtgtcttctcctacctctgaaattacgaagccgttagcctctcctacagaaccgaatattgtcgaaaaaccaagtcttccattgaattctgagagtatagatttgttatcctcttcttccaattctatcacagaatatcctgagccgactcctgacttggaggagaaattgtcctctttaatagtagaacaaagtgaaagcgaaataacaacagatagagaaagcgtttccaaactcttaagtactgaatctccttctttatcccacatgccgtcttcttcttcttcttctttatctctttcctcttctttaacaactagccctactacagcattatccacaagtaccgcgactgcggttaccaccacacaaacaaaccccaccaatgatgcagccaacacatcttttttggacaactccaaaccggcatccacgagagagatttataagacaaaaataatcactgaagtcattacaaaaattgagtataggaatatacctgcatctgattccaatgcagaagccgagcagtatgttacaacatcttcttctatgttgttgacgcccacagacactatggtttcttctcccgtctccgaaattgatcccatagcatctgaattagagcgtatggttgaaacacctacgcattctatttctatagcatccgaatttgactctgttgcgtctaatttgatcccaaatgaagaaattttgagtacaagtgcatcccaggactctatttcctctcatccgagtacattttctgattcttctataacctctggcttccagagtatagaagtatccactgtaacttcttctgttcttgcttctgaaagtatcccttccatcagtgattccactttttctaaatttcattccatctctgaacctgtttcttctgctattgtggagacggcaactagctctttctccaaaacagaaacgaagacttccagagtaattgctttctctaccgaggattctgaacgctccagtgccttgattgataattctgaatacaccagtgtgttggctgacaatttggaacccactagtgttttggctgacaattctgaacccactagtgttttggctgacagttctgaacccactagtgttttcactgatgctgtacaaagtcctaagacgagtgttggtcaatcttccttatctgaatccacaaatattgaagggacttctatggcatctatgatctttagtagtagtggtgcttccattggcgctttatctgatataggcaagggaactttatccgtggagagcgcgtccagcacagtagctcagccgatgccaggtgtaaccacaacagcaccatcttttgtaagtagccctcacaaaatatctgctagttctattgatgcatctggatttgtacagaaagaaataatgatagaagtacagtcttctaaagattcttctgaagcgtttggggtacgccacaaaatcagcgaaaatgtaaatactcctgtttccagaatgcttacgacggaaatgcaggcatctggtacggtagatgttaccgaagacgtctctttatctagtgaagttatttctgcacttaacgtggagatcacttctttgcctaatccagtggcccctccgcaaacaattgcagcacctttgaataataatagtaatacaaacattgtcaacgatgataatgcagtagcaggaaccgtaaactacgctggccttcatgacgaattgtga

SEQ ID NO: 1259 - DNA, 1563 bp, Saccharomyces cerevisiae
atgttgcataaaagcccttcaagaaagagatttgcttctcctttgcatctaggatgcattctaacgcttacagtgctctgccttattgcttactactttgctttaccggattatttatcggtagggaagagctcatccaggggtgccatggatcaaaaatctgatggaacctttagacttaagtctatctacaggcatggcgtcggagcaaaccatcggctacaccagaggctggaggtcactccagaagttatttctgccgctggaatgctgtatcaagaaaccacaactcaaggacaggatttcgaagaccaagaacccctatggactactaatgccgaatatgccaccactaacccattcgattttgagtttgagctacgaaggatgccgctattgatgaagcggatgaaggaaagagatcctgaattcatagagtcgtacatttacggagaaacatacatgacggaggaggaagaacacgccatgtggatagatgatgacattgtggcacccaatatcacagatagaggtacagtagtgtcgttagcattaatgtcgtctaatgcttacgtgagaataccgcaaacgggagactggcgtaacgtcacggagccgtggaatgaaacagagccggaagattttggttgggatggtgatggtatacgtggtcacgtcttttacaatgaagtggagaatatcgtggtactctcgataaagggaaccagcgctcagggtttgccagggtctggcgaagatgagacaactggaaacgacaagatcaacgataatttgttattttcgtgttgttgtgcaagagtgagctacctgtggactaccgtgtgcgattgctatgtgaagtcgtatatatgcgatgagtcttgcctggaaaaggaactgagacgtaaggatagattttactctgcagtcgttgacatatacaaaggcgtcctcaaagaataccccgatgcggccatatgggtcacaggccactcactgggaggcgcattggccagtttactgggccgcacttttggattgcctgcggtcgcattcgagtcccctggagagctactaccttcaaaaagacttcacttaccattcccaccgggacttccctcatacatggagggtatctggcacttcggtcacaacgcagacccaatcttcatgggtacatgcaacggagctagttcaagttgctcactggtgggctacgctatggaaaccgcgtgccacactggtagagtctgtgtctacgatgtggtcaacgacaagggctggagtgtaaacatgttcaaccacagaatccacaaagtcattgacgaagttctccttggatacgagcaggctgccaagtgcgttgaaccagagccctgcgtagattgctacaactggaagtttattccaagcagagactgggaatcctcatcgaggctcattaccaagactaaaagccacgctgcaccaaccacgacgactcgcaccactgctactactacctcttcatctacctgtgtaggccgcaattggcttggcttctgcaccaaatacgagttgtaa

SEQ ID NO: 1260 - DNA, 1563 bp, Artificial Sequence
  Description of Artificial Sequence: Synthetic polynucleotide
atgttgcataaaagcccttccagaaagagatttgcttctcctttgcatttaggatgcattttaacgcttacagtgctctgccttattgcttactactttgctttaccggattatttaagtgtagggaagagctcttccaggggtgccatggatcaaaaatctgatggaacctttagacttaagtctatctacaggcatggcgtcggagcaaaccatagattgcaccagaggttagaggtcactccagaagttatttctgccgctggaatgctttatcaagaaaccacaactcaaggacaggatttcgaagaccaagaacccctttggactactaatgccgaatatgccaccactaacccattcgattttgagtttgagttaagaaggatgccgttattgatgaagagaatgaaggaaagagatcctgaattcatagagagttacatttacggagaaacatacatgacggaggaggaagaacacgccatgtggatagatgatgacattgtggcacccaatatcacagatagaggtacagtagtgtctttagcattaatgtcttctaatgcttacgtgagaataccgcaaacgggagactggcgtaacgtcacggagccgtggaatgaaacagagccggaagattttggttgggatggtgatggtatacgtggtcacgtcttttacaatgaagtggagaatatcgtggtactctccataaagggaaccagcgctcagggtttgccagggtctggcgaagatgagacaactggaaacgacaagatcaacgataatttgttattttcttgttgttgtgcaagagtgagctacttatggactaccgtgtgcgattgctatgtgaagagttatatatgcgatgagtcttgcttagaaaaggaattgagacgtaaggatagattttactctgcagtcgttgacatatacaaaggcgtcctcaaagaataccccgatgcggccatatgggtcacaggccactctttgggaggcgcattggccagtttattaggccgcacttttggattgcctgcggtcgcattcgagtcccctggagagttattgccttccaaaagacttcacttaccattcccaccgggacttccctcttacatggagggtatctggcacttcggtcacaacgcagacccaatcttcatgggtacatgcaacggagctagtagtagttgctctttggtgggctacgctatggaaaccgcgtgccacactggtagagtctgtgtctacgatgtggtcaacgacaagggctggagtgtaaacatgttcaaccacagaatccacaaagtcattgacgaagttctccttggatacgagcaggctgccaagtgcgttgaaccagagccctgcgtagattgctacaactggaagtttattccaagcagagactgggaatcctcttccaggctcattaccaagactaaaagccacgctgcaccaaccacgacgactcgcaccactgctactactacctcttcttctacctgtgtaggccgcaattggcttggcttctgcaccaaatacgagttgtga

SEQ ID NO: 1261 - DNA, 957 bp, Saccharomyces cerevisiae
atgtggttgaaatccttgctgctctgcctgtactccttagtactctgccaagtccacgctgcaccttcatcagggaagcagattacctccaaggatgttgatcttcagaaaaaatatgagcccagtccccccgccacacatcgtggaataatcactatcgaatactttgatcccgtttcgaagtcgatgaaagaggcggatctgacttttgagttgtacggtactgtcgtgcccaaaactgtgaacaactttgctatgctggcccatggtgttaaggcagttatcgaagggaaagatcccaatgatatacatacttactcgtaccgtaagaccaaaatcaacaaggtttaccctaacaagtatatccagggtggtgtggttgccccagatgtgggtcctttcaccgtctatgggcccaaatttgatgacgaaaacttttacttaaaacatgacaggcctgaaagactcgcaatggcctattttggacctgattctaacacctcggaattcatcatcaccactaaagccgatggaaatgaggaattggatggcaaaagtgtcgtgtttggtcaaataacttctggtctagatcaactaatggatgctattcaatacacagaaacagacgaatatggaaagcctcagcatgaattacggttcctgtatttcgttctagaaatcttaaaaattagtaacatcttagatttgcacgctgcgtacacagaaaaagtcgagaagtttagaaatggcgatgtgtctgttggctccactttggaaaacatcttccgtaacgataaagcctacacacctttaaccacctccactggaaccaccgcctatgatttaaaccacccaatttccagagccttgatgtgtttaactgttcttggcctttgtttcattgcctacaagggcatgcacgaaaagcctcatacggtttcattaagacacaagtaa

SEQ ID NO: 1262 - DNA, 957 bp, Artificial Sequence
  Description of Artificial Sequence: Synthetic polynucleotide
atgtggttgaaatccttgttgctctgcttatactccttagtactctgccaagtccacgctgcaccttcttctgggaagcagattacctccaaggatgttgatcttcagaaaaaatatgagcccagtccccccgccacacatcgtggaataatcactatcgaatactttgatcccgtttccaagtctatgaaagaggcggatttgacttttgagttgtacggtactgtcgtgcccaaaactgtgaacaactttgctatgttggcccatggtgttaaggcagttatcgaagggaaagatcccaatgatatacatacttactcctaccgtaagaccaaaatcaacaaggtttaccctaacaagtatatccagggtggtgtggttgccccagatgtgggtcctttcaccgtctatgggcccaaatttgatgacgaaaacttttacttaaaacatgacaggcctgaaagactcgcaatggcctattttggacctgattctaacaccagtgaattcatcatcaccactaaagccgatggaaatgaggaattggatggcaaaagtgtcgtgtttggtcaaataacttctggtttggatcaattgatggatgctattcaatacacagaaacagacgaatatggaaagcctcagcatgaattaagattcctctatttcgttttggaaatcttaaaaattagtaacatcttagatttgcacgctgcgtacacagaaaaagtcgagaagtttagaaatggcgatgtgtctgttggctccactttggaaaacatcttccgtaacgataaagcctacacacctttaaccacctccactggaaccaccgcctatgatttaaaccacccaatttccagagccttgatgtgtttaactgttcttggcctttgtttcattgcctacaagggcatgcacgaaaagcctcatacggtttctttaagacacaagtga

SEQ ID NO: 1263 - DNA, 441 bp, Saccharomyces cerevisiae
atgatcagttcgtgtgttactagatgttttggtaggggtaaatgccttccagggcctgccactgcctcgatataccaaacgataagatgtatatccactaattcaaataaagctgctgaggcgccaatatttccaaagctggaagacgtgaagatgcatgagctcataggaaacaacaattttggtaaaaagacctactacgtggagagaagcaggaccggaaatctaccggtgtattccgcttataaaaatggaggtaacaagattatcacggagatcagaaagattgaaggagatgtaattcaactaagaaatgacttgcaggagcaactgcctttcatacccaaaaaatcatggtctgtggtgatgcaatcgaaaaaaattattatcaagggcaatgcagtagaggctgtcaaaagggtattaaccaagaaattttag

SEQ ID NO: 1264 - DNA, 441 bp, Artificial Sequence
  Description of Artificial Sequence: Synthetic polynucleotide
atgatcagtagttgtgttactagatgttttggtaggggtaaatgccttccagggcctgccactgcctctatataccaaacgataagatgtatatccactaatagtaataaagctgctgaggcgccaatatttccaaagttggaagacgtgaagatgcatgagctcataggaaacaacaattttggtaaaaagacctactacgtggagagaagcaggaccggaaatttaccggtgtattccgcttataaaaatggaggtaacaagattatcacggagatcagaaagattgaaggagatgtaattcaattgagaaatgacttgcaggagcaattacctttcatacccaaaaaaagttggtctgtggtgatgcaaagtaaaaaaattattatcaagggcaatgcagtagaggctgtcaaaagggtattaaccaagaaattttga

SEQ ID NO: 1265 - DNA, 1548 bp, Saccharomyces cerevisiae
atgtccaccctgattcctccaccttctaagaaacaaaagaaagaggctcaacttcccagagaagtagctattattccgaaagatttacccaatgtttcaatcaagttccaagctttagatactggtgacaatgtaggtggcgccctgagagttcccggtgctatctccgagaaacagttagaagaacttttaaatcaattgaacggtacttcagacgatccagtgccatataccttcagctgtacaattcaaggtaagaaggccagtgaccctgtgaagacgattgatataacagataacctatattcttcattaataaaaccaggctataacagtacagaagatcagatcacgctactgtatacgccaagagcagttttcaaagtcaagccggtaactagaagttcatcagccattgcaggtcacggttccacaattttgtgttctgccttcgcaccacatacgagttctaggatggtaaccggtgcaggtgataatactgcaaggatttgggactgtgacacccaaacgccaatgcatactctaaagggtcactacaattgggttctctgcgtttcctggtcccccgatggagaagtaattgctacgggatccatggacaataccataagattatgggacccaaaaagcggtcagtgtctaggtgatgctctcagaggtcattccaagtggatcacttctttaagttgggaacctatacatcttgtgaagccgggctccaaaccaagattagcttcatcttctaaggatggtactattaagatttgggacactgtgagcagagtttgccagtatacgatgagtggtcacacaaattcagtgtcttgtgtcaaatggggcggccaaggtctattgtatagtggctctcacgatagaaccgtacgtgtatgggacatcaattcgcagggcagatgtatcaacattttgaagtcgcatgcgcactgggttaatcacttatctttatctacagattacgcattgcgcattggtgcattcgatcatacaggtaagaagccttctacaccagaagaagcccagaaaaaggcattggaaaattatgaaaaaatctgtaaaaagaatggaaattcagaagaaatgatggttactgcaagcgatgattataccatgtttttatggaacccactaaaatctaccaagcctatagcaagaatgaccggtcaccaaaaattagtcaatcatgtggcgttcagccctgatggtaggtatattgtctcagcgtcttttgataactctatcaaactttgggacggtagagatggtaagtttatctccacatttagagggcatgtagccagcgtataccaggttgcgtggtcatcggactgccgactactggtgtcatgttccaaagataccacgttgaaagtgtgggatgtaagaactagaaaactttctgttgacctccctggtcataaagacgaagtttataccgtcgactggagtgtcgacggtaaaagagtgtgtagtggtgggaaagacaagatggtaagattgtggacgcattga

SEQ ID NO: 1266 - DNA, 1548 bp, Artificial Sequence
  Description of Artificial Sequence: Synthetic polynucleotide
atgtccaccttgattcctccaccttctaagaaacaaaagaaagaggctcaacttcccagagaagtagctattattccgaaagatttacccaatgtttccatcaagttccaagctttagatactggtgacaatgtaggtggcgccttgagagttcccggtgctatctccgagaaacagttagaagaacttttaaatcaattgaacggtacttctgacgatccagtgccatataccttcagctgtacaattcaaggtaagaaggccagtgaccctgtgaagacgattgatataacagataacttatattcttctttaataaaaccaggctataacagtacagaagatcagatcacgttattatatacgccaagagcagttttcaaagtcaagccggtaactagaagttcttctgccattgcaggtcacggttccacaattttgtgttctgccttcgcaccacatacgagttctaggatggtaaccggtgcaggtgataatactgcaaggatttgggactgtgacacccaaacgccaatgcatactttgaagggtcactacaattgggttctctgcgtttcctggtcccccgatggagaagtaattgctacgggatccatggacaataccataagattatgggacccaaaaagcggtcagtgtttaggtgatgctctcagaggtcattccaagtggatcacttctttaagttgggaacctatacatcttgtgaagccgggctccaaaccaagattagcttcttcttctaaggatggtactattaagatttgggacactgtgagcagagtttgccagtatacgatgagtggtcacacaaattctgtgtcttgtgtcaaatggggcggccaaggtttattgtatagtggctctcacgatagaaccgtacgtgtatgggacatcaattctcagggcagatgtatcaacattttgaagagtcatgcgcactgggttaatcacttatctttatctacagattacgcattgcgcattggtgcattcgatcatacaggtaagaagccttctacaccagaagaagcccagaaaaaggcattggaaaattatgaaaaaatctgtaaaaagaatggaaattctgaagaaatgatggttactgcaagcgatgattataccatgtttttatggaacccattgaaatctaccaagcctatagcaagaatgaccggtcaccaaaaattagtcaatcatgtggcgttcagccctgatggtaggtatattgtctctgcgtcttttgataactctatcaaactttgggacggtagagatggtaagtttatctccacatttagagggcatgtagccagcgtataccaggttgcgtggtccagtgactgcagattattggtgagctgttccaaagataccacgttgaaagtgtgggatgtaagaactagaaaactttctgttgacctccctggtcataaagacgaagtttataccgtcgactggagtgtcgacggtaaaagagtgtgtagtggtgggaaagacaagatggtaagattgtggacgcattga

SEQ ID NO: 1267 - DNA, 3996 bp, Saccharomyces cerevisiae
atgatgatggatatactgaatacacagcaacaaaaagcggctgaaggcgggagagttctggctcctcataccatctcaagtaagctcgtgaagagattatcaagtcattccagccataaactatcaagatctgatttgaaagcattgggtggctcggaaacaataagcgacggccccagtcagctgacttttaaggaccgatacgttttcaatgaatcgctatacttgaaaaagctaaaaaagaccgctttagatgactactacacgaggggcataaaactcactaaccgctacgaggaagacgacggtgatgacgaaattattcggttgtctaatggcgacagaattgatgaagacctgcactcaggtgtcaagtttttctccactacaccttattgcaggaaaatgaggtcagacagtgatgaactagcttggaatgaaattgcgaccgaacggttcaaatggcagtcaatgctggccagagtgctgaagggagatattgttaaaggtgaaaagacgaggattgctaaccaagtcaagaaaccagggttaaataaggagctctcagatgagatatggctcgaattgaaggcatggctgaatgggaggaccatgcaagagatggaacagtcgcttacatatttaagagatagttcagattccgtttttgaagagataatgaagtttcaaattccacagggcaagatattgagcctggatgcactggaggccatcttacaagacctcatgaacagatatcacagcgttgtctcttattggcctaacttgaaaaaaatgtataaggataaaccaatcaccaatactgcagaatttaccgctagaatagacgtaatgaattcttggctgaactttaaaacgaacttaacgttgaggaggcaagagttggacgactggataaaccgtttctcaccgataagtagttcggataattgccaagaggattttgatggtgtgccccaatggaactgcaaaatgaagattcttgcagaacaattgatgaaggaaaagaacatcgagtctatattccaaaaaaaaattttctatccgctatcaccttggatgttcaaactgaaactacattttatagtctacagagaaactttgacaaagatgaacataaaatatccttatgaaaggttaagatcactactggcgttccccgtctatttaatcaaagaagttattttgactagattgtcatatgcacgaaagcttaaaaatccaacaatgatgatgatcgatcaaatgatcgatgattttaacgcttttattcgactttctgtgcaattgaagtacacactgacaaaatattgctccaatttgccgttcgatgtggattttgacccgacgttcgaaaatactgtaatagaagccattcgttatttattttttctgttgaatttaaagttgattgattccagtaaacaaaatttcaaagcacccgatctactcttgaaatactgggatcacctaaaaaacaccggtcactatattaacggtgcagaaaccgtgattccaaatgaatttctcaagttaactttgagactcgtacataaattgcaattctatcttttgaaacaacaaaacttcccaccaacatttgctaacgcttcagaagcagaaaaatggctaagttccattttcgaaaatttgggtgccatgaaaagaaagctgaacaggttcagcaatattctagtcaaggcgttccaaaattctgctgtttatcagattaatcataatgcacaacttgttaaaaagttaaaagatgctcactattttttggtatactccggtaacacttttgagtctagtggtgtatatatgtttgctgctcctgaattattaggttgtgacaatgataccatcttaagaattttgcgaaataaatccattggctgtgatttggtcccaaagcttgacattggaaataatttgaatgtgtatgatataacaacaaaagaaacagatttgaacattctagtatcgaaaggggaggattccaaaggaattccttactaccgagtagtagcaaattcgtcaagtgatttggacaggcatgctcatcagtccaaaaagaagaatttttcaacagacccttttgatcagcaccttgatgaaaagaacaatgaagtttttgaattggaagttgctttgagctcattgggtgcactagttgtactatatcctggagagccagtagtttgggatggaccagtatataagcttccaggtaacaacctttttgcatccaacgaaatggatttagggaaaattggtaacccaaatacgttgattttactcaatcaaggttctaattatgcactgacttatcaaatcgacaagtttaatcaaacggtaggtgattctgtttcattcatagagaaacgttgttcactcaattcaattgaatcctccctacaaaaaatcaataaggcatattacaaacttacttatacagtattgaacaactacaaaggaattctaggtagctttatgaagcaatgtccgggaaatgagttgttaaattcgatattcatgtttggaagggattttggaagaagtttccttaaatataacgcctttagctcaaagaggaagtacgttatcatctttctgatggttaaattaggaatgaactggttgaaattccttgttgaagagtgtgatcctaccgatcagcgaactttccgatggtgcgttcttgcaatggattttgcgatgcagatgactagtggttataatatcctggcgctgaatgtaaagcaatttcaagaactgaaggagagggtatcagtatgtatgtcattattaatttcacatttcgacgttatgggtgcacgagccactgaagctgaaaatggcatgcaacaggcaagattgaatattgatactgaagagaatattgatgaagaggccaccctagaaataaacagcaggttgagactggaagctataaagacgttggaaaagactatgaagaggaatcccaggcaaatgggtaaggtattggatgctacagatcagggaaacaaatacctactatcgctagcatcctcattatcgaatgtatcaatgaggtggcaaaaaagaagcttcattggcggtggaacatttggacaggtatactctgcaattaatctggaaaacggtgaaatcttagctgttaaggaaataaagatacacgataccacaacaatgaagaagatttttcccctgattaaagaagagatgaccgtattggaaatgttaaaccatcctaatattgtccagtactatggtgtcgaagtacatcgcgataaagttaacatcttcatggaatactgtgagggtggttctttagcctcgttattggatcatggaagaattgaagatgaaatggtaacacaagtgtacacattcgaactattagaaggtttggcatatttgcaccaatctggcgtggtgcatcgcgacattaaaccggagaatatcttgctggatttcaatggaatcataaaatatgtggattttggtacggcacgtaccgttgtaggatctaggactagaactgtgcggaacgcagccgttcaagattttggagtagaaacaaagtccctcaatgaaatgatggggacaccgatgtatatggctccagagactatttcaggctcggcagttaagggaaaacttggagcggacgatgtatgggcattaggatgtgttgtgctagaaatggccacaggtagacgaccttggtctaacttggataatgaatgggccatcatgtaccacgttgctgcaggtcgaataccgcaactacccaatagagacgaaatgactgcagcgggaagagccttcttggaaaggtgtttggttcaagaccccactatgagggctactgctgtggaactactgatagacccttggatgatacaaatccgtgaaatagcatttggcaactcagagaaagatcaagtacctatcctaagctcatag

SEQ ID NO: 1268 - DNA, 3996 bp, Artificial Sequence
  Description of Artificial Sequence: Synthetic polynucleotide
atgatgatggatatattgaatacacagcaacaaaaagcggctgaaggcgggagagttttggctcctcataccatctccagtaagctcgtgaagagattatccagtcattccagccataaattatctagatctgatttgaaagcattgggtggctctgaaacaataagcgacggccccagtcagttgacttttaaggacagatacgttttcaatgaatctttgtacttgaaaaagttgaaaaagaccgctttagatgactactacacgaggggcataaaactcactaaccgctacgaggaagacgacggtgatgacgaaattattagattgtctaatggcgacagaattgatgaagacttgcactctggtgtcaagtttttctccactacaccttattgcaggaaaatgaggagtgacagtgatgaattggcttggaatgaaattgcgaccgaaagattcaaatggcagtccatgttggccagagtgttgaagggagatattgttaaaggtgaaaagacgaggattgctaaccaagtcaagaaaccagggttaaataaggagctctctgatgagatatggctcgaattgaaggcatggttaaatgggaggaccatgcaagagatggaacagtctcttacatatttaagagatagttctgattccgtttttgaagagataatgaagtttcaaattccacagggcaagatattgagcttagatgcattagaggccatcttacaagacctcatgaacagatatcacagcgttgtctcttattggcctaacttgaaaaaaatgtataaggataaaccaatcaccaatactgcagaatttaccgctagaatagacgtaatgaattcttggttgaactttaaaacgaacttaacgttgaggaggcaagagttggacgactggataaaccgtttcagtccgataagtagttctgataattgccaagaggattttgatggtgtgccccaatggaactgcaaaatgaagattcttgcagaacaattgatgaaggaaaagaacatcgagtctatattccaaaaaaaaattttctatccgttatctccttggatgttcaaattgaaattgcattttatagtctacagagaaactttgacaaagatgaacataaaatatccttatgaaaggttaagatccttattggcgttccccgtctatttaatcaaagaagttattttgactagattgagttatgcaagaaagcttaaaaatccaacaatgatgatgatcgatcaaatgatcgatgattttaacgcttttattagactttctgtgcaattgaagtacacattaacaaaatattgctccaatttgccgttcgatgtggattttgacccgacgttcgaaaatactgtaatagaagccattcgttatttattttttttattgaatttaaagttgattgattccagtaaacaaaatttcaaagcacccgatttactcttgaaatactgggatcacttgaaaaacaccggtcactatattaacggtgcagaaaccgtgattccaaatgaatttctcaagttaactttgagactcgtacataaattgcaattctatcttttgaaacaacaaaacttcccaccaacatttgctaacgcttctgaagcagaaaaatggttgagttccattttcgaaaatttgggtgccatgaaaagaaagttgaacaggttcagcaatattttagtcaaggcgttccaaaattctgctgtttatcagattaatcataatgcacaacttgttaaaaagttaaaagatgctcactattttttggtatactccggtaacacttttgagtctagtggtgtatatatgtttgctgctcctgaattattaggttgtgacaatgataccatcttaagaattttgagaaataaatccattggctgtgatttggtcccaaagcttgacattggaaataatttgaatgtgtatgatataacaacaaaagaaacagatttgaacattttagtatccaaaggggaggattccaaaggaattccttactacagagtagtagcaaattcttccagtgatttggacaggcatgctcatcagtccaaaaagaagaatttttctacagacccttttgatcagcaccttgatgaaaagaacaatgaagtttttgaattggaagttgctttgagctctttgggtgcattggttgtattatatcctggagagccagtagtttgggatggaccagtatataagcttccaggtaacaacctttttgcatccaacgaaatggatttagggaaaattggtaacccaaatacgttgattttactcaatcaaggttctaattatgcattgacttatcaaatcgacaagtttaatcaaacggtaggtgattctgtttctttcatagagaaacgttgttctctcaattctattgaatcctccttacaaaaaatcaataaggcatattacaaacttacttatacagtattgaacaactacaaaggaattttgggtagctttatgaagcaatgtccgggaaatgagttgttaaattctatattcatgtttggaagggattttggaagaagtttccttaaatataacgcctttagctctaagaggaagtacgttatcatctttttgatggttaaattaggaatgaactggttgaaattccttgttgaagagtgtgatcctaccgatcagagaactttccgttggtgcgttcttgcaatggattttgcgatgcagatgactagtggttataatatcttagcgttgaatgtaaagcaatttcaagaattgaaggagagggtatctgtatgtatgtctttattaatttctcatttcgacgttatgggtgcaagagccactgaagctgaaaatggcatgcaacaggcaagattgaatattgatactgaagagaatattgatgaagaggccaccttagaaataaacagcaggttgagattagaagctataaagacgttggaaaagactatgaagaggaatcccaggcaaatgggtaaggtattggatgctacagatcagggaaacaaatacttgctttctttggcatcctctttatccaatgtatctatgaggtggcaaaaaagaagcttcattggcggtggaacatttggacaggtatactctgcaattaatttggaaaacggtgaaatcttagctgttaaggaaataaagatacacgataccacaacaatgaagaagatttttcccttaattaaagaagagatgaccgtattggaaatgttaaaccatcctaatattgtccagtactatggtgtcgaagtacatcgcgataaagttaacatcttcatggaatactgtgagggtggttctttagcctctttattggatcatggaagaattgaagatgaaatggtaacacaagtgtacacattcgaattattagaaggtttggcatatttgcaccaatctggcgtggtgcatcgcgacattaaaccggagaatatcttgttggatttcaatggaatcataaaatatgtggattttggtacggcacgtaccgttgtaggatctaggactagaactgtgagaaacgcagccgttcaagattttggagtagaaacaaagtccctcaatgaaatgatggggacaccgatgtatatggctccagagactatttctggcagtgcagttaagggaaaacttggagcggacgatgtatgggcattaggatgtgttgtgttggaaatggccacaggtagaagaccttggtctaacttggataatgaatgggccatcatgtaccacgttgctgcaggtagaataccgcaattgcccaatagagacgaaatgactgcagcgggaagagccttcttggaaaggtgtttggttcaagaccccactatgagggctactgctgtggaattattgatagacccttggatgatacaaatccgtgaaatagcatttggcaacagtgagaaagatcaagtacctatcttaagcagttga

SEQ ID NO: 1269 - DNA, 948 bp, Saccharomyces cerevisiae
atgactacgacggtacccaagatattcgcgtttcacgagttttcagacgtggcagaggccgtagctgaccatgtagtccacgcgcaagacggtgcattggctccaaagaacgagaggaaacactctgttcccaacatcagcatgaatgcactggatatgacgagagaggcctcttgcaaaagcacagcatctgccgcggaagggaaaagtggtagcagtggtagtggcagtggtagcagtaagcccaaaaaggagaaacggttcaagattgctctctccggtgggtcattgatcgaagtgctacacgaaggtctgctaaaacgagacgatgtacggtggggagactgggacatttactttgcagacgagagacttgtacccttcagctcgaatgaaagcaattatggatgcgccaaaaggaagattttggacctgatagacacggcgaagtatggaactccgaaggtgtaccacattgacgagtcattgattgacgacccgcaagaatgcgctgataactatgaaaaggtgctaatccgcgggtttgccggtagagattccgtcaaacttccgatgttcgacttgttcctgcttggttgtgcccccgatggtcatatcgcatcactcttccctaacttccaggacaatctacgtgagaaacttgcatgggtggtgcccgtggagaacgctcctagtgggccctcgaccagaatttcgctgactatacctgtaatctgccattctcacagggttactttcgttgtcgaaggtgcaaccaaggcgcccatcatcaagaccattatggaaaggcctgaaaagggcctacctagcagtattgtcaacgaaggtgctgctggtcgtgtatcatggtttgttgacgacgatgctcttacggacgtcctcgtcaccaaaaaaaagtataaattccaccaaggtttgtctatttaa

SEQ ID NO: 1270 - DNA, 948 bp, Artificial Sequence
  Description of Artificial Sequence: Synthetic polynucleotide
atgactacgacggtacccaagatattcgcgtttcacgagttttctgacgtggcagaggccgtagctgaccatgtagtccacgcgcaagacggtgcattggctccaaagaacgagaggaaacactctgttcccaacatcagcatgaatgcattggatatgacgagagaggcctcttgcaaaagcacagcatctgccgcggaagggaaaagtggtagcagtggtagtggcagtggtagcagtaagcccaaaaaggagaaaagattcaagattgctctctccggtgggtctttgatcgaagtgttacacgaaggtttattgaaaagagacgatgtaagatggggagactgggacatttactttgcagacgagagacttgtacccttcagcagtaatgaaagcaattatggatgcgccaaaaggaagattttggacttgatagacacggcgaagtatggaactccgaaggtgtaccacattgacgagtctttgattgacgacccgcaagaatgcgctgataactatgaaaaggtgttaatccgcgggtttgccggtagagattccgtcaaacttccgatgttcgacttgttcttgcttggttgtgcccccgatggtcatatcgcaagtctcttccctaacttccaggacaatttacgtgagaaacttgcatgggtggtgcccgtggagaacgctcctagtgggccctctaccagaatttctttgactatacctgtaatctgccattctcacagggttactttcgttgtcgaaggtgcaaccaaggcgcccatcatcaagaccattatggaaaggcctgaaaagggcttacctagcagtattgtcaacgaaggtgctgctggtcgtgtaagctggtttgttgacgacgatgctcttacggacgtcctcgtcaccaaaaaaaagtataaattccaccaaggtttgtctatttga

SEQ ID NO: 1271 - DNA, 783 bp, Saccharomyces cerevisiae
atggtgtcgttagacgatatactaggtatcgtgtatgttacgtcatggtcgatatcgatgtatccaccgataatcaccaattggcgccataagtcagcgagcgcgatatcgatggattttgtcatgttaaatacggcaggttactcttacctggtcatatccatatttttgcaattgtactgctggaaaatgacgggtgatgagtctgacttgggcaggcccaagttgacgcaatttgatttctggtattgcctgcatgggtgcttgatgaatgttgtcttattgacccaggtggtagctggagcgagaatctggcgatttccaggtaaaggtcaccgcaagatgaatccatggtacctaaggattttactcgcatcactggccattttttcactgctaaccgtacaatttatgtactccaactactggtacgattggcataactcaagaactctggcgtattgcaacaatttgtttttactcaaaatatcgatgtcactaatcaagtacatcccacaagtgacgcataactcgacaagaaaatctatggattgtttccccattcagggtgtgtttctagatgtcactggcggtatcgcctcgctgctccaattgatttggcagttgtctaacgatcaaggtttcagtctggatacgttcgtgacaaattttggaaaagtgggactgtcaatggtaactttaatattcaacttcatctttatcatgcagtggtttgtatatcgatctcgaggccatgatctggcgtcagagtacccgctgtag

SEQ ID NO: 1272 - DNA, 783 bp, Artificial Sequence
  Description of Artificial Sequence: Synthetic polynucleotide
atggtgtctttagacgatatattaggtatcgtgtatgttacgagctggtccatatccatgtatccaccgataatcaccaattggcgccataagtctgcgagcgcgatatccatggattttgtcatgttaaatacggcaggttactcttacttagtcatatccatatttttgcaattgtactgctggaaaatgacgggtgatgagtctgacttgggcaggcccaagttgacgcaatttgatttctggtattgcttgcatgggtgcttgatgaatgttgtcttattgacccaggtggtagctggagcgagaatctggagatttccaggtaaaggtcaccgcaagatgaatccatggtacttgaggattttactcgcatctttggccattttttctttattaaccgtacaatttatgtactccaactactggtacgattggcataactctagaactttggcgtattgcaacaatttgtttttactcaaaatatccatgtctttgatcaagtacatcccacaagtgacgcataactccacaagaaaatctatggattgtttccccattcagggtgtgtttttggatgtcactggcggtatcgccagtttactccaattgatttggcagttgtctaacgatcaaggtttcagtttggatacgttcgtgacaaattttggaaaagtgggattatctatggtaactttaatattcaacttcatctttatcatgcagtggtttgtatatagatctcgtggccatgatttggcgtctgagtacccgttgtga

SEQ ID NO: 1273 - DNA, 228 bp, Saccharomyces cerevisiae
atggaagcggaaaaacaatctgatattaagggaaccattgctttcgatactcacggtaacgttatagagtctaccggcgtgggcagtcaaaggatcgaagatatcggtgatttatcgaaagttacgctggatgcagaaggttttgctcaagttcaaggagattcgctactcgtacacctgtacaaacgcaatgatatcactttagctgtatataccagcgctcaataa

SEQ ID NO: 1274 - DNA, 228 bp, Artificial Sequence
  Description of Artificial Sequence: Synthetic polynucleotide
atggaagcggaaaaacaatctgatattaagggaaccattgctttcgatactcacggtaacgttatagagtctaccggcgtgggcagtcaaaggatcgaagatatcggtgatttatccaaagttacgttagatgcagaaggttttgctcaagttcaaggagattctttactcgtacacttgtacaaacgcaatgatatcactttagctgtatataccagcgctcaatga

SEQ ID NO: 1275 - DNA, 753 bp, Saccharomyces cerevisiae
atgattgagaataaggttgaactggtagcagaactagtgttggagtccatcggtaaaactgaggtggtgtcacgccatacagagggaaccaaatcatgccaagtgagttttcgcattaaagattctcccagtgagaagggttcaacatcgtttctctctgagctagtggtgattcagactctggatgacaatgacaagtatactgttgttattcgtcatggtacgtcgatcaccatggcatgtgtggtgggttacagcgattttaaattgcccacagaattgaaatggccactagaaagagaaagcttacctgtggagccagacctgaaacctataatgacacaacttaaaagacaaactgcaggtagtgcggacatgccaaaatttgacgatgagtaccaggcacaagcaagacaaaaccagggaacagcaccgttgaacccatatcccggacttacggtaactgaaccgagcttcgctaacccagcaggagggtatgcggatggtgatctgtatcctgttggcacaagccatccggattggtctggagggcttcccaatcctctggggaatccaagtagccaaggcggtatgattttcgatccaaatagaagacctgccccaagacgggaagatatgccgccaggatggatgcctggatccaagtacgacgaaccatttggtcctggatctggcggatttggaggttcaggatccggcggatttggagggtcaggatctggctttatttaa

SEQ ID NO: 1276 - DNA, 753 bp, Artificial Sequence
  Description of Artificial Sequence: Synthetic polynucleotide
atgattgagaataaggttgaattggtagcagaattagtgttggagtccatcggtaaaactgaggtggtgtctcgccatacagagggaaccaaaagttgccaagtgagttttcgcattaaagattctcccagtgagaagggttctacatcttttctctctgagttggtggtgattcagactttagatgacaatgacaagtatactgttgttattcgtcatggtacgtccatcaccatggcatgtgtggtgggttacagcgattttaaattgcccacagaattgaaatggccattggaaagagaaagcttacctgtggagccagacttgaaacctataatgacacaacttaaaagacaaactgcaggtagtgcggacatgccaaaatttgacgatgagtaccaggcacaagcaagacaaaaccagggaacagcaccgttgaacccatatcccggacttacggtaactgaaccgagcttcgctaacccagcaggagggtatgcggatggtgatttatatcctgttggcacaagccatccggattggtctggagggcttcccaatcctttagggaatccaagtagccaaggcggtatgattttcgatccaaatagaagacctgccccaagaagagaagatatgccgccaggatggatgcctggatccaagtacgacgaaccatttggtcctggatctggcggatttggaggttctggatccggcggatttggagggtctggatctggctttatttga

SEQ ID NO: 1277 - DNA, 2391 bp, Saccharomyces cerevisiae
atgtccttctttgggttagaaaatagcggtaatgcgcgggatggtcctctggactttgaagagagttacaagggctatggcgagcacgaacttgaggagaacgactatttgaacgacgaaacatttggtgataatgttcaggttggtaccgactttgattttggaaatcctcacagcagcggcagcagcggcaacgcaattggtggtaatggcgtcggtgccacggctagatcatatgttgcagctactgcagaaggaattagcggccctaggaccgatggaacggcagcagcaggacctctagacctgaagccaatggaatctttgtggtctactgcaccacctccagcaatggcgccttcaccccaaagtacaatggctccggctcctgctccgcagcaaatggcccccctacagccaatcttgtcgatgcaagacttggaaagacaacaacgtcaaatgcagcaacagtttatgaatttccacgccatgggtcatccacagggtctcccacagggtccgcctcagcagcaatttccaatgcagcctgcgtcgggtcaaccaggtccctcacaatttgcgcctccacctccacctcctggcgttaatgtgaatatgaatcaaatgccaatgggtcctgtacaagttccagttcaagcttcgccttcacccatcggtatgtccaacactccttctccaggccctgtggttggcgcaactaaaatgcctctgcaaagtggacgcagatcgaagagagatttgtcgcctgaagagcaaagacgtttgcagattcgtcatgccaaagtggagaaaatcttgaaatactcaggtttaatgactcctcgtgataaggacttcatcaccagatatcagttgtctcaaattgtcactgaggacccttacaatgaggatttctacttccaggtctacaagattatccaaagaggcggtatcacgtccgaatccaacaaaggtttgattgctagggcgtatttggaacattctggacacagactcggtggtcgctataagagaaccgatattgccctacagagaatgcaaagtcaagtagaaaaggctgtcactgtggctaaggaaagaccttctaagttgaaggatcaacaagcggctgctggtaactctagccaggataataagcaagcaaacacggttctgggcaaaatctcttccactttgaacagcaagaatccaagaagacaactgcagatccccagacaacagccttctgaccccgatgcgctaaaagacgtcactgactctctgaccaacgtggacttggcctcttcagggtcctcctctacgggctcttctgccgctgctgttgcttctaagcaaagaagaagatcttcatacgcgttcaacaacggtaatggtgccacaaatttgaacaaatctgggggcaaaaaattcattcttgagttaattgaaacagtttatgaagagattttagacttggaagctaacttgaggaatggccagcaaactgacagcactgcaatgtgggaggcccttcacatcgacgacagttcatatgacgtaaaccctttcatttcgatgctatcatttgataaaggtatcaagattatgcctagaatttttaatttcttggataagcagcaaaaattgaaaatcctgcaaaaaatcttcaatgaattatcacacttgcaaatcatcatattgagttcctacaagactacaccaaaaccaactttgacacaattgaagaaagtcgatctgttccaaatgatcatattaaagatcattgtctcgtttttgtctaataactccaattttatcgaaattatgggtctgttgctacagttaatcagaaacaacaacgtttcgttcttgaccacctccaaaattggtctaaatttgatcaccattttgatttctcgtgccgcattaatcaagcaagattcatcaagatctaatattctttcctctcctgaaatctccacatggaatgagatttatgataaattattcacttcattggaaagtaagattcagctgattttccctccaagggaatataacgaccacatcatgcgtttacaaaatgacaagtttatggatgaagcatacatttggcagttcctagctagtttagcactaagtggaaagctaaaccaccagagaatcattattgatgaagtacgtgatgaaatctttgccactattaacgaggcggagaccttacaaaagaaagagaaagaattgagtgtattacctcagaggtctcaagaattagacacagagttaaaatctattatttataataaagagaaactataccaagatttgaatttgttcctaaacgttatggggttggtgtatcgcgatggtgaaatatcagaactaaagtaa

SEQ ID NO: 1278 - DNA, 2391 bp, Artificial Sequence
  Description of Artificial Sequence: Synthetic polynucleotide
atgtccttctttgggttagaaaatagcggtaatgcgagggatggtcctttggactttgaagagagttacaagggctatggcgagcacgaacttgaggagaacgactatttgaacgacgaaacatttggtgataatgttcaggttggtaccgactttgattttggaaatcctcacagcagcggcagcagcggcaacgcaattggtggtaatggcgtcggtgccacggctagatcttatgttgcagctactgcagaaggaattagcggccctaggaccgatggaacggcagcagcaggacctttggacttgaagccaatggaatctttgtggtctactgcaccacctccagcaatggcgccttctccccaaagtacaatggctccggctcctgctccgcagcaaatggcccccttgcagccaatcttgtccatgcaagacttggaaagacaacaacgtcaaatgcagcaacagtttatgaatttccacgccatgggtcatccacagggtctcccacagggtccgcctcagcagcaatttccaatgcagcctgcgtctggtcaaccaggtccctctcaatttgcgcctccacctccacctcctggcgttaatgtgaatatgaatcaaatgccaatgggtcctgtacaagttccagttcaagcttccccttctcccatcggtatgtccaacactccttctccaggccctgtggttggcgcaactaaaatgcctttacaaagtggacgcagatccaagagagatttgtctcctgaagagcaaagacgtttgcagattcgtcatgccaaagtggagaaaatcttgaaatactctggtttaatgactcctcgtgataaggacttcatcaccagatatcagttgtctcaaattgtcactgaggacccttacaatgaggatttctacttccaggtctacaagattatccaaagaggcggtatcacgtccgaatccaacaaaggtttgattgctagggcgtatttggaacattctggacacagactcggtggtcgctataagagaaccgatattgccttgcagagaatgcaaagtcaagtagaaaaggctgtcactgtggctaaggaaagaccttctaagttgaaggatcaacaagcggctgctggtaactctagccaggataataagcaagcaaacacggttttaggcaaaatctcttccactttgaacagcaagaatccaagaagacaattgcagatccccagacaacagccttctgaccccgatgcgttgaaagacgtcactgactctttaaccaacgtggacttggcctcttctgggtcctcctctacgggctcttctgccgctgctgttgcttctaagcaaagaagaagatcttcctacgcgttcaacaacggtaatggtgccacaaatttgaacaaatctgggggcaaaaaattcattcttgagttaattgaaacagtttatgaagagattttagacttggaagctaacttgaggaatggccagcaaactgacagcactgcaatgtgggaggcccttcacatcgacgacagttcttatgacgtaaaccctttcatttccatgctttcttttgataaaggtatcaagattatgcctagaatttttaatttcttggataagcagcaaaaattgaaaatcttgcaaaaaatcttcaatgaattatcccacttgcaaatcatcatattgagttcctacaagactacaccaaaaccaactttgacacaattgaagaaagtcgatcttttccaaatgatcatattaaagatcattgtcagttttttgtctaataactccaattttatcgaaattatgggtttattgttacagttaatcagaaacaacaacgtttctttcttgaccacctccaaaattggtttgaatttgatcaccattttgatttctcgtgccgcattaatcaagcaagattcttctagatctaatattctttcctctcctgaaatctccacatggaatgagatttatgataaattattcacttctttggaaagtaagattcagttgattttccctccaagggaatataacgaccacatcatgcgtttacaaaatgacaagtttatggatgaagcatacatttggcagttcttggctagtttagcattaagtggaaagttgaaccaccagagaatcattattgatgaagtacgtgatgaaatctttgccactattaacgaggcggagaccttacaaaagaaagagaaagaattgagtgtattacctcagaggtctcaagaattagacacagagttaaaatctattatttataataaagagaaactttaccaagatttgaatttgttcttgaacgttatggggttggtgtatcgcgatggtgaaatatctgaattgaagtga

SEQ ID NO: 1279 - DNA, 1329 bp, Saccharomyces cerevisiae
atgcggctggggaatgcttatgcgtattgcaagccgtcgcaaaatgttgggctgaagctggacttgttacggggtcttccagggtacgtgggtcacgccacgagtaggatcaaccggttagagaaccaggacaattactccattaaaatgatgcggtcgtggcctaatgcgtatggaagtgccctgaactgctctgtattcgatggccatggggagaaaggtgcgcaactgtcacagttgttagccgataaattgtgcagtagcctggatttccctgaaccctcctgggacaagcaggacttgaagaagttggtacaggaatatgcaagaaggtttcccgagggaaattactggaaacataagctgtccacgtttgaaaaattctacaacaagtttataaagaactgcaactcgaaacaagaactgctgctgatgaaggagggcgatagtgcgatccttggacaaaatggtggcaggatgatttttgataaaatggggaatattattgacaaaattgcactgctcactgagctagaccgtctgcgattgttctacgggtttgccaggttcgatctcgaccaatgctgcggcctgggcaccgcagcggggtccacagcgtcgtccatatttctatatccgtatgatgatccgaatgcacccattgatgaggggaaagacgatgactcgtggatcatatcgcactctggattgctcaaactcattgtcacgcaggtgggcgactctaagatcatcctctgcgatcaagacgggattgcacacgcattaacaacaactcaccacatcaattccagtagggaacgacaccgtttgagcatagacccttctcgattggacccagacgcctttggagagacaaggtttttgaataatttcgccaacactagatcgtttggtgatgtcgctgggaaaccgtatggtatatctagtgagccggatattttctcgtttcttgtcggaaataccttgcatttgccgcgatctgaaaggtcgaagctgcccttcaatggtgatgaatgcttcctggcgcttgtcaccgacggcatcaccaataaacttgcagaccaagaggttgttgacctcatcacctctacggtgaactcctggggactgaaaaaggcgactcctcaatttgttgcagaggagacaatcaaatttattcaggcaatagccactaaacactcagacaacgccacttgcgtggtggttaggctttccaattggggcaactggcccaatgttgacagaactggcccccaaagagaaaccaaactaatgaatgcacaatctaacgaaacaaaattaaactaa

SEQ ID NO: 1280 - DNA, 1329 bp, Artificial Sequence
  Description of Artificial Sequence: Synthetic polynucleotide
atgagattagggaatgcttatgcgtattgcaagccgtctcaaaatgttgggttgaagttggacttgttaagaggtcttccagggtacgtgggtcacgccacgagtaggatcaacagattagagaaccaggacaattactccattaaaatgatgaggagttggcctaatgcgtatggaagtgccttgaactgctctgtattcgatggccatggggagaaaggtgcgcaattatctcagttgttagccgataaattgtgcagtagcttagatttccctgaaccctcctgggacaagcaggacttgaagaagttggtacaggaatatgcaagaaggtttcccgagggaaattactggaaacataagttatccacgtttgaaaaattctacaacaagtttataaagaactgcaactccaaacaagaattattattgatgaaggagggcgatagtgcgatccttggacaaaatggtggcaggatgatttttgataaaatggggaatattattgacaaaattgcattgctcactgagttggaccgtttaagattgttctacgggtttgccaggttcgatctcgaccaatgctgcggcttgggcaccgcagcggggtccacagcgtcttccatatttttatatccgtatgatgatccgaatgcacccattgatgaggggaaagacgatgactcttggatcatatctcactctggattgctcaaactcattgtcacgcaggtgggcgactctaagatcatcctctgcgatcaagacgggattgcacacgcattaacaacaactcaccacatcaattccagtagggaaagacaccgtttgagcatagacccttctagattggacccagacgcctttggagagacaaggtttttgaataatttcgccaacactagatcttttggtgatgtcgctgggaaaccgtatggtatatctagtgagccggatattttctcctttcttgtcggaaataccttgcatttgccgagatctgaaaggtctaagttgcccttcaatggtgatgaatgcttcttggcgcttgtcaccgacggcatcaccaataaacttgcagaccaagaggttgttgacctcatcacctctacggtgaactcctggggattgaaaaaggcgactcctcaatttgttgcagaggagacaatcaaatttattcaggcaatagccactaaacactctgacaacgccacttgcgtggtggttaggctttccaattggggcaactggcccaatgttgacagaactggcccccaaagagaaaccaaattaatgaatgcacaatctaacgaaacaaaattaaactga

SEQ ID NO: 1281 - DNA, 4284 bp, Saccharomyces cerevisiae
atgaataacggttctggtcgatacttgctgactcccccagatgatcttcacccctatgtgccaagctcgaaacctcaggaacaagtataccctgatttcaagccttgggagcacactgcagcagaagatcaaatcctagcaaactttgtggctaagggcttttaccatacaccaatggtaaatttcgagtccatatctgcgagatcatctgttcatgaatcattagtcactcaatccaacattctttcccagcaattcgacaaaattatcaagattagagaagaccacattaataagatcccctcaaattccacgacgacattacacgggcctggttttcagttgcctaatagaataacccttactgatcatagaaaggaaacgtggttgcatgaattgagttcgtctcacacttcgctggtcaaaattggcaagtttatacctcacggcttgaaaagaaggcaagtcatcgagcagtgctatttaaaatttataccattgaaaagggcgatttggttgataaagtgctgctattttatcgaatggaaatcgaaccacaaaaagaagaggtcaaatgctgctggggcagatgatgccatttccatgcacctgctaaaggactggacggatacctttgtatacatcctggaaaagctcatctttgatatgacaaatcactataacgattctcaacaactgcgtacgtggaagaggcagatttcttattttttaaaacttttggggaattgctactcactaagattgatcaataaggaaatctttcatcattggcttgtagagtttataaataagatggaaaacttcgaatttttgccattatctttacatattttgatgattttttggaacgacatctgccaaattgatacaaatgctcctgttgcggctacaataacatcaagtcaaaaagagcccttctttctggtaacaaaaatcactgatatgctattgcacaaatattatattgtttccagcagcaaatcaatgataaatgacgagaactacatcatcaatgatataaagaaaaacaacaagataaagttgaatattctcaaaatattatccagtttaattttgaaaatttttcaagaacaatctttagaggtgtttatatttcccacatctaactgggaaatttacaagcccttactttttgaaatagtctcaaacgccgacactaatcaaaattctgatatgaagaaaaaattagagttaattagttacagaaacgagtcattgaagaataattcttctatacgaaacgtaataatgtctgccagcaacgcaaatgactttcaattaactatcgtcacctgtaaacaatttccaaaactatcatgcattcaattaaattgtatagatactcagttcaccaagctactggacgataaccctacagaattcgattggcccacttacgttgaccaaaatccccttacaatgcataaaattattcaattaattctctggtccatacatccatcaaggcaatttgatcactatgaatctaatcaactggtagcgaaattattactattgcgaataaattcaacagatgaggatttgcacgaattccagatagaagatgccatttggtcattggttttccaattagccaaaaatttttcggcccaaaagagggtggtatcatatatgatgccttctttgtatcgcctgcttaatatactaattacttatggcatcattaaggtccctacgtatatcagaaagctaatcagttccggcctactttatctccaagattccaatgataagtttgtgcatgtccagctgttaattaacttgaaaatttcaccgttgatgaaaagtcaatacaatatggtattgaggaacgttatggaatatgacgttaaattttatgaaatttttaatttcgaccaactcgtggaaatcacagaacaaatcaaaatgcgaatactctccaatgatataactaatttgcaactgtcgaaaactcctctgagcattaaaatcatggttgcagaatggtacttatcacatttatgttccggtattttatctagtgttaaccgcacagtgttgctaaaaatattcaagattttttgtatcgatctggaggttttccaccacttttttaagtggatcgagtttattgtctaccatcaattgctaagtgatatagaatctctggaggcattgatggacatcttgctatgctaccaaaaattgttctcacaattcattaatgaccatattctttttacgaagacgttcatattcatttacaagaaagttttgaaagaaaaagacgtgcctgcttataatgtgacttcatttatgccattctggaaattttttatgaaaaacttcccttttgttttaaaggtggataacgatttaaggattgagttacaatctgtttacaatgatgagaaattgaaaactgagaagctgaagaatgataaatcagaagtcttgaaggtgtattccatgatcaataattcaaaccaagctgttggacagacttggaattttcccgaggtgtttcaagtaaacatcaggtttctactacacaactccgagatcattgatacaaatacaagcaaacagttccagaaagcacgaaacaatgtcatgcttttgattgccactaacttgaaggagtacaataaatttatgtccattttcttgaaaaggaaagactttactaacaaaaatttaattcaattgatctctctaaaacttctaacttttgaagtgacgcagaatgtgttggggctcgagtatattattcgattattaccaataaacttggaaaataatgacggctcatatggtctgtttttgaagtatcataaagaacaattcataaagtcaaattttgagaaaattttacttacatgttatgaattagaaaaaaaatatcatggcaacgaatgtgaaataaattattatgagatcctattgaaaattttaataacttatgggtcatctcccaaattacttgcaacatctacaaaaatcattatgttgttattgaatgatagcgtggaaaactcatctaatattttggaggatattttgtactactcaacttgtccgtcggaaaccgatcttaacgatattccattgggtagtggacaaccagacaatgacactgttgtaaccaacgatgataaaagtgacgatgatgatcacacagtcgacgaaattgatcatgtagaatattacgttatgatggactttgccaatctttgggttttccaagcgtttacctgtttctgcatcaaaaaaatcatggagaataatgagccagcaatggcaatggaagacttgaagaacttcatattccaaattatcgaaataactaattctaatgatttatgttcacaaatatttgaccaactgaaggatatgcagaccattgagatgataacccaaatagtggagaaagatttctgcacttcttgtttgcaaaacaacaaccaaaagatagatgataattacatcgttgtggtgatcgagattataacgtcattatcgatgaggtttcaaagagaaacttctggtatgatagttatttccatggagaactatcatttactaataaagatcataagacaattaagtgaactgaacgaaggaaatttatctaagagagaaatccaaatagatgccgtcttgaaaatttttagctttcatcaggattccattttccaacgcatcatcgctgatttatcagctgataaacccacaagtccattcattgatagcatatgcaagctgtttgataaaatatcatttaatttaagattgaagctgttcttgtacgaaattttgtcttcattgaaatcattcgccatctattcatccacaattgatgccccagcattccacacaagcggtaaggtcgaactaccgaagaaattgctgaacttaccaccattccaagtgtcctctttcgttaaggaaacaaaacttcatagtggcgactacggggaagaagaagatgcagaccaagaagaatcgtttagtttaaatttaggaatcggcatagttgaaatagcgcacgaaaacgaacagaaatggctcatttatgacaagaaagatcataaatatgtctgcacattttccatggagccgtaccacttcatctccaactataataccaagtacacagatgacatggctacaggcagtaatgatacgactgcgtttaacgattcctgtgtaaacctgagtctttttgatgctcggtttgagaggaaaaatccacattga

SEQ ID NO: 1282 - DNA, 4284 bp, Artificial Sequence
  Description of Artificial Sequence: Synthetic polynucleotide
atgaataacggttctggtagatacttgttgactcccccagatgatcttcacccctatgtgccaagcagtaaacctcaggaacaagtataccctgatttcaagccttgggagcacactgcagcagaagatcaaatcttggcaaactttgtggctaagggcttttaccatacaccaatggtaaatttcgagtccatatctgcgagatcttctgttcatgaatctttagtcactcaatccaacattctttcccagcaattcgacaaaattatcaagattagagaagaccacattaataagatcccctccaattccacgacgacattacacgggcctggttttcagttgcctaatagaataacccttactgatcatagaaaggaaacgtggttgcatgaattgagttcttctcacacttctttggtcaaaattggcaagtttatacctcacggcttgaaaagaaggcaagtcatcgagcagtgctatttaaaatttataccattgaaaagggcgatttggttgataaagtgctgctattttatcgaatggaaaagtaaccacaaaaagaagaggtctaatgctgctggggcagatgatgccatttccatgcacttattgaaggactggacggatacctttgtatacatcttggaaaagctcatctttgatatgacaaatcactataacgattctcaacaattgcgtacgtggaagaggcagatttcttattttttaaaacttttggggaattgctactctttgagattgatcaataaggaaatctttcatcattggcttgtagagtttataaataagatggaaaacttcgaatttttgccattatctttacatattttgatgattttttggaacgacatctgccaaattgatacaaatgctcctgttgcggctacaataacatctagtcaaaaagagcccttctttttggtaacaaaaatcactgatatgcttttgcacaaatattatattgtttccagcagcaaatctatgataaatgacgagaactacatcatcaatgatataaagaaaaacaacaagataaagttgaatattctcaaaatattatccagtttaattttgaaaatttttcaagaacaatctttagaggtgtttatatttcccacatctaactgggaaatttacaagcccttactttttgaaatagtctccaacgccgacactaatcaaaattctgatatgaagaaaaaattagagttaattagttacagaaacgagtctttgaagaataattcttctataagaaacgtaataatgtctgccagcaacgcaaatgactttcaattaactatcgtcacctgtaaacaatttccaaaattaagttgcattcaattaaattgtatagatactcagttcaccaagttattagacgataaccctacagaattcgattggcccacttacgttgaccaaaatccccttacaatgcataaaattattcaattaattctctggtccatacatccatctaggcaatttgatcactatgaatctaatcaattggtagcgaaattattattattgagaataaattctacagatgaggatttgcacgaattccagatagaagatgccatttggtctttggttttccaattagccaaaaatttttctgcccaaaagagggtggtatcttatatgatgccttctttgtatcgcttacttaatatattgattacttatggcatcattaaggtccctacgtatatcagaaagttaatcagttccggccttctttatctccaagattccaatgataagtttgtgcatgtccagcttttaattaacttgaaaatttctccgttgatgaaaagtcaatacaatatggtattgaggaacgttatggaatatgacgttaaattttatgaaatttttaatttcgaccaactcgtggaaatcacagaacaaatcaaaatgagaatactctccaatgatataactaatttgcaattatccaaaactcctttaagcattaaaatcatggttgcagaatggtacttatctcatttatgttccggtattttatctagtgttaaccgcacagtgttgttgaaaatattcaagattttttgtatcgatttagaggttttccaccacttttttaagtggatcgagtttattgtctaccatcaattgttaagtgatatagaatctttggaggcattgatggacatcttgctttgctaccaaaaattgttctctcaattcattaatgaccatattctttttacgaagacgttcatattcatttacaagaaagttttgaaagaaaaagacgtgcctgcttataatgtgacttcttttatgccattctggaaattttttatgaaaaacttcccttttgttttaaaggtggataacgatttaaggattgagttacaatctgtttacaatgatgagaaattgaaaactgagaagttgaagaatgataaaagtgaagtcttgaaggtgtattccatgatcaataatagcaaccaagctgttggacagacttggaattttcccgaggtgtttcaagtaaacatcaggtttttattacacaactccgagatcattgatacaaatacaagcaaacagttccagaaagcaagaaacaatgtcatgcttttgattgccactaacttgaaggagtacaataaatttatgtccattttcttgaaaaggaaagactttactaacaaaaatttaattcaattgatctctttgaaacttttgacttttgaagtgacgcagaatgtgttggggctcgagtatattattagattattaccaataaacttggaaaataatgacggctcctatggtttatttttgaagtatcataaagaacaattcataaagagcaattttgagaaaattttacttacatgttatgaattagaaaaaaaatatcatggcaacgaatgtgaaataaattattatgagatcttgttgaaaattttaataacttatgggagttctcccaaattacttgcaacatctacaaaaatcattatgttgttattgaatgatagcgtggaaaactcttctaatattttggaggatattttgtactactccacttgtccgagtgaaaccgatcttaacgatattccattgggtagtggacaaccagacaatgacactgttgtaaccaacgatgataaaagtgacgatgatgatcacacagtcgacgaaattgatcatgtagaatattacgttatgatggactttgccaatctttgggttttccaagcgtttacctgtttctgcatcaaaaaaatcatggagaataatgagccagcaatggcaatggaagacttgaagaacttcatattccaaattatcgaaataactaattctaatgatttatgttctcaaatatttgaccaattgaaggatatgcagaccattgagatgataacccaaatagtggagaaagatttctgcacttcttgtttgcaaaacaacaaccaaaagatagatgataattacatcgttgtggtgatcgagattataacgtctttatctatgaggtttcaaagagaaacttctggtatgatagttatttccatggagaactatcatttattgataaagatcataagacaattaagtgaattgaacgaaggaaatttatctaagagagaaatccaaatagatgccgtcttgaaaatttttagctttcatcaggattccattttccaacgcatcatcgctgatttatctgctgataaacccacaagtccattcattgatagcatatgcaagttatttgataaaatatcctttaatttaagattgaagcttttcttgtacgaaattttgtcttctttgaaatctttcgccatctattcttccacaattgatgccccagcattccacacaagcggtaaggtcgaattaccgaagaaattgttgaacttaccaccattccaagtgtcctctttcgttaaggaaacaaaacttcatagtggcgactacggggaagaagaagatgcagaccaagaagaaagttttagtttaaatttaggaatcggcatagttgaaatagcgcacgaaaacgaacagaaatggctcatttatgacaagaaagatcataaatatgtctgcacattttccatggagccgtaccacttcatctccaactataataccaagtacacagatgacatggctacaggcagtaatgatacgactgcgtttaacgattcctgtgtaaacttgagtctttttgatgctagatttgagaggaaaaatccacattga

SEQ ID NO: 1283 - DNA, 387 bp, Saccharomyces cerevisiae
atgatcaccccaaagggaacgcacgatgctgtggccaagtttcaaaaaactgacctgcatcaagatctcgattacatcgtactgcaacaacgaagaacacagctagagacgcttattaacgaaagagaatcttttgtcaagaatctgtgttctcttttccacaaaattcaaaataccaagaattaccaggaatttgttgatgtattggcggagaatagggatttactgcgagaaattttcactgtagagaacggatttcaaaagcaaaaatggattagcaacgacgacattccccagatagactgggacaagtttgccctagatatcaacgcttatatagcagagaacgatcaattgttggctttgtatgaagatggcttattatga

SEQ ID NO: 1284 - DNA, 387 bp, Artificial Sequence
  Description of Artificial Sequence: Synthetic polynucleotide
atgatcaccccaaagggaacgcacgatgctgtggccaagtttcaaaaaactgacttgcatcaagatctcgattacatcgtattacaacaaagaagaacacagttggagacgcttattaacgaaagagaatcttttgtcaagaatttatgttctcttttccacaaaattcaaaataccaagaattaccaggaatttgttgatgtattggcggagaatagggatttacttagagaaattttcactgtagagaacggatttcaaaagcaaaaatggattagcaacgacgacattccccagatagactgggacaagtttgccttggatatcaacgcttatatagcagagaacgatcaattgttggctttgtatgaagatggcttattatga

SEQ ID NO: 1285 - DNA, 384 bp, Saccharomyces cerevisiae
atgttgttctataagcctgtgatgaggatggcggtgagaccgctaaaaagcataagattccagtcctcatacaccagtattactaaattgacgaacctaacagaatttaggaatttgatcaagcaaaatgataaactagtcatcgatttttatgctacttggtgtggcccctgtaagatgatgcaaccacacttaacgaaattaattcaggcttatccagatgtaagatttgtcaagtgcgacgtggacgaatcaccagatattgccaaagagtgtgaagtgacggctatgcccacctttgttcttggcaaggatggccaactcatcggcaagatcattggagctaaccctactgctttagagaagggaatcaaagatctataa

SEQ ID NO: 1286 - DNA, 384 bp, Artificial Sequence
  Description of Artificial Sequence: Synthetic polynucleotide
atgttgttctataagcctgtgatgaggatggcggtgagaccgttaaaaagcataagattccagtcctcttacaccagtattactaaattgacgaacttaacagaatttaggaatttgatcaagcaaaatgataaattggtcatcgatttttatgctacttggtgtggcccctgtaagatgatgcaaccacacttaacgaaattaattcaggcttatccagatgtaagatttgtcaagtgcgacgtggacgaatctccagatattgccaaagagtgtgaagtgacggctatgcccacctttgttcttggcaaggatggccaactcatcggcaagatcattggagctaaccctactgctttagagaagggaatcaaagatttatga

SEQ ID NO: 1287 - DNA, 2142 bp, Saccharomyces cerevisiae
atgactgccagcgtttcgaatacgcagaataagctgaatgagcttctcgatgccatcagacaggagtttctccaagtctcacaagaggcaaatacctaccgtcttcaaaaccaaaaggattacgatttcaaaatgaaccagcagctggctgagatgcagcagataagaaacaccgtctacgaactggaactaactcacaggaaaatgaaggacgcgtacgaagaagagatcaagcacttgaaactagggctggagcaaagagaccatcaaattgcatctttgaccgtccagcaacagcggcaacagcaacagcagcaacaggtccagcagcatttacaacagcaacagcagcagctagccgctgcatctgcatctgttccagttgcgcaacaaccaccggctactacttcggccaccgccactccagcagcaaacacaactactggttcgccatcggccttcccagtacaagctagccgtcctaatctggttggctcacagttgcctaccaccactttgcctgtggtgtcctcaaacgcccaacaacaactaccacaacagcaactgcaacagcagcaacttcaacaacagcaaccacctccccaggtttccgtggcaccattgagtaacacagccatcaacggatctcctacttctaaagagaccactactttaccctctgtcaaggcacctgaatctacgttgaaagaaactgaaccggaaaataataatacctcgaagataaatgacaccggatccgccaccacggccaccactaccaccgcaactgaaactgaaatcaaacctaaggaggaagacgccaccccggctagtttgcaccaggatcactacttagtcccttataatcaaagagcaaaccactctaaacctatcccacctttccttttggatctagattcccagtctgttcccgatgctctgaagaagcaaacaaatgattattatattttatacaacccggcactaccaagagaaattgacgttgagttacacaaatctttggatcatacttcagttgtttgttgcgtgaagttcagtaacgatggtgaatacttagccacaggctgcaacaaaactactcaagtgtatcgcgtttcagatggttctctggtggcccgtctatctgacgattctgctgccaataaccatcgaaattcgatcactgaaaataacaccaccacgtccacggataacaatacaatgacaaccactactaccaccacaattactaccacagcgatgacttcggcagcagaattggcaaaagatgtggaaaacctgaacacttcgtcttccccatcatccgacttgtatatccgttcagtgtgtttttctccagatgggaaatttttggcaacaggtgctgaagacagactgattagaatttgggatattgaaaatagaaagattgttatgattcttcaaggccacgaacaagatatttattcattggactactttccctcaggtgacaaattagtctccggttctggtgaccgtaccgttcgtatttgggacttacgtacaggccagtgttcattgactttatccattgaagatggtgttaccaccgtcgctgtatcaccaggtgatggtaaatacatcgctgctggttctctagatcgtgctgtgagagtttgggattccgagaccggattcttggtggaaagactagattcggaaaacgaatccggtacaggccacaaggactctgtttatagcgttgtcttcactagagatggacaaagcgttgtatccggctcattagatagatctgttaagctctggaatttgcagaatgcaaacaacaagagcgattcgaaaactccaaattccggcacttgtgaagttacgtatatcgggcataaagactttgtattgtccgtggccaccacacaaaatgatgagtacatcttgtccggttccaaagatcgtggtgtcctgttttgggataagaaatccggcaatccgttattgatgttgcaaggtcataggaattcagttatatctgtggctgtggcaaacgggtctccgctgggtccagaatataacgtttttgctactggtagcggtgattgtaaagcaaggatttggaagtataaaaaaatagcgccaaattaa

SEQ ID NO: 1288 - DNA, 2142 bp, Artificial Sequence
  Description of Artificial Sequence: Synthetic polynucleotide
atgactgccagcgtttctaatacgcagaataagttgaatgagcttctcgatgccatcagacaggagtttctccaagtctctcaagaggcaaatacctaccgtcttcaaaaccaaaaggattacgatttcaaaatgaaccagcagttagctgagatgcagcagataagaaacaccgtctacgaattggaattgactcacaggaaaatgaaggacgcgtacgaagaagagatcaagcacttgaaattggggttagagcaaagagaccatcaaattgcatctttgaccgtccagcaacagagacaacagcaacagcagcaacaggtccagcagcatttacaacagcaacagcagcagttggccgctgcatctgcatctgttccagttgcgcaacaaccaccggctactacttctgccaccgccactccagcagcaaacacaactactggttctccatctgccttcccagtacaagctagccgtcctaatttggttggctctcagttgcctaccaccactttgcctgtggtgtccagtaacgcccaacaacaattaccacaacagcaattacaacagcagcaacttcaacaacagcaaccacctccccaggtttccgtggcaccattgagtaacacagccatcaacggatctcctacttctaaagagaccactactttaccctctgtcaaggcacctgaatctacgttgaaagaaactgaaccggaaaataataatacctccaagataaatgacaccggatccgccaccacggccaccactaccaccgcaactgaaactgaaatcaaacctaaggaggaagacgccaccccggctagtttgcaccaggatcactacttagtcccttataatcaaagagcaaaccactctaaacctatcccacctttccttttggatttggattcccagtctgttcccgatgctttgaagaagcaaacaaatgattattatattttatacaacccggcattgccaagagaaattgacgttgagttacacaaatctttggatcatacttctgttgtttgttgcgtgaagttcagtaacgatggtgaatacttagccacaggctgcaacaaaactactcaagtgtatcgcgtttctgatggttctttggtggcccgtttatctgacgattctgctgccaataaccatagaaattccatcactgaaaataacaccaccacgtccacggataacaatacaatgacaaccactactaccaccacaattactaccacagcgatgacttctgcagcagaattggcaaaagatgtggaaaacttgaacacttcttcttccccatcttccgacttgtatatccgttctgtgtgtttttctccagatgggaaatttttggcaacaggtgctgaagacagattgattagaatttgggatattgaaaatagaaagattgttatgattcttcaaggccacgaacaagatatttattctttggactactttccctctggtgacaaattagtctccggttctggtgaccgtaccgttcgtatttgggacttacgtacaggccagtgttctttgactttatccattgaagatggtgttaccaccgtcgctgtatctccaggtgatggtaaatacatcgctgctggttctttagatcgtgctgtgagagtttgggattccgagaccggattcttggtggaaagattagattctgaaaacgaatccggtacaggccacaaggactctgtttatagcgttgtcttcactagagatggacaaagcgttgtatccggctctttagatagatctgttaagctctggaatttgcagaatgcaaacaacaagagcgattctaaaactccaaattccggcacttgtgaagttacgtatatcgggcataaagactttgtattgtccgtggccaccacacaaaatgatgagtacatcttgtccggttccaaagatcgtggtgtcttgttttgggataagaaatccggcaatccgttattgatgttgcaaggtcataggaattctgttatatctgtggctgtggcaaacgggtctccgttgggtccagaatataacgtttttgctactggtagcggtgattgtaaagcaaggatttggaagtataaaaaaatagcgccaaattga

SEQ ID NO: 1289 - DNA, 354 bp, Saccharomyces cerevisiae
atgttgttcttatatacatatgtttatgtctttttatgtacaaataatgatgtttacaatgaaacatctgttatgctatcaaaaacgtcagcgcattgttttatagctgaagaagttacaacggataacggtctgatttgcggcctggcaatgcttggtaaaactaaatatcaattttacgaattatttactgtatatagtattcagtccctcactcaactggcgtcaagagtgaagaagggcggcctcattatggctcgccttattctgttcaccctctgcgctcttcccgtattatttcattttattttgtttatgcttcaatatcttgtatttgtttacattgaaaaatga

SEQ ID NO: 1290 - DNA, 354 bp, Artificial Sequence
  Description of Artificial Sequence: Synthetic polynucleotide
atgttgttcttatatacatatgtttatgtctttttatgtacaaataatgatgtttacaatgaaacatctgttatgctttctaaaacgtctgcgcattgttttatagctgaagaagttacaacggataacggtttgatttgcggcttggcaatgcttggtaaaactaaatatcaattttacgaattatttactgtatatagtattcagtccctcactcaattggcgtccagagtgaagaagggcggcctcattatggctcgccttattcttttcaccctctgcgctcttcccgtattatttcattttattttgtttatgcttcaatatcttgtatttgtttacattgaaaaatga

SEQ ID NO: 1291 - DNA, 573 bp, Saccharomyces cerevisiae
atggatccattgactgtatacaaaaactcagtgaaacaacagatcgattccgcagacttactagtggcaaatttggtaaatgagaatttcgtactgtcggagaagctggatacaaaagcaaccgagatcaaacagctgcagaagcagatagactcgctaaacgcacaagtcaaggagctgaagactcagacttcccaacaggcagaaaattcagaagtcataaaggacctttacgagtacctctgtaacgtacgtgtacataaaagctacgaggatgattctgggttgtggttcgacatctcgcagggcacccactcagggggatcttccgatgattattcgataatggactataaactcggatttgtcaagggccaggcccaagtcacagaagtcatatatgcgcccgttcttaaacagcgatccaccgaggaactatactcgctacagtcgaaactaccggaatacctcttcgaaacgttgagtttccccctctcgtcgctaaaccaattctataacaaaatcgctaaaagcctgaataagaaaagagagaaaaaagatgaaaccgagtaa

SEQ ID NO: 1292 - DNA, 573 bp, Artificial Sequence
  Description of Artificial Sequence: Synthetic polynucleotide
atggatccattgactgtatacaaaaactctgtgaaacaacagatcgattccgcagacttattggtggcaaatttggtaaatgagaatttcgtattatctgagaagttggatacaaaagcaaccgagatcaaacagttacagaagcagatagactctttgaacgcacaagtcaaggagttgaagactcagacttcccaacaggcagaaaattctgaagtcataaaggacctttacgagtacctctgtaacgtacgtgtacataaaagctacgaggatgattctgggttgtggttcgacatctctcagggcacccactctgggggatcttccgatgattattctataatggactataaactcggatttgtcaagggccaggcccaagtcacagaagtcatatatgcgcccgttcttaaacagaggtccaccgaggaattatactctttgcagtccaaattaccggaatacctcttcgaaacgttgagtttccccctctcttctttgaaccaattctataacaaaatcgctaaaagcttgaataagaaaagagagaaaaaagatgaaaccgagtga

SEQ ID NO: 1293 - DNA, 462 bp, Saccharomyces cerevisiae
atggttacgttcaactgtgaggtgtgtaatgatactgtgcccaagaagaataccgaaaagcattattatagatgtcctaacgcgtactatacatgcatagattgctccaagacgtttgaagatggcgtgagttacaagaatcacacgtcttgcatcagcgaggacgagaagtaccagaaagcgttgtacaagggcaacaagaagcagaagcagaagcagcagcagaagcagcagcagaagcagcaccagcaccagccagtggcaactcctgcaaagaaagtggagaagcctgtgatcaagaaggcagagaaagtggaaaagacctcgaacggtatcgagcttcacaagggcaagtcgttgtacaaaattttgaaaaccatgaaggataaaggggcaaaaaagaccttcttgaaaagtctggttgtggattctgaggggcaaatcaggtatgcaaaggaataa

SEQ ID NO: 1294 - DNA, 462 bp, Artificial Sequence
  Description of Artificial Sequence: Synthetic polynucleotide
atggttacgttcaactgtgaggtgtgtaatgatactgtgcccaagaagaataccgaaaagcattattatagatgtcctaacgcgtactatacatgcatagattgctccaagacgtttgaagatggcgtgagttacaagaatcacacgtcttgcatcagcgaggacgagaagtaccagaaagcgttgtacaagggcaacaagaagcagaagcagaagcagcagcagaagcagcagcagaagcagcaccagcaccagccagtggcaactcctgcaaagaaagtggagaagcctgtgatcaagaaggcagagaaagtggaaaagaccagtaacggtatcgagcttcacaagggcaagtctttgtacaaaattttgaaaaccatgaaggataaaggggcaaaaaagaccttcttgaaaagtttggttgtggattctgaggggcaaatcaggtatgcaaaggaatga

SEQ ID NO: 1295 - DNA, 1779 bp, Saccharomyces cerevisiae
atggctttggaacctattgattatactactcactcgagagagatcgacgcagagtacctgaagattgtcagaggctccgatcctgacaccacctggttgattatttcacccaatgcgaaaaaagaatacgaacctgagtctaccggttcctcctttcacgatttcttgcaattgtttgatgaaaccaaggtccagtacggactggcacgtgtgtccccaccagggtcagacgttgagaagattattatcattggttggtgtcctgattctgcgccattgaagacaagggcctctttcgccgccaattttgctgcagttgctaataatctgttcaagggttaccacgttcaagttaccgccagagacgaggacgatcttgacgaaaatgaactgttgatgaaaatcagtaacgcggccggtgcccgttattctattcagacttcctccaagcaacaggggaaggcttccactcctcccgtgaagaaatccttcacaccttccaagagccctgctccagtttctaagaaggaaccagtcaagactccttccccagcacctgctgctaagatttcttcccgtgttaacgacaacaatgacgacgacgattggaatgagcctgaattaaaggaacgcgacttcgatcaggctcccctgaaaccaaatcaatcatcttacaaaccaattggcaaaatcgacttgcaaaaagtgattgctgaagaaaaggctaaggaggacccacgtcttgttcaaaagccaaccgctgctggttccaagattgatcctagttctgatatcgctaatttaaagaacgaatcaaaattaaagagggactccgagtttaactcctttttgggcaccactaaacccccctccatgacggaatcttcattaaagaatgatgatgataaagtcattaagggttttagaaacgagaaatcacctgctcaattatgggccgaaagaaaggcaaagcaaaacagcggcaacgccgaaactaaggctgaggcaccaaaacctgaagttccagaagatgagcctgaaggtgaacctgacgtcaaagatttgaaatcaaaatttgaaggattggccgcttcagaaaaagaggaggaagaaatggaaaacaaatttgctcctcctccaaagaaatcagaaccaactattatctcaccaaaacccttctccaagccacaagaacctgtgaaagctgaagaagccgagcagcctaagactgattacaagaagatcggcaacccattacccggtatgcacattgaagcggataatgaggaagaaccagaagagaatgatgatgactgggatgatgatgaagacgaggctgctcaacctcctttgccttcgaggaatgttgcgtcaggagcaccagtgcaaaaagaagagcctgaacaagaagagatcgccccaagcttaccttctagaaactcgatcccagctccaaaacaagaagaagcacctgaacaagcacctgaagaagaaattgaagaagaagctgaggaagccgctccacagctgccatcaagaagctctgcagctcctcctccgcctccaagacgagcaactccagagaaaaagccaaaggaaaatccttgggccacagcagaatatgattacgatgctgcagaagataacgaactgacctttgtggaaaatgacaagattatcaatattgaatttgtcgacgatgactggtggctaggggaactagagaaagacggctcaaaaggtctcttccccagcaattatgtgtctttgggcaactag

SEQ ID NO: 1296 - DNA, 1779 bp, Artificial Sequence
  Description of Artificial Sequence: Synthetic polynucleotide
atggctttggaacctattgattatactactcactccagagagatcgacgcagagtacttgaagattgtcagaggctccgatcctgacaccacctggttgattatttctcccaatgcgaaaaaagaatacgaacctgagtctaccggttcctcctttcacgatttcttgcaattgtttgatgaaaccaaggtccagtacggattagcacgtgtgtccccaccagggagtgacgttgagaagattattatcattggttggtgtcctgattctgcgccattgaagacaagggcctctttcgccgccaattttgctgcagttgctaataatttattcaagggttaccacgttcaagttaccgccagagacgaggacgatcttgacgaaaatgaattattgatgaaaatcagtaacgcggccggtgcccgttattctattcagacttcctccaagcaacaggggaaggcttccactcctcccgtgaagaaatccttcacaccttccaagagccctgctccagtttctaagaaggaaccagtcaagactccttccccagcacctgctgctaagatttcttcccgtgttaacgacaacaatgacgacgacgattggaatgagcctgaattaaaggaacgcgacttcgatcaggctcccttgaaaccaaatcaatcttcttacaaaccaattggcaaaatcgacttgcaaaaagtgattgctgaagaaaaggctaaggaggacccacgtcttgttcaaaagccaaccgctgctggttccaagattgatcctagttctgatatcgctaatttaaagaacgaaagtaaattaaagagggactccgagtttaactcctttttgggcaccactaaacccccctccatgacggaatcttctttaaagaatgatgatgataaagtcattaagggttttagaaacgagaaatctcctgctcaattatgggccgaaagaaaggcaaagcaaaacagcggcaacgccgaaactaaggctgaggcaccaaaacctgaagttccagaagatgagcctgaaggtgaacctgacgtcaaagatttgaaatctaaatttgaaggattggccgcttctgaaaaagaggaggaagaaatggaaaacaaatttgctcctcctccaaagaaaagtgaaccaactattatctctccaaaacccttctccaagccacaagaacctgtgaaagctgaagaagccgagcagcctaagactgattacaagaagatcggcaacccattacccggtatgcacattgaagcggataatgaggaagaaccagaagagaatgatgatgactgggatgatgatgaagacgaggctgctcaacctcctttgccttctaggaatgttgcgtctggagcaccagtgcaaaaagaagagcctgaacaagaagagatcgccccaagcttaccttctagaaactctatcccagctccaaaacaagaagaagcacctgaacaagcacctgaagaagaaattgaagaagaagctgaggaagccgctccacagttaccatctagaagctctgcagctcctcctccgcctccaagaagagcaactccagagaaaaagccaaaggaaaatccttgggccacagcagaatatgattacgatgctgcagaagataacgaattgacctttgtggaaaatgacaagattatcaatattgaatttgtcgacgatgactggtggttaggggaattagagaaagacggctctaaaggtctcttccccagcaattatgtgtctttgggcaactga

SEQ ID NO: 1297 - DNA, 4830 bp, Saccharomyces cerevisiae
atgaactcatttgcgtcattaggtctgatatattcagtagtaaaccttttaactagagtagaggctcaaattgtgttctaccagaatagtagtacttcactgcctgtccctactttagtatccacctcaatagcagattttcacgagtcctcatcaactggcgaagtgcagtattcatcctcttattcgtatgtgcagccctcaatagactccttcacttcatctagcttcttaacaagttttgaagctcctaccgaaacttcttccagctatgcagtttcttcctcattgataacttctgatactttttcttcatactctgatatcttcgatgaagaaacaagttcattaatatcaacctcagctgcctcatcggagaaagcctcgtccaccctttcttcaactgcacaacctcataggacatctcactcttcctcttcattcgagctaccagtcactgctccatcatcctctagtttaccgtcctcaacttcattgacatttacgtcagttaatccatctcaaagttggacttcatttaactcagaaaaatctagcgctctttcctcaaccatagattttacttcttctgagatttcaggttcaacatctccaaagagcctggaaagtttcgataccaccggtactataacttcatcttattctccttctccttcttcaaaaaattctaaccagacctcactactcagcccattggagcctctgtccagttcttcaggagatttaatattgagttcaactattcaagctactaccaatgaccaaacttcaaaaactattccaactcttgttgacgccacatcgtcattaccaccaacattgaggtcatccagtatggcaccaacaagtggttctgattcaatctcacacaactttacgagccccccctctaaaacaagtggtaactacgatgttttgacttcaaactcaatagatccttctctatttacaactacgagtgaatattcatctacacaattgtcgagtttaaatcgggcctcaaaaagtgaaacagttaatttcactgcttctattgcttccacaccatttggtacagattcggctacttctctaatagaccccattagttcagtgggttctacagcatctagctttgtgggaatttcaaccgccaattttagtacacaagggaactcgaactatgttcctgaatcaactgcaagtggaagttcacaataccaggactggtcaagctcttctcttccgctgtcacaaaccacttgggttgtcatcaacacaactaatacacaagggtctgtaacgtcaaccacatccccggcttatgtttctacggccaccaaaacggttgacggggtgatcaccgaatatgttacatggtgtcctctaacacaaaccaaatcacaagcaattggggtcagttcgtccatttctagcgttccacaagcctcctcatttagcggtagttctattttgagctccaattccagcactcttgctgcctcgaacaacgttcctgaatcaactgcaagcggaagttcacaataccaggactggtcaagctcttctcttccgctgtcacaaaccacttgggttgtcatcaacacaactaatacacaagggtctgtaacgtcaaccacatccccggcttatgtttctacggccaccaaaacggttgacggggtgatcaccgaatatgttacatggtgtcctctaacacaaaccaaatcacaagcaattgggatcagttcatccacgattagcgccacacaaacctctaaaccatcttcaatattaacattggggatatcgaccttacaattgtctgatgccacatttaaggggactgaaactataaacacccatctcatgaccgaaagtacttcaatcacagagcccacctattttagtggcacatcggatagtttttatttgtgcaccagtgaagttaatcttgcgtcttccttatcttcttatccaaatttttcatcttcagaaggctctacggcgaccattactaactctaccgttacatttggatcgaccagcaagtatccatctactagtgtatctaacccaacagaagccagccaacatgtgagctctagtgtgaactcactcactgattttacttcaaattcaaccgaaaccatcgcagttatatctaatattcacaaaacttcgtcaaataaagactattcattgacgactacgcaattaaagaccagcggaatgcaaacgcttgtgctttctactgtcacaacaacggtgaacggtgctgctacggaatacacaacgtggtgcccggcatcaagtattgcttatacgacatccatatcatataaaacattagttttgaccactgaagtctgctctcattctgagtgtactccaacggttattaccagtgttactgcaacaagctctacaatcccccttttatcaacctctagctctacggtattatcttctacagtatccgaaggtgcaaaaaatcccgctgcttctgaagtaactattaatacccaagtttctgctacttccgaagctactagtactagcactcaagtgtctgctacttctgcgacggccactgctagcgagagttcaaccacatcccaggtttctactgcttccgaaactattagcactctcggtactcaaaactttaccactactggaagcttacttttcccggctttgtctactgaaatgataaatactactgtggtttcccgaaaaaccctaattattagtacagaggtatgttcccattccaaatgtgtcccaacagtcattaccgaggttgttacttcgaaaggcacgccttctaatggacattcttctcaaactctacaaacggaggcagtagaggtgacattgtcatcccatcaaaccgtaactatgagtaccgaagtatgttctaattcgatttgcacaccgactgttattacatctgtgcaaatgagaagtactccttttccatacttaacttcttcaacgtcaagttcctctttagcctccaccaaaaaaagttccttagaagcctcctcagaaatgtccaccttttctgtcagtacgcaaagtttgcctttggcattcacaagttcagaaaaacgctccaccacatctgtctctcaatggtcaaataccgttttaactaatacaataatgtcctcttcttctaatgtcatatcaacaaatgaaaagcccagtagtactacctctccatacaacttctcttcggggtactctttaccttcttcttctacaccttcccaatattcactatctacagctactacaacaatcaacggaatcaaaactgtgtacacaacttggtgtccattggcagaaaaatctactgtagctgcttcttctcaatcttcccgcagtgttgacaggtttgtttcgtcgtcaaaaccatcctcatctttatctcagacctctattcaatatacattatctactgctaccaccaccataagtggtttgaagactgtatacacgacttggtgtccattaacaagtaaatcgactttaggtgctactactcaaacttcctcgacagccaaagttagaattacttccgcttcatctgcaacatctacttctatttctttgagcacttcaacagaatcagaatcttcatctggatatttgtcgaaaggagtatgctcaggtactgaatgtacgcaagatgtgccaacacaatcatcctcacctgcttcaacgttagcatattccccctctgtttctacatcatcatcatcatcattctcaacaacaactgcatcaacactaacgtcaacacacacctctgtcccgttattaccatcatctagctctatatcagcatcttcgccatcatcaacttcgttgttatccacttctttaccatctcccgcttttacgtcatcaacacttccaacagcaacagcagtatcttcctccactttcatagcgtcttctctaccattgtcctctaaatcatcattgtcgttatcgccagtctcgtcgtctattttgatgtctcagttttcatcatcatcatcatcatcatcatcattggcatcgttgccatctctttctatatcaccaactgttgacactgtttctgttctacaaccaactacttccatcgcaacactaacttgcacagactcacaatgccaacaggaggtatccactatctgtaatggatccaactgtgacgatgtgacttcaactgccactactcctccatctacggttactgatactatgacatgtactggatctgagtgccagaaaaccacatctagcagctgtgatggttactcgtgtaaagtatccgaaacgtataaatcaagcgctacaatatctgcatgtagtggagaaggatgccaagcttccgctacaagtgagctaaattctcaatacgtcacgatgacgtctgtcattaccccaagtgccataacaacaacatcagtggaagtgcattcaactgaatccactatatcaattactacagtgaagccagttacatatacatccagtgatactaatggagaactgataaccataacaagttccagccaaactgtaattccatcagtaacgacgataataacgagaacaaaagtggccataacttcagcaccaaagccaacaactacgacctatgtcgagcaacgactttcctccagtgggattgctacttcttttgttgctgctgcatcctcaacttggattactacacccattgtcagtacgtatgctggttcggcgtcaaaatttctctgtagtaagttctttatgataatggtaatggtgatcaacttcatttaa

SEQ ID NO: 1298 - DNA, 4830 bp, Artificial Sequence
  Description of Artificial Sequence: Synthetic polynucleotide
atgaactcttttgcgtctttaggtttgatatattctgtagtaaaccttttaactagagtagaggctcaaattgtgttctaccagaatagtagtacttctttgcctgtccctactttagtatccaccagtatagcagattttcacgagtcctcttctactggcgaagtgcagtattcttcctcttattcttatgtgcagccctccatagactccttcacttcttctagcttcttaacaagttttgaagctcctaccgaaacttcttccagctatgcagtttcttcctctttgataacttctgatactttttcttcctactctgatatcttcgatgaagaaacaagttctttaatatctaccagtgctgcctcttctgagaaagcctcttccaccctttcttctactgcacaacctcataggacatctcactcttcctcttctttcgagttaccagtcactgctccatcttcctctagtttaccgtccagcacttctttgacatttacgtctgttaatccatctcaaagttggacttcttttaactctgaaaaatctagcgctctttcctccaccatagattttacttcttctgagatttctggttctacatctccaaagagcttggaaagtttcgataccaccggtactataacttcttcttattctccttctccttcttctaaaaattctaaccagacctctttactcagcccattggagcctttatccagttcttctggagatttaatattgagttctactattcaagctactaccaatgaccaaacttctaaaactattccaactcttgttgacgccacatcttctttaccaccaacattgaggtcttccagtatggcaccaacaagtggttctgattctatcagccacaactttacgagccccccctctaaaacaagtggtaactacgatgttttgacttctaacagcatagatccttctttatttacaactacgagtgaatattcttctacacaattgagcagtttaaatagagcctccaaaagtgaaacagttaatttcactgcttctattgcttccacaccatttggtacagattctgctacttctttgatagaccccattagttctgtgggttctacagcatctagctttgtgggaatttctaccgccaattttagtacacaagggaactccaactatgttcctgaatctactgcaagtggaagttctcaataccaggactggtctagctcttctcttccgttatctcaaaccacttgggttgtcatcaacacaactaatacacaagggtctgtaacgtccaccacatccccggcttatgtttctacggccaccaaaacggttgacggggtgatcaccgaatatgttacatggtgtcctttaacacaaaccaaatctcaagcaattggggtcagttcttccatttctagcgttccacaagcctcctcttttagcggtagttctattttgagctccaattccagcactcttgctgcctccaacaacgttcctgaatctactgcaagcggaagttctcaataccaggactggtctagctcttctcttccgttatctcaaaccacttgggttgtcatcaacacaactaatacacaagggtctgtaacgtccaccacatccccggcttatgtttctacggccaccaaaacggttgacggggtgatcaccgaatatgttacatggtgtcctttaacacaaaccaaatctcaagcaattgggatcagttcttccacgattagcgccacacaaacctctaaaccatcttctatattaacattggggatatctaccttacaattgtctgatgccacatttaaggggactgaaactataaacacccatctcatgaccgaaagtacttctatcacagagcccacctattttagtggcacatctgatagtttttatttgtgcaccagtgaagttaatcttgcgtcttccttatcttcttatccaaatttttcttcttctgaaggctctacggcgaccattactaactctaccgttacatttggatctaccagcaagtatccatctactagtgtatctaacccaacagaagccagccaacatgtgagctctagtgtgaactctctcactgattttacttccaattctaccgaaaccatcgcagttatatctaatattcacaaaacttcttccaataaagactattctttgacgactacgcaattaaagaccagcggaatgcaaacgcttgtgctttctactgtcacaacaacggtgaacggtgctgctacggaatacacaacgtggtgcccggcaagtagtattgcttatacgacatccatatcttataaaacattagttttgaccactgaagtctgctctcattctgagtgtactccaacggttattaccagtgttactgcaacaagctctacaatcccccttttatctacctctagctctacggtattatcttctacagtatccgaaggtgcaaaaaatcccgctgcttctgaagtaactattaatacccaagtttctgctacttccgaagctactagtactagcactcaagtgtctgctacttctgcgacggccactgctagcgagagttctaccacatcccaggtttctactgcttccgaaactattagcactctcggtactcaaaactttaccactactggaagcttacttttcccggctttgtctactgaaatgataaatactactgtggtttccagaaaaaccttgattattagtacagaggtatgttcccattccaaatgtgtcccaacagtcattaccgaggttgttacttctaaaggcacgccttctaatggacattcttctcaaactttacaaacggaggcagtagaggtgacattgtcttcccatcaaaccgtaactatgagtaccgaagtatgttctaattctatttgcacaccgactgttattacatctgtgcaaatgagaagtactccttttccatacttaacttcttctacgtccagttcctctttagcctccaccaaaaaaagttccttagaagcctccagtgaaatgtccaccttttctgtcagtacgcaaagtttgcctttggcattcacaagttctgaaaaacgctccaccacatctgtctctcaatggtctaataccgttttaactaatacaataatgtcctcttcttctaatgtcatatctacaaatgaaaagcccagtagtactacctctccatacaacttctcttctgggtactctttaccttcttcttctacaccttcccaatattctttatctacagctactacaacaatcaacggaatcaaaactgtgtacacaacttggtgtccattggcagaaaaatctactgtagctgcttcttctcaatcttcccgcagtgttgacaggtttgtttcttcttctaaaccatcctcttctttatctcagacctctattcaatatacattatctactgctaccaccaccataagtggtttgaagactgtatacacgacttggtgtccattaacaagtaaatctactttaggtgctactactcaaacttcctctacagccaaagttagaattacttccgcttcttctgcaacatctacttctatttctttgagcacttctacagaaagtgaatcttcttctggatatttgagtaaaggagtatgctctggtactgaatgtacgcaagatgtgccaacacaatcttcctcccctgcttccacgttagcatattccccctctgtttctacatcttcttcttcttctttcagtacaacaactgcaagcacattaacgagtacacacacctctgtcccgttattaccatcttctagctctatatctgcatcttctccatcttctacttctttgttatccacttctttaccatctcccgcttttacgtcttctacacttccaacagcaacagcagtatcttcctccactttcatagcgtcttctttaccattgtcctctaaatcttctttgtctttatctccagtctcttcttctattttgatgtctcagttttcttcttcttcttcttcttcttcttctttggcaagtttgccatctctttctatatctccaactgttgacactgtttctgttttgcaaccaactacttccatcgcaacattgacttgcacagactctcaatgccaacaggaggtatccactatctgtaatggatccaactgtgacgatgtgacttctactgccactactcctccatctacggttactgatactatgacatgtactggatctgagtgccagaaaaccacatctagcagctgtgatggttactcttgtaaagtatccgaaacgtataaaagtagcgctacaatatctgcatgtagtggagaaggatgccaagcttccgctacaagtgagttgaattctcaatacgtcacgatgacgtctgtcattaccccaagtgccataacaacaacatctgtggaagtgcattctactgaatccactatatctattactacagtgaagccagttacatatacatccagtgatactaatggagaattgataaccataacaagttccagccaaactgtaattccatctgtaacgacgataataacgagaacaaaagtggccataacttctgcaccaaagccaacaactacgacctatgtcgagcaaaggctttcctccagtgggattgctacttcttttgttgctgctgcatccagcacttggattactacacccattgtcagtacgtatgctggttctgcgtccaaatttctctgtagtaagttctttatgataatggtaatggtgatcaacttcatttga

SEQ ID NO: 1299 - DNA, 549 bp, Saccharomyces cerevisiae
atgccgttatttttggttctgaaagcaacattatcagaaaacgtgaccaaggtttcaattgagaatacaaacgaatcaagggcagaatttgccttcgatctacaatgtaccagttgtagagaattacacgattctaaagtcatcatcaatacatttgaagaatatgctatgccggcatcaaaaggtaccgcatctttcttgatgaagtgtaaattttgttcaaaagaattgtcagttaacctgtgcgcttttgaggatgaatatttaactgatcagagtgacgacaaatgggccaagataaaagatgtgcggaagaagcatggtttatcgaaggtcaaagaagattctttcattcctttaagccttgattgcagaggttgtgaattaatcaaattttatcccgacaccataacgtttgaagtttctctaagttcggggaaagtaatgtcatgccaactagaggataatgaatggtatgattatgatgacaaccttggggaagaagtaacaatgactgatttctcatcaagcattattaaaggtaagtaa

SEQ ID NO: 1300 - DNA, 549 bp, Artificial Sequence
  Description of Artificial Sequence: Synthetic polynucleotide
atgccgttatttttggttttgaaagcaacattatctgaaaacgtgaccaaggtttctattgagaatacaaacgaaagtagggcagaatttgccttcgatttgcaatgtaccagttgtagagaattacacgattctaaagtcatcatcaatacatttgaagaatatgctatgccggcatccaaaggtaccgcatctttcttgatgaagtgtaaattttgttctaaagaattgagtgttaacttatgcgcttttgaggatgaatatttaactgatcagagtgacgacaaatgggccaagataaaagatgtgagaaagaagcatggtttatccaaggtcaaagaagattctttcattcctttaagccttgattgcagaggttgtgaattaatcaaattttatcccgacaccataacgtttgaagtttctttgagttccgggaaagtaatgagttgccaattggaggataatgaatggtatgattatgatgacaaccttggggaagaagtaacaatgactgatttctcttctagcattattaaaggtaagtga

SEQ ID NO: 1301 - DNA, 2163 bp, Saccharomyces cerevisiae
atgactcagcaagaataccgttccccctcacaacgcttatccaaggggaggagcatgtcgctacccaaaatatttgctcgtaatttgagatctctgcaaaacaatgcacctcctggcaaaaacatcaatgtcaattgtttgaacgtcaattcttgttcgttgtccgcaagcccaagctcacaaattaatatggcttgtaatggaaacaagcaagatcttcccataccgtttcccctgcatgtagaatgcaacgatagctggtcaagctccaaacttaacaagttcaaatcaatgtttaatcataacagatcaaagagcagtggtactacagatgcgtcaacttcagaaaaaggtacgcataagcgtgaaccccggtcgacgatacatacagagctgttacaaagttccattatcggtgagccaaatgtccatagtactacaagtagcacacttatacccaatgaggcgatatgctccacacctaatgagatctcaggtagctcttctccggacgcggagttatttacctttgacatgcccacagacccgtcatccttccacactcctagctccccaagttatatagcaaaggacagtagaaacctgagtaatggatctttgaatgatattaacgaaaatgaagagctccaaaatttccatagaaaaatcagcgaaaatggcagtgcctcccccctggctaacttgtcattatccaattcaccaattgattccccaaggaaaaatagcgaaaccagaaaggatcaaatacctatgaacataacaccacgtttaaggagggccgcttccgaaccgttcaatacggcaaaggatgggttaatgcgggaagattacattgccttgaaacaacctccaagcttgggagatattgtagaaccgaggagatctcgtcgtttaagaaccaagtcattcggtaacaagttccaagacattactgtcgaacctcaatccttcgaaaaaattagactacttggccaaggtgacgtaggtaaagtgtatttagtgagggaacgcgataccaaccagatattcgccctgaaagttttgaataaacatgagatgatcaagaggaagaaaattaaacgagtactcactgaacaggaaattctcgcgacaagtgatcatccatttattgtgacactgtatcattcctttcaaaccaaagactatttgtatctctgtatggaatactgcatgggaggggaattctttagagccttacaaacaagaaaaagtaaatgcattgcagaagaagatgcgaagttttacgccagtgaagtagtagcagctttggaatatttacacctactgggcttcatatacagagatttgaaacccgaaaacatattactgcatcaatctggtcatgtcatgctttctgactttgatttatccatccaagcaacgggatcaaaaaaacccaccatgaaagactctacgtatttagatacaaaaatttgttcagatggattcagaactaattcctttgttggtactgaagagtatttagctccagaagtaatcagagggaatggccacactgcagcagtagactggtggactttaggaatattgatttacgagatgctatttggctgtactccatttaaaggagataattcaaatgaaacattctctaacattttaaccaaggacgtcaaatttccacatgataaggaagtttcgaagaattgtaaagacctgataaagaaactactaaacaaaaacgaggcaaaaaggcttggttccaaatcaggagctgcagacataaagagacatcccttcttcaaaaaagttcagtggtcgttcttaagaaaccaagacccccctctaatacctgcattaaatgataacggctgcgaacttccttttatattgtcttgcaataaacacccgaaaaggaactcagtgagtgaacaggaaaccaaaatgttctgtgagaaagttgcaaacgatgatgaaattgatgaggctgatccattccatgattttaattctatgagtttaacgaagaaagatcacaatatcttaacctactctgaaaattatacctacggaaaaattctatacaaagcaacttgtacaaggccaaggcataacagctcacatagaagtttctttaaagacatcatacctgaactataa

SEQ ID NO: 1302 - DNA, 2163 bp, Artificial Sequence
  Description of Artificial Sequence: Synthetic polynucleotide
atgactcagcaagaataccgttccccctctcaacgcttatccaaggggaggagcatgtctttacccaaaatatttgctcgtaatttgagatctttacaaaacaatgcacctcctggcaaaaacatcaatgtcaattgtttgaacgtcaattcttgttctttgtccgcaagcccaagctctcaaattaatatggcttgtaatggaaacaagcaagatcttcccataccgtttccccttcatgtagaatgcaacgatagctggtctagctccaaacttaacaagttcaaatctatgtttaatcataacagatccaagagcagtggtactacagatgcgtctacttctgaaaaaggtacgcataagcgtgaacccagatctacgatacatacagagttattacaaagttccattatcggtgagccaaatgtccatagtactacaagtagcacacttatacccaatgaggcgatatgctccacacctaatgagatcagtggtagctcttctccggacgcggagttatttacctttgacatgcccacagacccgtcctccttccacactcctagctccccaagttatatagcaaaggacagtagaaacttgagtaatggatctttgaatgatattaacgaaaatgaagagctccaaaatttccatagaaaaatcagcgaaaatggcagtgcctcccccttggctaacttgtctttatccaattctccaattgattccccaaggaaaaatagcgaaaccagaaaggatcaaatacctatgaacataacaccacgtttaaggagggccgcttccgaaccgttcaatacggcaaaggatgggttaatgagagaagattacattgccttgaaacaacctccaagcttgggagatattgtagaaccgaggagatctcgtcgtttaagaaccaagagtttcggtaacaagttccaagacattactgtcgaacctcaatccttcgaaaaaattagattacttggccaaggtgacgtaggtaaagtgtatttagtgagggaacgcgataccaaccagatattcgccttgaaagttttgaataaacatgagatgatcaagaggaagaaaattaaaagagtactcactgaacaggaaattctcgcgacaagtgatcatccatttattgtgacattatatcattcctttcaaaccaaagactatttgtatctctgtatggaatactgcatgggaggggaattctttagagccttacaaacaagaaaaagtaaatgcattgcagaagaagatgcgaagttttacgccagtgaagtagtagcagctttggaatatttacacttgttgggcttcatatacagagatttgaaacccgaaaacatattattacatcaatctggtcatgtcatgctttctgactttgatttatccatccaagcaacgggatctaaaaaacccaccatgaaagactctacgtatttagatacaaaaatttgttctgatggattcagaactaattcctttgttggtactgaagagtatttagctccagaagtaatcagagggaatggccacactgcagcagtagactggtggactttaggaatattgatttacgagatgttatttggctgtactccatttaaaggagataatagtaatgaaacattctctaacattttaaccaaggacgtcaaatttccacatgataaggaagtttccaagaattgtaaagacttgataaagaaattattaaacaaaaacgaggcaaaaaggcttggttccaaaagtggagctgcagacataaagagacatcccttcttcaaaaaagttcagtggagtttcttaagaaaccaagacccccctttgatacctgcattaaatgataacggctgcgaacttccttttatattgtcttgcaataaacacccgaaaaggaactctgtgagtgaacaggaaaccaaaatgttctgtgagaaagttgcaaacgatgatgaaattgatgaggctgatccattccatgattttaattctatgagtttaacgaagaaagatcacaatatcttaacctactctgaaaattatacctacggaaaaattttatacaaagcaacttgtacaaggccaaggcataacagctctcatagaagtttctttaaagacatcatacctgaattatga

SEQ ID NO: 1303 - DNA, 3057 bp, Saccharomyces cerevisiae
atggcgggacaacccacaataagcaggtttttcaagaaggcggtaaaatcagagctgacgcataagcaagaacaagaagttgcggttggaaatggcgctggtagcgaatccatctgccttgacactgatgaagaggacaatttatcttctgttgcaagcacaacagtaactaatgatagctttccactcaaaggcagtgtttcttccaagaattcgaaaaattcagaaaagactagtggtacttcgacaacatttaatgatattgactttgctaagaaattggataggattatgaaaagacgaagtgatgaaaatgttgaggctgaagatgatgaggaagagggtgaggaagatttcgtaaaaaaaaaagccagaaagtcccctacagcgaaacttactcccttggacaaacaggtgaaggacctgaaaatgcatcatagagataaagtgcttgttattagagtaggctacaagtacaaatgttttgcagaggatgcagtaacggttagcagaatacttcacatcaaacttgtgcctggaaaattgactatcgatgagtctaatcctcaagattgcaatcataggcagtttgcgtactgttctttcccggatgtcagattaaacgttcacctagagagacttgtgcatcataatttaaaggttgccgtggtagagcaagcagaaacaagcgctattaagaagcatgatccaggtgccagcaaatcaagcgtttttgaaagaaagatttcaaatgtctttaccaaagctacatttggtgttaattccacctttgtccttagggggaaacgtattctcggtgatacaaacagtatatgggctttgtcccgtgacgtacatcagggaaaggtggctaaatattccttaatttctgtcaatttaaataacggggaagtcgtgtatgatgaatttgaagagcctaatcttgctgatgagaaactacagatacgaatcaaatatttacagcccatagaagtactggtaaatacagatgatcttccattacatgtagcgaaatttttcaaagatatttcatgtcctttaatacacaagcaggagtatgatttggaagatcatgtagttcaggcaataaaagtaatgaatgagaaaattcaactctcgccgtctctcatacgcttagtttctaagttatattcgcatatggttgagtacaataatgagcaggtgatgttgattccttctatctattcgcccttcgcatcaaaaatacatatgttacttgatcctaactccctgcaaagtttggacatttttacccatgatggtggtaaaggttctttgttttggttattggaccatacaaggacatcgtttggattaagaatgttgagagaatggattctcaaacctttggttgatgtacaccaaattgaagagcggcttgatgccattgagtgcattacatccgaaatcaacaacagtatattttttgaatcgttgaatcaaatgttgaatcatacccctgacttattaagaactttaaatcgcataatgtatggtacaacttctagaaaagaagtctatttctatttaaagcaaataacttctttcgttgatcacttcaagatgcatcaatcttacctgtcagaacatttcaagtcatcagatggaaggataggcaaacaatctcctttactttttagactatttagtgaattgaatgaactactttctaccactcagttgcctcattttttgaccatgatcaacgtttctgcggtaatggaaaaaaattcagataagcaagtaatggatttttttaatttaaataactatgattgttcagagggtataataaaaattcaaagggaaagcgaatcagtacggtcacagttaaaggaagaattggcagaaatacgaaaatatctcaaacgtccatatctaaattttagagatgaagttgattacttaatcgaagtgaaaaactcgcaaattaaggacttgccagatgattggataaaagttaacaatacgaagatggtcagtagatttaccactcccagaacccagaaactgactcaaaagctagaatattacaaggacttattaattcgggaatctgaactacagtataaagaattcttgaacaaaattacggcagaatatacagagctccgtaaaattacactcaatttggcgcagtatgactgtattttgtcgttagcagccacatcatgcaacgtaaattatgttagaccaacttttgtgaatggtcaacaagccataatcgcaaaaaatgcaagaaatccaattatcgagtcgctggatgttcattatgtaccaaatgatatcatgatgtccccagaaaacggtaaaatcaatattataacggggccgaatatgggtgggaaatcatcttatattagacaagtggcactgcttactataatggcacagatcggctcatttgtccccgcagaagagatcagattaagcatatttgaaaacgtactcactcgaatcggtgcgcacgatgatattataaacggtgattctacttttaaagtggaaatgcttgatatcctacacatcttgaaaaattgcaataaacggtctttactattattagacgaagtgggaagaggtactggcacgcacgatggtatagcaatttcttatgctttaataaagtatttttctgagttaagtgactgccccttgatattatttactacccattttcccatgctgggagaaatcaaatctccgttaataaggaattatcatatggattacgtggaagaacaaaaaactggcgaggactggatgagtgtaatttttctatataagttaaaaaagggattgacttataatagttatgggatgaatgtggcgaaattggcacgcctggacaaagatattataaatcgggcattcagtatttcagaagaattgcggaaggaatccattaacgaagacgcgttgaaattattcagctctttgaaaagaatattaaaaagtgataatataacagcaacggataaactcgcgaaattactatcattggatatccactga

SEQ ID NO: 1304 - DNA, 3057 bp, Artificial Sequence
  Description of Artificial Sequence: Synthetic polynucleotide
atggcgggacaacccacaataagcaggtttttcaagaaggcggtaaaaagtgagcttacgcataagcaagaacaagaagttgcggttggaaatggcgctggtagcgaatccatctgccttgacactgatgaagaggacaatttatcttctgttgcaagcacaacagtaactaatgatagctttccactcaaaggcagtgtttcttccaagaattctaaaaattctgaaaagactagtggtacttctacaacatttaatgatattgactttgctaagaaattggataggattatgaaaagaagaagtgatgaaaatgttgaggctgaagatgatgaggaagagggtgaggaagatttcgtaaaaaaaaaagccagaaagtcccctacagcgaaacttactcccttggacaaacaggtgaaggacttgaaaatgcatcatagagataaagtgcttgttattagagtaggctacaagtacaaatgttttgcagaggatgcagtaacggttagcagaatacttcacatcaaacttgtgcctggaaaattgactatcgatgagtctaatcctcaagattgcaatcataggcagtttgcgtactgttctttcccggatgtcagattaaacgttcacttagagagacttgtgcatcataatttaaaggttgccgtggtagagcaagcagaaacaagcgctattaagaagcatgatccaggtgccagcaaaagtagcgtttttgaaagaaagatttctaatgtctttaccaaagctacatttggtgttaattccacctttgtccttagggggaaacgtattctcggtgatacaaacagtatatgggctttgtcccgtgacgtacatcagggaaaggtggctaaatattccttaatttctgtcaatttaaataacggggaagtcgtgtatgatgaatttgaagagcctaatcttgctgatgagaaattacagataagaatcaaatatttacagcccatagaagtattggtaaatacagatgatcttccattacatgtagcgaaatttttcaaagatattagttgtcctttaatacacaagcaggagtatgatttggaagatcatgtagttcaggcaataaaagtaatgaatgagaaaattcaactctctccgtctctcatacgcttagtttctaagttatattctcatatggttgagtacaataatgagcaggtgatgttgattccttctatctattctcccttcgcatccaaaatacatatgttacttgatcctaactccttacaaagtttggacatttttacccatgatggtggtaaaggttctttgttttggttattggaccatacaaggacatcttttggattaagaatgttgagagaatggattctcaaacctttggttgatgtacaccaaattgaagagaggcttgatgccattgagtgcattacatccgaaatcaacaacagtatattttttgaatctttgaatcaaatgttgaatcatacccctgacttattaagaactttaaatcgcataatgtatggtacaacttctagaaaagaagtctatttctatttaaagcaaataacttctttcgttgatcacttcaagatgcatcaatcttacctttctgaacatttcaagagttctgatggaaggataggcaaacaatctcctttactttttagattatttagtgaattgaatgaattgctttctaccactcagttgcctcattttttgaccatgatcaacgtttctgcggtaatggaaaaaaattctgataagcaagtaatggatttttttaatttaaataactatgattgttctgagggtataataaaaattcaaagggaaagcgaaagtgtaagaagccagttaaaggaagaattggcagaaataagaaaatatctcaaacgtccatatttgaattttagagatgaagttgattacttaatcgaagtgaaaaactctcaaattaaggacttgccagatgattggataaaagttaacaatacgaagatggtcagtagatttaccactcccagaacccagaaattaactcaaaagttggaatattacaaggacttattaattagagaatctgaattacagtataaagaattcttgaacaaaattacggcagaatatacagagctccgtaaaattacactcaatttggcgcagtatgactgtattttgtctttagcagccacatcctgcaacgtaaattatgttagaccaacttttgtgaatggtcaacaagccataatcgcaaaaaatgcaagaaatccaattatcgagtctttagatgttcattatgtaccaaatgatatcatgatgtccccagaaaacggtaaaatcaatattataacggggccgaatatgggtgggaaatcttcttatattagacaagtggcattacttactataatggcacagatcggctcttttgtccccgcagaagagatcagattaagcatatttgaaaacgtactcactagaatcggtgcgcacgatgatattataaacggtgattctacttttaaagtggaaatgcttgatatcttgcacatcttgaaaaattgcaataaaagatctttattattattagacgaagtgggaagaggtactggcacgcacgatggtatagcaatttcttatgctttaataaagtatttttctgagttaagtgactgccccttgatattatttactacccattttcccatgcttggagaaatcaaatctccgttaataaggaattatcatatggattacgtggaagaacaaaaaactggcgaggactggatgagtgtaatttttttatataagttaaaaaagggattgacttataatagttatgggatgaatgtggcgaaattggcacgcttggacaaagatattataaatagagcattcagtatttctgaagaattgagaaaggaatccattaacgaagacgcgttgaaattattcagctctttgaaaagaatattaaaaagtgataatataacagcaacggataaactcgcgaaattattatctttggatatccactga

SEQ ID NO: 1305 - DNA, 6327 bp, Saccharomyces cerevisiae
atgctatcggccacataccgtgatttgaacacagcatctaatttagaaacatcaaaggaaaaacaggccgctcaaatcgtcattgcacaaattagtttattattcacgactcttaacaacgacaattttgaatccgtggaaagagaaattagacatattttagacaggtcgtccgtagatatttacataaaagtttgggaacgattattaaccttaagttctcgggatattttacaagcgggaaaatttttacttcaagaaaatctactacacagactactattagaatttgcgaaggatttaccgaagaaaagcacagaccttattgagcttttgaaagaacgaaccttcaataaccaggagtttcaaaaacaaacaggaattacattatcacttttcattgatctatttgataaatctgcaaacaaggacattatagagtcacttgaccgctcctctcagattaacgatttcaagacaattaagatgaatcatacaaattatttaaggaatttttttcttcaaaccacaccagaaacactagagtccaatctacgcgacttattgcattccttggaaggtgaaagtctaaatgacttattagctcttttactgtccgaaatactttcacctgggtctcagaatttacaaaatgatcccacacggagttggttgacacctccgatggttttagacgcaacgaaccgtgggaacgttatagcaagatctataagttctctgcaagccaaccagataaattggaatcgtgtgtttaatttaatgtcaacaaagtatttcttgagcgcaccattgatgcctactacagcatctttgagttgcttatttgcagcattgcacgatggtccagttattgatgaatttttcagttgcgactggaaagttattttcaaactagatttggccattcaacttcataagtggtcggtacagaatggttgctttgacttattaaatgcagaaggtaccaggaaagtttctgaaaccatcccaaacacaaagcaatctttactctacttattatccattgcatcattgaatttagaattgttcctacaaagggaggaattgtctgatggtcctatgctagcttattttcaagagtgcttctttgaagatttcaactacgcccctgaatatcttattttagcattagtcaaagaaatgaagcggttcgttttattgatagaaaacaggacagtcatagacgaaatacttattaccttattgattcaagtgcataataaatcaccgtcatcgttcaaggacgttatttctacaataaccgatgattctaaaatcgtagatgcagcaaaaatcataatcaactcggatgacgcacctattgccaactttttaaaatcgttgttagatacgggaagattagatacggtcattaataaacttcctttcaatgaagcttttaaaattttgccatgcgcaagacaaattggttgggaggggttcgatactttcttaaaaacaaaagtttctccatctaatgtcgatgtagtgctggaatcactagaggttcaaacgaaaatgactgatacaaacactccatttaggtcattaaagacatttgacttattcgcttttcattcattaattgaagtactgaacaaatgcccactagatgttctccaattacaaaggtttgaatccttggaattttccttattaattgcatttcctagattgatcaattttggttttggacacgatgaagctattttagccaatggtgacatcgcagggattaataatgatattgaaaaggagatgcagaactatttacagaaaatgtatagtggtgagttagccattaaagatgtaatcgaacttctgagaaggttaagagatagcgacttgccaagggaccaggaagtcttcacatgtattacccatgccgttatagcagaatcgacattcttccaagattatccattggatgcattggctactacatctgttctttttggatccatgattctctttcaactgttacgtggattcgtattagacgtcgcatttaggataatcatgaggtttgccaaggagcctccagagtccaagatgtttaagtttgctgtacaagctatttatgcatttaggatacgtttggccgaatatccacagtattgtaaggacctcttgagagatgttccggctttgaagtctcaggctcaagtttaccaatctatcgtcgaagctgctaccctagcaaatgctccaaaggaaaggtcaagacccgtccaggaaatgatcccattaaaattttttgctgtagatgaagtttcatgtcagatcaatcaagaaggtgctcctaaagatgtcgtagaaaaagttctttttgttctcaacaacgttactctggctaacttgaataataaggttgatgaattgaaaaaaagtttgacaccaaattatttttcttggttttccacatatttagttacgcaaagggctaaaacagaacctaactatcatgatctttatagcaaggttatagttgctatggggtcagggttgctacatcagttcatggtcaacgttactttgagacaattatttgtcctactatctacaaaagacgagcaagccatcgataaaaagcacctaaagaatttggcttcatggttaggatgtatcacattagctttgaataaaccaattaaacacaagaatatcgcattcagggaaatgttaatcgaagcttataaggaaaatagacttgaaatagttgtgccttttgtaacaaagattttacaaagggcttctgaatcaaaaattttcaagcctccaaatccctggactgttggcatattaaagctgttgattgagttgaacgaaaaagcaaactggaaattaagtttgactttcgaagttgaggttttattaaaatcttttaatttgaccaccaaatctctcaagccctcgaatttcatcaatactccggaagttatagaaactttatccggtgctttgggatcaatcactctggagcaacaacaaacagagcaacaaaggcaaattatactaatgcaacaacaccagcaacagatgctaatatatcaacagagacaacaacaacaacaacaaaggcaacaacaacaacaacatcatattagtgcaaatacaatcgcagaccaacaagcggcatttggcggcgagggttcaatttcacacgacaatccttttaacaacttacttggttctactatttttgtaacccaccctgacttgaagagggtatttcaaatggctttagccaagtcagttcgcgaaattttgttggaagtagtcgaaaagtcatcaggaattgctgttgttacgacgacaaaaataatacttaaagactttgccactgaagttgatgagtctaagttgaagacggctgcaatcattatggtaaggcatttggcacaaagtttagctcgagctacttcaattgaaccattgaaagaaggcatacgttctactatgcaatcactagcaccgaatttaatgtctctttcttcttcacctgcagaggagcttgacacggcaataaatgaaaatattggcattgctctagttttgattgagaaagcatctatggacaagtctactcaagatttagcagaccaattgatgcaagcgattgctattcgtcgttatcacaaggaaagaagggcagaccaaccatttattacgcaaaataccaatccatattcactgtctttaccagaacctcttggtttgaaaaacactggtgttactcctcaacaattcagggtatacgaagaatttggtaagaatattccaaacttggatgttattccgtttgcaggattgcccgctcacgctccaccgatgactcaaaatgtgggtttaactcagcctcagcaacaacaagcgcaaatgcctacccaaatcctaacctccgaacaaataagagctcaacaacaacagcagcaattacagaaaagccgtttgaatcagccatcccagtcggctcaacctccaggagtgaatgtcccaaatcctcaaggtgggattgctgcagttcaatcagatttggaacagaatcaacgtgttctcgttcacctcatggacattttagtttctcaaattaaagaaaatgctacgaagaataacttagctgaattaggcgatcaaaaccaaattaaaaccatcatttttcaaattttgacattcattgcaaaaagcgcacaaaaggatcaattagctttaaaggtatcccaagctgtcgttaatagcctttttgccactagtgagagtcctctctgcagagaagttttgtccctacttttggaaaagttatgttctttatccctcgttgctagaaaagacgttgtctggtggttagtttatgccttggacagtaggaaattcaatgttcccgttatcagatcccttctagaagttaatttaattgatgctacagaattagataacgttttagttactgcaatgaaaaataaaatggagaactcaactgaatttgctatgaaattaattcagaatactgtcttgtctgatgatccaattttgatgagaatggacttcattaaaaccttagaacacttggcctcttcggaagatgaaaatgtaaagaaattcatcaaagagttcgaagatactaagataatgccagtgaggaaaggtaccaaaaccacaagaacagaaaagctttacttagtatttacggaatgggtaaaattacttcaaagagttgagaataacgacgtaatcacaactgtttttatcaagcaattagtcgaaaagggtgttatcagcgatactgataatttacttacatttgtcaaaagttctcttgagctatcagtttcttcattcaaagaaagtgacccgactgatgaggttttcatcgctattgatgctctaggatcgctaattataaaattgttgattttacagggtttcaaagatgatacaagaagagattacataaatgcaatattttctgtgatcgttttagtgtttgctaaggatcatagccaagagggtaccacattcaatgaacgaccatatttcagactattttctaacatcttatacgaatgggctaccatcaggacgcacaattttgttagaatatctgattccagcactaggcaggagctgatcgaatttgattctgtattttacaacactttctcaggatatttgcacgctctgcaaccatttgccttccctggattctcatttgcatgggtgacactattatcacacagaatgttattaccaattatgctaagattacccaataaaataggttgggaaaagttaatgcttttgattatcgatttgtttaaatttttggaccaatacacaagtaaacatgcagtctctgacgctgtttcggttgtttataagggaacactgcgtgttattttaggcatttcgaatgatatgccatcctttttgattgaaaatcactatgaattaatgaacaatctacctccaacatatttccaactaaagaatgttattttatctgctattcctaagaatatgaccgttcccaacccatatgacgtggatcttaatatggaggatattccagcatgtaaagaactacctgaagtcttctttgatcctgtaattgatttacactcattgaaaaagccagttgacaactacctacgtattccctcaaattcattattaagaacaatactaagcgctatttacaaggatacctatgacataaaaaagggcgtaggctacgactttttatctgttgatagtaaattaattcgcgctattgtattacatgtgggcattgaagctggaatagagtataagagaacttcttcaaatgcggtatttaatacgaagtcttcttattatactttattgttcaatctgattcaaaatggtagcatcgaaatgaaatatcaaattattctgtctattgtggaacaattgcggtatccaaacatccacacctattggttcagctttgtgttaatgaatatgttcaaaagtgacgaatggaatgatcaaaaacttgaagtccaagaaattattttaagaaactttttaaaaagaattattgttaacaaaccacatacctggggtgtttcagttttctttactcagttgataaacaataacgatattaatcttttagacctgccctttgtacaaagtgttcccgaaattaaactaattttacaacaattagtaaaatattccaaaaaatacacaaccagtgaacaagatgaccaatccgccaccatcaatagaaggcaaacccctctacaatccaacgcataa

SEQ ID NO: 1306 - DNA, 6327 bp, Artificial Sequence
  Description of Artificial Sequence: Synthetic polynucleotide
atgctttctgccacataccgtgatttgaacacagcatctaatttagaaacatccaaggaaaaacaggccgctcaaatcgtcattgcacaaattagtttattattcacgactcttaacaacgacaattttgaatccgtggaaagagaaattagacatattttagacaggtcttccgtagatatttacataaaagtttgggaaagattattaaccttaagttctagagatattttacaagcgggaaaatttttacttcaagaaaatttattacacagattattattagaatttgcgaaggatttaccgaagaaaagcacagaccttattgagcttttgaaagaaagaaccttcaataaccaggagtttcaaaaacaaacaggaattacattatctcttttcattgatttatttgataaatctgcaaacaaggacattatagagtctcttgaccgctcctctcagattaacgatttcaagacaattaagatgaatcatacaaattatttaaggaatttttttcttcaaaccacaccagaaacattagagtccaatttacgcgacttattgcattccttggaaggtgaaagtttgaatgacttattagctcttttattatccgaaatactttctcctgggtctcagaatttacaaaatgatcccacaagaagttggttgacacctccgatggttttagacgcaacgaaccgtgggaacgttatagcaagatctataagttctttacaagccaaccagataaattggaatcgtgtgtttaatttaatgtctacaaagtatttcttgagcgcaccattgatgcctactacagcatctttgagttgcttatttgcagcattgcacgatggtccagttattgatgaatttttcagttgcgactggaaagttattttcaaattggatttggccattcaacttcataagtggtctgtacagaatggttgctttgacttattaaatgcagaaggtaccaggaaagtttctgaaaccatcccaaacacaaagcaatctttactctacttattatccattgcaagtttgaatttagaattgttcttacaaagggaggaattgtctgatggtcctatgttggcttattttcaagagtgcttctttgaagatttcaactacgcccctgaatatcttattttagcattagtcaaagaaatgaagagattcgttttattgatagaaaacaggacagtcatagacgaaatacttattaccttattgattcaagtgcataataaatctccgtcttctttcaaggacgttatttctacaataaccgatgattctaaaatcgtagatgcagcaaaaatcataatcaacagtgatgacgcacctattgccaactttttaaaatctttgttagatacgggaagattagatacggtcattaataaacttcctttcaatgaagcttttaaaattttgccatgcgcaagacaaattggttgggaggggttcgatactttcttaaaaacaaaagtttctccatctaatgtcgatgtagtgttggaatctttggaggttcaaacgaaaatgactgatacaaacactccatttaggtctttaaagacatttgacttattcgcttttcattctttaattgaagtattgaacaaatgcccattagatgttctccaattacaaaggtttgaatccttggaattttccttattaattgcatttcctagattgatcaattttggttttggacacgatgaagctattttagccaatggtgacatcgcagggattaataatgatattgaaaaggagatgcagaactatttacagaaaatgtatagtggtgagttagccattaaagatgtaatcgaacttttgagaaggttaagagatagcgacttgccaagggaccaggaagtcttcacatgtattacccatgccgttatagcagaatctacattcttccaagattatccattggatgcattggctactacatctgttctttttggatccatgattctctttcaattattacgtggattcgtattagacgtcgcatttaggataatcatgaggtttgccaaggagcctccagagtccaagatgtttaagtttgctgtacaagctatttatgcatttaggatacgtttggccgaatatccacagtattgtaaggacctcttgagagatgttccggctttgaagtctcaggctcaagtttaccaatctatcgtcgaagctgctaccttggcaaatgctccaaaggaaaggagcagacccgtccaggaaatgatcccattaaaattttttgctgtagatgaagtttcttgtcagatcaatcaagaaggtgctcctaaagatgtcgtagaaaaagttctttttgttctcaacaacgttactttggctaacttgaataataaggttgatgaattgaaaaaaagtttgacaccaaattatttttcttggttttccacatatttagttacgcaaagggctaaaacagaacctaactatcatgatctttatagcaaggttatagttgctatggggtctgggttgttgcatcagttcatggtcaacgttactttgagacaattatttgtcttgttatctacaaaagacgagcaagccatcgataaaaagcacttgaagaatttggcttcttggttaggatgtatcacattagctttgaataaaccaattaaacacaagaatatcgcattcagggaaatgttaatcgaagcttataaggaaaatagacttgaaatagttgtgccttttgtaacaaagattttacaaagggcttctgaaagtaaaattttcaagcctccaaatccctggactgttggcatattaaagttgttgattgagttgaacgaaaaagcaaactggaaattaagtttgactttcgaagttgaggttttattaaaatcttttaatttgaccaccaaatctctcaagccctccaatttcatcaatactccggaagttatagaaactttatccggtgctttgggatctatcactttagagcaacaacaaacagagcaacaaaggcaaattatattaatgcaacaacaccagcaacagatgttgatatatcaacagagacaacaacaacaacaacaaaggcaacaacaacaacaacatcatattagtgcaaatacaatcgcagaccaacaagcggcatttggcggcgagggttccatttctcacgacaatccttttaacaacttacttggttctactatttttgtaacccaccctgacttgaagagggtatttcaaatggctttagccaagtctgttcgcgaaattttgttggaagtagtcgaaaagagtagtggaattgctgttgttacgacgacaaaaataatacttaaagactttgccactgaagttgatgagtctaagttgaagacggctgcaatcattatggtaaggcatttggcacaaagtttagctagagctacttctattgaaccattgaaagaaggcatacgttctactatgcaatctttggcaccgaatttaatgtctctttcttcttctcctgcagaggagcttgacacggcaataaatgaaaatattggcattgctttggttttgattgagaaagcatctatggacaagtctactcaagatttagcagaccaattgatgcaagcgattgctattcgtcgttatcacaaggaaagaagggcagaccaaccatttattacgcaaaataccaatccatattctttatctttaccagaacctcttggtttgaaaaacactggtgttactcctcaacaattcagggtatacgaagaatttggtaagaatattccaaacttggatgttattccgtttgcaggattgcccgctcacgctccaccgatgactcaaaatgtgggtttaactcagcctcagcaacaacaagcgcaaatgcctacccaaatcttgacctccgaacaaataagagctcaacaacaacagcagcaattacagaaaagccgtttgaatcagccatcccagtctgctcaacctccaggagtgaatgtcccaaatcctcaaggtgggattgctgcagttcaatctgatttggaacagaatcaacgtgttctcgttcacctcatggacattttagtttctcaaattaaagaaaatgctacgaagaataacttagctgaattaggcgatcaaaaccaaattaaaaccatcatttttcaaattttgacattcattgcaaaaagcgcacaaaaggatcaattagctttaaaggtatcccaagctgtcgttaatagcctttttgccactagtgagagtcctctctgcagagaagttttgtccttacttttggaaaagttatgttctttatccctcgttgctagaaaagacgttgtctggtggttagtttatgccttggacagtaggaaattcaatgttcccgttatcagatcccttttagaagttaatttaattgatgctacagaattagataacgttttagttactgcaatgaaaaataaaatggagaactctactgaatttgctatgaaattaattcagaatactgtcttgtctgatgatccaattttgatgagaatggacttcattaaaaccttagaacacttggcctcttctgaagatgaaaatgtaaagaaattcatcaaagagttcgaagatactaagataatgccagtgaggaaaggtaccaaaaccacaagaacagaaaagctttacttagtatttacggaatgggtaaaattacttcaaagagttgagaataacgacgtaatcacaactgtttttatcaagcaattagtcgaaaagggtgttatcagcgatactgataatttacttacatttgtcaaaagttctcttgagttaagtgtttcttctttcaaagaaagtgacccgactgatgaggttttcatcgctattgatgctttaggatctttgattataaaattgttgattttacagggtttcaaagatgatacaagaagagattacataaatgcaatattttctgtgatcgttttagtgtttgctaaggatcatagccaagagggtaccacattcaatgaaagaccatatttcagattattttctaacatcttatacgaatgggctaccatcaggacgcacaattttgttagaatatctgattccagcactaggcaggagttgatcgaatttgattctgtattttacaacactttcagtggatatttgcacgctttacaaccatttgccttccctggattctcctttgcatgggtgacattattatcccacagaatgttattaccaattatgttgagattacccaataaaataggttgggaaaagttaatgcttttgattatcgatttgtttaaatttttggaccaatacacaagtaaacatgcagtctctgacgctgtttctgttgtttataagggaacattacgtgttattttaggcatttctaatgatatgccatcctttttgattgaaaatcactatgaattaatgaacaatttacctccaacatatttccaattgaagaatgttattttatctgctattcctaagaatatgaccgttcccaacccatatgacgtggatcttaatatggaggatattccagcatgtaaagaattacctgaagtcttctttgatcctgtaattgatttacactctttgaaaaagccagttgacaactacttgcgtattccctccaattctttattaagaacaatattaagcgctatttacaaggatacctatgacataaaaaagggcgtaggctacgactttttatctgttgatagtaaattaattcgcgctattgtattacatgtgggcattgaagctggaatagagtataagagaacttcttccaatgcggtatttaatacgaagtcttcttattatactttattgttcaatttaattcaaaatggtagcatcgaaatgaaatatcaaattattttatctattgtggaacaattgagatatccaaacatccacacctattggttcagctttgtgttaatgaatatgttcaaaagtgacgaatggaatgatcaaaaacttgaagtccaagaaattattttaagaaactttttaaaaagaattattgttaacaaaccacatacctggggtgtttctgttttctttactcagttgataaacaataacgatattaatcttttagacttgccctttgtacaaagtgttcccgaaattaaattgattttacaacaattagtaaaatattccaaaaaatacacaaccagtgaacaagatgaccaatccgccaccatcaatagaaggcaaacccctttacaatccaacgcatga

SEQ ID NO: 1307 - DNA, 1176 bp, Saccharomyces cerevisiae
atggtttcattgttcaaaagaggtaaggctccaccgctcacgaaagaaggccccacttctaaaaagcctcctaacacagcgtttagacaacaaaggcttaaggcatggcaaccaatactgtctcctcaaagtgtgcttccgttgttaatattcgttgcatgtatatttactcctattggtattggactcattgtaagcgctactaaggtacaagatctaacaattgattatagtcattgtgatacaaaagcatctacaactgcttttgaagatataccaaagaagtacattaaatatcactttaaaagtaaagttgaaaataaaccacaatggaggctaaccgaaaatgaaaatggcgaacaatcatgcgaactgcagttcgaaatcccaaacgatatcaagaaatccatttttatatattataaaataaccaatttttatcaaaatcatcgcagatatgtccaatcgtttgacacaaagcaaatattaggggagcctatcaaaaaagatgatctggatacaagctgtagtccaataagaagtagggaagacaaaataatatatccctgtgggttgatcgctaattccatgtttaatgatacattttctcaggtgttgagtggtatagatgacacagaagactataatttaactaacaagcatatatcatggagtattgatcgtcacagatttaaaaccaccaagtataatgctagcgatattgttccaccgccaaactggatgaagaagtatcccgatgggtatacagatgaaaatcttcctgatatccatacttgggaagagttccaggtatggatgaggactgcagcctttcccaagttttacaagttgacgttgaaaaatgaatctgcttctttaccgaagggtaaatatcaaatgaacattgagttgaattatccgatttcactctttggtggcacaaaatcatttgtactgactacaaatggagctattggtggtagaaatatgtcactaggcgtactgtacctcatcgttgcagggctttgcgccttatttggcatcatttttttggttaaattaatcttccaaccaagagcgatgggtgatcacacttatttgaattttgatgatgaagaaaacgaggattatgaggatgtacacgcagagaatacaacattgagggaaattttatag

SEQ ID NO: 1308 - DNA, 1176 bp, Artificial Sequence
  Description of Artificial Sequence: Synthetic polynucleotide
atggtttctttgttcaaaagaggtaaggctccaccgctcacgaaagaaggccccacttctaaaaagcctcctaacacagcgtttagacaacaaaggcttaaggcatggcaaccaatattatctcctcaaagtgtgcttccgttgttaatattcgttgcatgtatatttactcctattggtattggactcattgtaagcgctactaaggtacaagatttaacaattgattatagtcattgtgatacaaaagcatctacaactgcttttgaagatataccaaagaagtacattaaatatcactttaaaagtaaagttgaaaataaaccacaatggaggttgaccgaaaatgaaaatggcgaacaaagttgcgaattacagttcgaaatcccaaacgatatcaagaaatccatttttatatattataaaataaccaatttttatcaaaatcatcgcagatatgtccaaagttttgacacaaagcaaatattaggggagcctatcaaaaaagatgatttggatacaagctgtagtccaataagaagtagggaagacaaaataatatatccctgtgggttgatcgctaattccatgtttaatgatacattttctcaggtgttgagtggtatagatgacacagaagactataatttaactaacaagcatatatcttggagtattgatcgtcacagatttaaaaccaccaagtataatgctagcgatattgttccaccgccaaactggatgaagaagtatcccgatgggtatacagatgaaaatcttcctgatatccatacttgggaagagttccaggtatggatgaggactgcagcctttcccaagttttacaagttgacgttgaaaaatgaatctgcttctttaccgaagggtaaatatcaaatgaacattgagttgaattatccgatttctctctttggtggcacaaaaagttttgtattgactacaaatggagctattggtggtagaaatatgtctttaggcgtattgtacctcatcgttgcagggctttgcgccttatttggcatcatttttttggttaaattaatcttccaaccaagagcgatgggtgatcacacttatttgaattttgatgatgaagaaaacgaggattatgaggatgtacacgcagagaatacaacattgagggaaattttatga

SEQ ID NO: 1309 - DNA, 1089 bp, Saccharomyces cerevisiae
atgctggttccacctgctaactttgggattgctgaagaaggaatatatagatgttctaaagtggagacattaaatttatcctttctggaaactctcaatttaaagacagctatatttattggaggtcaagaaccatccaagtttttcaaagattttttcacaagatcatccataaaatggattgttttaaggatgtctgatttctcggctgcggcagttccggtaaaaagctcttctgtatctaacgcaaatttatattcgaataataacagtactctatcattacaggaagaaaagaaaaaatccactgcaaatgggtcacaaaattctactacaggggatcctgtaattcaggaggaattggcttaccacttgactgacaatgatgacttaatgctgattaagagcacgtgtttaaaaagaactttcaaaacattattgaatgtggataattataatgttttattggtagataagaccgcgttggtcattggtatacttcgaaaaattcagaaatggaatattgcatcaatcataaatgagtacagattattttctggtaagaatagaaattattttgcggaaacatttctagaaataattaacattgagatagaacaggagaaggataataagacaattgtggacaacaaagcaaaaaaattgccccttgagaataataggacgcattcgatagagtataaggccaattctggcaaacttattagagtaaatgaagatgacctttgcagagagccagaagtgcctcagcggcttttgacattaataaatcaaatcgaaaccaaagtgaaaaataataaagtattacaagtaagtggagttctaggagacgatttgaagaaaacctcttctgacctaggaatttttggccataggtatagattagcatttaataaaaaagaaaatggagattatggctattataaagcaaggggaaaagataacgtcaaaataaggataccctgtgattctgaattaccagattggttcaggtttcaacgagatttgtgggaaaaagaaaacgttccggaagagcatcacttttatagggaacatatttttacatag

SEQ ID NO: 1310 - DNA, 1089 bp, Artificial Sequence
  Description of Artificial Sequence: Synthetic polynucleotide
atgcttgttccacctgctaactttgggattgctgaagaaggaatatatagatgttctaaagtggagacattaaatttatcctttttggaaactctcaatttaaagacagctatatttattggaggtcaagaaccatccaagtttttcaaagattttttcacaagaagttccataaaatggattgttttaaggatgtctgatttcagtgctgcggcagttccggtaaaaagctcttctgtatctaacgcaaatttatattctaataataacagtactttatctttacaggaagaaaagaaaaaatccactgcaaatgggagccaaaattctactacaggggatcctgtaattcaggaggaattggcttaccacttgactgacaatgatgacttaatgttgattaagagcacgtgtttaaaaagaactttcaaaacattattgaatgtggataattataatgttttattggtagataagaccgcgttggtcattggtatacttagaaaaattcagaaatggaatattgcatctatcataaatgagtacagattattttctggtaagaatagaaattattttgcggaaacatttttggaaataattaacattgagatagaacaggagaaggataataagacaattgtggacaacaaagcaaaaaaattgccccttgagaataataggacgcattccatagagtataaggccaattctggcaaacttattagagtaaatgaagatgacctttgcagagagccagaagtgcctcagagacttttgacattaataaatcaaatcgaaaccaaagtgaaaaataataaagtattacaagtaagtggagttttaggagacgatttgaagaaaacctcttctgacttgggaatttttggccataggtatagattagcatttaataaaaaagaaaatggagattatggctattataaagcaaggggaaaagataacgtcaaaataaggataccctgtgattctgaattaccagattggttcaggtttcaaagagatttgtgggaaaaagaaaacgttccggaagagcatcacttttatagggaacatatttttacatga

SEQ ID NO: 1311 - DNA, 159 bp, Saccharomyces cerevisiae
atgacagttctaatcaagttgggtctaaggatattgcatgtatacaaaggattctttcggaaagtaatcctgaaatatttttttttttcgtctgaacatacgaaagtaaataaaaaaagttcaatgcatgccttcctatgcaagatttataaaaggtga

SEQ ID NO: 1312 - DNA, 159 bp, Artificial Sequence
  Description of Artificial Sequence: Synthetic polynucleotide
atgacagttttgatcaagttgggtttgaggatattgcatgtatacaaaggattctttagaaaagtaatcttgaaatatttttttttttcttctgaacatacgaaagtaaataaaaaaagttctatgcatgccttcttgtgcaagatttataaaaggtga

SEQ ID NO: 1313 - DNA, 360 bp, Saccharomyces cerevisiae
atgcgcagcatagaaaacgatagaagtaattatcaacttacacagaaaaataaatcggcggatgggttggtatttaatgtggtaactcaagatatgataaacaaaagtactaaaccttacagaggacaccggtttacaaaagaaaatgtccgaatactagaaagttggtttgcaaagaacatcgagaacccatatctagataccaagggcctagagaatctaatgaagaataccagtttatctcgcattcaaatcaaaaactgggtttcgaatagaagaagaaaagaaaaaacaataacaatcgctccagaattagcggacctcttgagcggtgagcctctggcaaagaagaaagaatga

SEQ ID NO: 1314 - DNA, 360 bp, Artificial Sequence
  Description of Artificial Sequence: Synthetic polynucleotide
atgcgcagcatagaaaacgatagaagtaattatcaacttacacagaaaaataaatctgcggatgggttggtatttaatgtggtaactcaagatatgataaacaaaagtactaaaccttacagaggacacagatttacaaaagaaaatgtcagaatattggaaagttggtttgcaaagaacatcgagaacccatatttggataccaagggcttagagaatttaatgaagaataccagtttatctcgcattcaaatcaaaaactgggtttctaatagaagaagaaaagaaaaaacaataacaatcgctccagaattagcggacctcttgagcggtgagcctttggcaaagaagaaagaatga

SEQ ID NO: 1315 - DNA, 381 bp, Saccharomyces cerevisiae
atggatgatatttgtagtatggcggaaaacataaacagaactctgtttaacattctaggtactgagattgatgaaatcaatctcaatactaataatctttataattttataatggaaagtaatttgactaaagtagagcaacatacattacacaaaaatatttctaacaataggttagaaatataccaccacattaaaaaagagaagagcccaaagggaaaatcatcaatatcaccccaagcacgggcatttttagaacaggtttttagaagaaagcaaagccttaattccaaggaaaaagaagaagttgcaaagaaatgtggcattactccacttcaagtaagagtttggttcataaataaacgtatgagatctaaataa

SEQ ID NO: 1316 - DNA, 381 bp, Artificial Sequence
  Description of Artificial Sequence: Synthetic polynucleotide
atggatgatatttgtagtatggcggaaaacataaacagaactttatttaacattttgggtactgagattgatgaaatcaatctcaatactaataatctttataattttataatggaaagtaatttgactaaagtagagcaacatacattacacaaaaatatttctaacaataggttagaaatataccaccacattaaaaaagagaagagcccaaagggaaaatcttctatatctccccaagcaagagcatttttagaacaggtttttagaagaaagcaaagccttaattccaaggaaaaagaagaagttgcaaagaaatgtggcattactccacttcaagtaagagtttggttcataaataaacgtatgagatctaaatga

SEQ ID NO: 1317 - DNA, 1557 bp, Saccharomyces cerevisiae
atggaagacaaagatatcacatcggtaaatgagaaggaagtgaacgagaacactaatcctagaataataaaatatgatgccgagaggcgtgcaacccgtactgaaacctcaaagaaagataaatggaaaaacatagttacaatcattgcgtccggttttgctctgataagtgatggttacgtaaatggttcaatgagtatgctaaacaaggtttttgttatggagtacggtaagaaaaactatagctcaaaagtgtcgactagagtttccaacgcagccctagttggtattatttttggccaattctttatgggtatcgctgctgattattatagtagaaaatcttgtatccttgtggccactgctatcttggttattggtagtgctctgtgtgctgcctctcacggtactactgtacctggcatgttttggatgttaacagttatgagaggtttggtaggtattggtgttggtgcagaatatcctaccagtacattaagtgctaatgagtctgctaatgaatataccactaccaaaagaggtggtatcctggttatggtgacaaatttgccactagccttcggtggtccatttgctacgatcatctttttaatcgtctacaaaatctgttcaggaacaaaacatttagaggcgatctggaggactgtttttgcaatagggtgcttctggccattgagtgtgttctattttagatggaagactgctactacagaagtctatgaaaaaggtagaatcaagagaaatataccatatttcctagcattgaaattttattggaaaaggttacttggtacatgtggtacatggtttatgtatgattttgttaccttcccaaatggtattttcagttcaacaattatcagttccgttatcaaggaccaaaatgatttagtaaaagtggcagagtggaacttactgttgggagttttagctgtactgggtgtaccaattggtgcttatctgtccgatcgtattggtcgtaaatatacgttgatgtttggtttctctgggtacatcatctttggtctaatcattggatgtgcgtacgaccaattgaaaaaaatcacccccttgtttattatcttctacgcattcatgaatatgttaggtaatgctggaccaggtgatatgcttggtgttattagtagtgaagcgtcagcaaccgctgttagaggtgttttctatggtttatctgctgtgactggtaaaatcggttctgtagtaggcgtcgaatgtttccaacccattagggataatttgggtgcaagatggacttttattattgctgcaatttgtggtcttattggtatcattattacatatttctttgttccacattctcttgaaagcgatttaatgaagcaagacgttgaatttcacaactatttggtatccaatggctggactggtaagatgggatttgatgagacagatgaagaatcaatggttagaactattgaagttgaagagaatggtactaattgtagtaagaaaaacgcagaaataatttcagtcagacaggtcgatcaaagttga

SEQ ID NO: 1318 - DNA, 1557 bp, Artificial Sequence
  Description of Artificial Sequence: Synthetic polynucleotide
atggaagacaaagatatcacatctgtaaatgagaaggaagtgaacgagaacactaatcctagaataataaaatatgatgccgagaggcgtgcaacccgtactgaaacctccaagaaagataaatggaaaaacatagttacaatcattgcgtccggttttgctttaataagtgatggttacgtaaatggttctatgagtatgttgaacaaggtttttgttatggagtacggtaagaaaaactatagcagtaaagtgtccactagagtttccaacgcagccttagttggtattatttttggccaattctttatgggtatcgctgctgattattatagtagaaaatcttgtatccttgtggccactgctatcttggttattggtagtgctctttgtgctgcctctcacggtactactgtacctggcatgttttggatgttaacagttatgagaggtttggtaggtattggtgttggtgcagaatatcctaccagtacattaagtgctaatgagtctgctaatgaatataccactaccaaaagaggtggtatcttggttatggtgacaaatttgccattggccttcggtggtccatttgctacgatcatctttttaatcgtctacaaaatctgttctggaacaaaacatttagaggcgatctggaggactgtttttgcaatagggtgcttctggccattgagtgtgttctattttagatggaagactgctactacagaagtctatgaaaaaggtagaatcaagagaaatataccatatttcttggcattgaaattttattggaaaaggttacttggtacatgtggtacatggtttatgtatgattttgttaccttcccaaatggtattttcagttctacaattatcagttccgttatcaaggaccaaaatgatttagtaaaagtggcagagtggaacttattattgggagttttagctgtattgggtgtaccaattggtgcttatttatccgatcgtattggtcgtaaatatacgttgatgtttggtttctctgggtacatcatctttggtttgatcattggatgtgcgtacgaccaattgaaaaaaatcacccccttgtttattatcttctacgcattcatgaatatgttaggtaatgctggaccaggtgatatgcttggtgttattagtagtgaagcgtctgcaaccgctgttagaggtgttttctatggtttatctgctgtgactggtaaaatcggttctgtagtaggcgtcgaatgtttccaacccattagggataatttgggtgcaagatggacttttattattgctgcaatttgtggtcttattggtatcattattacatatttctttgttccacattctcttgaaagcgatttaatgaagcaagacgttgaatttcacaactatttggtatccaatggctggactggtaagatgggatttgatgagacagatgaagaaagtatggttagaactattgaagttgaagagaatggtactaattgtagtaagaaaaacgcagaaataatttctgtcagacaggtcgatcaaagttga

SEQ ID NO: 1319 - DNA, 468 bp, Saccharomyces cerevisiae
atgcgatcgatttttctgctgcattttgactataaaacgtgtgaagaggaagatttcgaagactggaatttggcagatgggaaatgccttaatggcgccaaatacatgtataaaaggaggaaacaggacgcccgttgtttggtaaaaaggacattcaaagatatgattttgcatgaaataccttgtgacagttgtactgaatccgactacgaatgctcttctgaatttgttagagatgcaaagggtgactgtataccagattatgatcagattgccctttccgatatatgtgacaaagctaatggcgaaactgtatcattagagccattacaattaattaaaggagataaatgcaaaaagcccatggaaattgaggccatgaacattccatgtgaaaaaatcctgagggagagctcgaatggtaagaaaatagcaaccattgaaaacaagtttgactttgaaatttaa

SEQ ID NO: 1320 - DNA, 468 bp, Artificial Sequence
  Description of Artificial Sequence: Synthetic polynucleotide
atgaggtctatttttttattacattttgactataaaacgtgtgaagaggaagatttcgaagactggaatttggcagatgggaaatgccttaatggcgccaaatacatgtataaaaggaggaaacaggacgcccgttgtttggtaaaaaggacattcaaagatatgattttgcatgaaataccttgtgacagttgtactgaatccgactacgaatgctcttctgaatttgttagagatgcaaagggtgactgtataccagattatgatcagattgccctttccgatatatgtgacaaagctaatggcgaaactgtatctttagagccattacaattaattaaaggagataaatgcaaaaagcccatggaaattgaggccatgaacattccatgtgaaaaaatcttgagggagagcagtaatggtaagaaaatagcaaccattgaaaacaagtttgactttgaaatttga

SEQ ID NO: 1321 - DNA, 951 bp, Saccharomyces cerevisiae
atgtcatctacggacatctggatatccaatgatgcatctacttttcaaaaggcacagctgcctactcaattacggcacgtcaaagtgattaaaattcgtgaagattctatcggaaggatcatccttcttatatcgacagaaatcacaaatgaggaaaatgctgatccagatctctcagagattttcatatcagattcgcaagggttgaaattctcacctgttgaatggacaccaaaccatcagtttggaaattttaggctcacttttcctgatttcttgaaagggacaatatttggatcgtttcatccttccattgactattctaatcaccaagtaaactatactgaaaatatagccggaggagaaaccaaaatatccgttgataacggcctcacatggtcaaatttgaaagttgttgatgaagaaaatgccgattcgttcggctgtgatatcactaggcctgagagatgttcacttcagggttatttttacaatctaaaactttcaaatccttctgctgggatcatattaatgacaggttctgttggcgatgacaatgaattcgatcggaaggaccgaaaaactttcatttctagagacggtggtctaacatggagggtggcccataattcttctggattatatgctactggtgatctgggaaatattattgtatatatcccgtctccttcatataaagatggtgatgtacaatccaaactttatttttccttggaccaaggtagaacatggaatcaatatgagcttgttgacgctttattttatatccatccattagagttgattaatacaacgccagatggatcaggctcaaaatttattttaagcggacatctcattactacggctagtcaagaaggaaacaacaccaacatctcatatattgcaagaagtgtcctgtatgcgatcgatttttctgctgcattttga

SEQ ID NO: 1322 - DNA, 951 bp, Artificial Sequence
  Description of Artificial Sequence: Synthetic polynucleotide
atgtcttctacggacatctggatatccaatgatgcatctacttttcaaaaggcacagttgcctactcaattaagacacgtcaaagtgattaaaattcgtgaagattctatcggaaggatcatccttcttatatctacagaaatcacaaatgaggaaaatgctgatccagatctcagtgagattttcatatctgattctcaagggttgaaattcagtcctgttgaatggacaccaaaccatcagtttggaaattttaggctcacttttcctgatttcttgaaagggacaatatttggaagttttcatccttccattgactattctaatcaccaagtaaactatactgaaaatatagccggaggagaaaccaaaatatccgttgataacggcctcacatggtctaatttgaaagttgttgatgaagaaaatgccgattctttcggctgtgatatcactaggcctgagagatgttctcttcagggttatttttacaatttgaaactttctaatccttctgctgggatcatattaatgacaggttctgttggcgatgacaatgaattcgatagaaaggacagaaaaactttcatttctagagacggtggtttaacatggagggtggcccataattcttctggattatatgctactggtgatttgggaaatattattgtatatatcccgtctccttcttataaagatggtgatgtacaatccaaactttatttttccttggaccaaggtagaacatggaatcaatatgagcttgttgacgctttattttatatccatccattagagttgattaatacaacgccagatggatctggctctaaatttattttaagcggacatctcattactacggctagtcaagaaggaaacaacaccaacatcagttatattgcaagaagtgtcctttatgcgatcgatttttctgctgcattttga

SEQ ID NO: 1323 - DNA, 549 bp, Saccharomyces cerevisiae
atgatattacttcatgccatatatactctttgggtaattatactacttccgctactcaatgcagagaaatttgtcccaaaagtaacggaggctcctatagaaacatcatttaatctagtgagttttgatgattccaacacttctatcagattagatggttggggggttgtatggataagtttcgacgctggagaaaattgggaaacggtcaaagaaattgaagagcgcattttcagatttactgttgatcctttccatggacaggaaagaggtttcgcttttatatgtgaatcacccaaattctacattaccgacgaccgtggggagtcatggagggctttaactataccctcatcagaagaatatttagatggcgactgttttataactactcatcctagaaacaaagaacttcttattgcgaattgctatagctatatgatagacgcagacgttttatatgacccaagtgaaatttacttgagcaatgatgggaatccttttttaaaattaaaccttccttggaaaagaaaaaagacgacgatataa

SEQ ID NO: 1324 - DNA, 549 bp, Artificial Sequence
  Description of Artificial Sequence: Synthetic polynucleotide
atgatattacttcatgccatatatactctttgggtaattatattacttccgttgctcaatgcagagaaatttgtcccaaaagtaacggaggctcctatagaaacatcttttaatttggtgagttttgatgattccaacacttctatcagattagatggttggggggttgtatggataagtttcgacgctggagaaaattgggaaacggtcaaagaaattgaagagcgcattttcagatttactgttgatcctttccatggacaggaaagaggtttcgcttttatatgtgaaagtcccaaattctacattaccgacgaccgtggggagagttggagggctttaactataccctcttctgaagaatatttagatggcgactgttttataactactcatcctagaaacaaagaacttcttattgcgaattgctatagctatatgatagacgcagacgttttatatgacccaagtgaaatttacttgagcaatgatgggaatccttttttaaaattaaaccttccttggaaaagaaaaaagacgacgatatga

SEQ ID NO: 1325 - DNA, 1107 bp, Saccharomyces cerevisiae
atgaaggctgtcgtcattgaagacggtaaagcggttgtcaaagagggcgttcccattcctgaattggaagaaggattcgtattgattaagacactcgctgttgctggtaacccgactgattgggcacacattgactacaaggtcgggcctcaaggatctattctgggatgtgacgctgccggccaaattgtcaaattgggcccagccgtcgatcctaaagacttttctattggtgattatatttatgggttcattcacggatcttccgtaaggtttccttccaatggtgcttttgctgaatattctgctatttcaactgtggttgcctacaaatcacccaatgaactcaaatttttgggtgaagatgttctacctgccggccctgtcaggtctttggaaggggcagccactatcccagtgtcactgaccacagctggcttggtgttgacctataacttgggcttgaacctgaagtgggagccatcaaccccacaaagaaacggccccatcttattatggggcggtgcaactgcagtaggtcagtcgctcatccaattagccaataaattgaatggcttcaccaagatcattgttgtggcttctcggaaacacgaaaaactgttgaaagaatatggtgctgatcaactatttgattaccatgatattgacgtggtagaacaaattaaacacaagtacaacaatatctcgtatttagtcgactgtgtcgcgaatcaaaatacgcttcaacaagtgtacaaatgtgcggccgataaacaggatgctaccgttgtcgaattaactaatttgacagaagaaaacgtcaaaaaggagaataggaggcaaaatgtcactattgacagaacaagactgtattcaataggcggccatgaagtaccatttggtggcattactttccctgctgacccagaagccaggagagctgccaccgaattcgtcaagttcatcaatccaaagattagtgatgggcaaattcaccatattccagcaagggtctataagaacgggctttacgatgttcctcgtatcctggaagacattaaaatcggtaagaactctggtgaaaaactagttgccgtattaaactag

SEQ ID NO: 1326 - DNA, 1107 bp, Artificial Sequence
  Description of Artificial Sequence: Synthetic polynucleotide
atgaaggctgtcgtcattgaagacggtaaagcggttgtcaaagagggcgttcccattcctgaattggaagaaggattcgtattgattaagacactcgctgttgctggtaacccgactgattgggcacacattgactacaaggtcgggcctcaaggatctattttaggatgtgacgctgccggccaaattgtcaaattgggcccagccgtcgatcctaaagacttttctattggtgattatatttatgggttcattcacggatcttccgtaaggtttccttccaatggtgcttttgctgaatattctgctatttctactgtggttgcctacaaaagtcccaatgaactcaaatttttgggtgaagatgttttacctgccggccctgtcaggtctttggaaggggcagccactatcccagtgtctttaaccacagctggcttggtgttgacctataacttgggcttgaacttgaagtgggagccatctaccccacaaagaaacggccccatcttattatggggcggtgcaactgcagtaggtcagagcctcatccaattagccaataaattgaatggcttcaccaagatcattgttgtggcttctagaaaacacgaaaaacttttgaaagaatatggtgctgatcaattatttgattaccatgatattgacgtggtagaacaaattaaacacaagtacaacaatatcagttatttagtcgactgtgtcgcgaatcaaaatacgcttcaacaagtgtacaaatgtgcggccgataaacaggatgctaccgttgtcgaattaactaatttgacagaagaaaacgtcaaaaaggagaataggaggcaaaatgtcactattgacagaacaagattatattctataggcggccatgaagtaccatttggtggcattactttccctgctgacccagaagccaggagagctgccaccgaattcgtcaagttcatcaatccaaagattagtgatgggcaaattcaccatattccagcaagggtctataagaacgggctttacgatgttcctcgtatcttggaagacattaaaatcggtaagaactctggtgaaaaattggttgccgtattaaactga

SEQ ID NO: 1327 - DNA, 375 bp, Saccharomyces cerevisiae
atggtcaaattaacttcaatcgctgctggtgttgccgccatcgctgccggtattgccgctgccccagccactaccactctatctccatctgacgaaagggtcaacttggtcgaattgggtgtttacgtctccgatatcagagctcatttggctcaatactacttgtttcaagcagctcatccaactgagacctacccagttgagattgctgaagctgttttcaactatggtgacttcaccactatgttgactggtattccagctgaacaagtcaccagagtcatcactggtgtcccatggtactccactagattgagaccagccatctccagtgctctatctaaggacggtatctacactgctattccaaaatag

SEQ ID NO: 1328 - DNA, 375 bp, Artificial Sequence
  Description of Artificial Sequence: Synthetic polynucleotide
atggtcaaattaacttctatcgctgctggtgttgccgccatcgctgccggtattgccgctgccccagccactaccactttatctccatctgacgaaagggtcaacttggtcgaattgggtgtttacgtctccgatatcagagctcatttggctcaatactacttgtttcaagcagctcatccaactgagacctacccagttgagattgctgaagctgttttcaactatggtgacttcaccactatgttgactggtattccagctgaacaagtcaccagagtcatcactggtgtcccatggtactccactagattgagaccagccatctccagtgctttatctaaggacggtatctacactgctattccaaaatga

SEQ ID NO: 1329 - DNA, 1086 bp, Saccharomyces cerevisiae
atgctttacccagaaaaatttcagggcatcggtatttccaacgcaaaggattggaagcatcctaaattagtgagttttgacccaaaaccctttggcgatcatgacgttgatgttgaaattgaagcctgtggtatctgcggatctgattttcatatagccgttggtaattggggtccagtcccagaaaatcaaatccttggacatgaaataattggccgcgtggtgaaggttggatccaagtgccacactggggtaaaaatcggtgaccgtgttggtgttggtgcccaagccttggcgtgttttgagtgtgaacgttgcaaaagtgacaacgagcaatactgtaccaatgaccacgttttgactatgtggactccttacaaggacggctacatttcacaaggaggctttgcctcccacgtgaggcttcatgaacactttgctattcaaataccagaaaatattccaagtccgctagccgctccattattgtgtggtggtattacagttttctctccactactaagaaatggctgtggtccaggtaagagggtaggtattgttggcatcggtggtattgggcatatggggattctgttggctaaagctatgggagccgaggtttatgcgttttcgcgaggccactccaagcgggaggattctatgaaactcggtgctgatcactatattgctatgttggaggataaaggctggacagaacaatactctaacgctttggaccttcttgtcgtttgctcatcatctttgtcgaaagttaattttgacagtatcgttaagattatgaagattggaggctccatcgtttcaattgctgctcctgaagttaatgaaaagcttgttttaaaaccgttgggcctaatgggagtatcaatctcaagcagtgctatcggatctaggaaggaaatcgaacaactattgaaattagtttccgaaaagaatgtcaaaatatgggtggaaaaacttccgatcagcgaagaaggcgtcagccatgcctttacaaggatggaaagcggagacgtcaaatacagatttactttggtcgattatgataagaaattccataaatag

SEQ ID NO: 1330 - DNA, 1086 bp, Artificial Sequence
  Description of Artificial Sequence: Synthetic polynucleotide
atgctttacccagaaaaatttcagggcatcggtatttccaacgcaaaggattggaagcatcctaaattagtgagttttgacccaaaaccctttggcgatcatgacgttgatgttgaaattgaagcctgtggtatctgcggatctgattttcatatagccgttggtaattggggtccagtcccagaaaatcaaatccttggacatgaaataattggccgcgtggtgaaggttggatccaagtgccacactggggtaaaaatcggtgaccgtgttggtgttggtgcccaagccttggcgtgttttgagtgtgaacgttgcaaaagtgacaacgagcaatactgtaccaatgaccacgttttgactatgtggactccttacaaggacggctacatttctcaaggaggctttgcctcccacgtgaggcttcatgaacactttgctattcaaataccagaaaatattccaagtccgttagccgctccattattgtgtggtggtattacagttttctctccattgttaagaaatggctgtggtccaggtaagagggtaggtattgttggcatcggtggtattgggcatatggggattttattggctaaagctatgggagccgaggtttatgcgttttctcgtggccactccaagagagaggattctatgaaactcggtgctgatcactatattgctatgttggaggataaaggctggacagaacaatactctaacgctttggaccttcttgtcgtttgctcttcttctttgagtaaagttaattttgacagtatcgttaagattatgaagattggaggctccatcgtttctattgctgctcctgaagttaatgaaaagcttgttttaaaaccgttgggcttaatgggagtatctatcagtagcagtgctatcggatctaggaaggaaatcgaacaattattgaaattagtttccgaaaagaatgtcaaaatatgggtggaaaaacttccgatcagcgaagaaggcgtcagccatgcctttacaaggatggaaagcggagacgtcaaatacagatttactttggtcgattatgataagaaattccataaatga

SEQ ID NO: 1331 - DNA, 2499 bp, Saccharomyces cerevisiae
atggattcgattacagtaaaaaaacctcggttaagattggtttgcctgcaatgcaaaaagatcaaacggaaatgtgataaactgcggcctgcttgctcgcgatgccaacaaaattcattacagtgtgaatatgaagagagaacagatttatctgccaatgttgcagcaaacgactctgatggattcaattcctctcataagctcaatttcgaacagcaacctgtacttgaaaggactgggcttagatattccttacaagtgcctgaaggtgtcgttaatgctacgctgtcgatatggaacgccgaagatatgctagttatagtaggattagttacatttctggattatccttttgctgcgcatagtctggcgcaacatgaccagtatatcagggcactttgtgcttcgttgtacggcatggcgcttgttgactttagcaattatgctaatggtattccttgtgaagacacatcaagaagtatactaggaccattgtcattcatagaaaaggccatttttagacggatagaacatagtaagcaatttcgagttcagtctgccgccttagggttattatacaatgcattttcaatggaagaagaaaacttctcgactcttctaccgtcactcatcgctgaagtggaagacgtgttgatgcaaaaaaaagactgtgaaatacttttgaggtgtttctatcaaaatatttatcccttctatccttttatggacatttcactctttgagagcgatctcactagtttgcttttacaagacgacaataatcgttggaaaattagtactgaagttaaaaatgtgcgcaaaaaaatagaaactttgtcattacttacaatagtaatggccatggccttgatgcattcaaaattggatgcaaatcttctttcaatggtaaaagaaaatgcctccgaaagtgccaggaaactttctcttttatgtcataaactattatgcctcctggatgtatttcgctatccaaatgagaacacttttacttgccttttatatttctacgtttcagagcatttagatcccgagagtcccgattgtgtactgagccccactaacttgcttactctgcaccatcttttaaatttgtccatgaccttaggtcttcaatatgagccttcgaagtacaaacgtttcaaagatccagaagtgataaggcagagacggatattatggttaggagttcagtcattactttttcaaatttctcttgctgaaggtgatgctggtaaatcaaatagtgaatatatggaggcatatttaacagacttcgaagaatatattgaagcttcctcagagtatgaaaaaagttctgcgagtgaatcgaacgtgcaaatgaatgatattgtttggaataagtacaaatttcacgtcattttgagtaaactaatgtctgattgcacttcagttatacaacatccgcagcttttccacattttaggaaatattaaaagatctgaagattttatggctgagaactttcctacaagttcgatttaccaaccccttcatgaaaaggaaccaaatgcgatcaaagttggcaaaagtacggttctcgatgtcatggatattcaaaaaactgaaatatttcttacaaatattgtgggaagtatgtgttttttaaacatttttgatgtcctatcgttacattttgaaaaaaaatgtgttatgcactgggaagaatatgaaaagaactatcatttccttactttgaaaagtttcaatgcatacttaaagctagcagggttgatatctgattatctcgagaataagtttcaagggaacattttagagagtcgcggttatatcatagataaacaaatatgttttatgcttgtaaggatctggatgttccaatgtcgtattttgttaaggttttcatacaagcaagaaagtcagaaaaaattggcctcttccagtatatccactaacgataatgaaaaagaagatgaaatgattgtcattttagaaagacttattaaacacattcgtaaccaaatggcacatttagtggatctagcaaagggaaaacttcaagatagttactttggtgcttaccaaactgttcccatgtttagatacgttgtgtatttgatcgatgttggcggcttagtatctgtgacaaatgggttttgggataagatttccagtgatggtgaaataccgccaaaagtacaacaagccgtgagattgaaatggggattggactgcaataattcgagaagaatcaaacaaaagttaataagcagccagagtttgcagagtttcaatcaagttctgttgtgccagatggaggatgcagttctctccagttccttcgcaataaaagccaataccgctatgtcccaaaacacggctgaagaatttttcaatatcagcgaagaagaggctttaaatcaactattggaaaacaacaattttgatgccttctgggatttattaggtgaaaatctgagcgatatgccttctttgtga

SEQ ID NO: 1332 - DNA, 2499 bp, Artificial Sequence
  Description of Artificial Sequence: Synthetic polynucleotide
atggattctattacagtaaaaaaacctagattaagattggtttgcttacaatgcaaaaagatcaaaagaaaatgtgataaattaagacctgcttgctctaggtgccaacaaaattctttacagtgtgaatatgaagagagaacagatttatctgccaatgttgcagcaaacgactctgatggattcaattcctctcataagctcaatttcgaacagcaacctgtacttgaaaggactgggcttagatattccttacaagtgcctgaaggtgtcgttaatgctacgttatctatatggaacgccgaagatatgcttgttatagtaggattagttacatttttggattatccttttgctgcgcatagtttggcgcaacatgaccagtatatcagggcactttgtgcttctttgtacggcatggcgcttgttgactttagcaattatgctaatggtattccttgtgaagacacatctagaagtatattaggaccattgagtttcatagaaaaggccatttttagaagaatagaacatagtaagcaatttagagttcagtctgccgccttagggttattatacaatgcattttccatggaagaagaaaacttctctactcttttgccgtctctcatcgctgaagtggaagacgtgttgatgcaaaaaaaagactgtgaaatacttttgaggtgtttctatcaaaatatttatcccttctatccttttatggacatttctctctttgagagcgatctcactagtttgcttttacaagacgacaataatcgttggaaaattagtactgaagttaaaaatgtgcgcaaaaaaatagaaactttgtctttacttacaatagtaatggccatggccttgatgcattctaaattggatgcaaatcttctttctatggtaaaagaaaatgcctccgaaagtgccaggaaactttctcttttatgtcataaattattatgcctcttggatgtatttcgctatccaaatgagaacacttttacttgccttttatatttctacgtttctgagcatttagatcccgagagtcccgattgtgtattgagccccactaacttgcttactttgcaccatcttttaaatttgtccatgaccttaggtcttcaatatgagccttctaagtacaaacgtttcaaagatccagaagtgataaggcagagaagaatattatggttaggagttcagtctttactttttcaaatttctcttgctgaaggtgatgctggtaaatctaatagtgaatatatggaggcatatttaacagacttcgaagaatatattgaagcttcctctgagtatgaaaaaagttctgcgagtgaatctaacgtgcaaatgaatgatattgtttggaataagtacaaatttcacgtcattttgagtaaattaatgtctgattgcacttctgttatacaacatccgcagcttttccacattttaggaaatattaaaagatctgaagattttatggctgagaactttcctacaagttctatttaccaaccccttcatgaaaaggaaccaaatgcgatcaaagttggcaaaagtacggttctcgatgtcatggatattcaaaaaactgaaatatttcttacaaatattgtgggaagtatgtgttttttaaacatttttgatgtcctttctttacattttgaaaaaaaatgtgttatgcactgggaagaatatgaaaagaactatcatttccttactttgaaaagtttcaatgcatacttaaagttagcagggttgatatctgattatctcgagaataagtttcaagggaacattttagagagtcgcggttatatcatagataaacaaatatgttttatgcttgtaaggatctggatgttccaatgtcgtattttgttaaggttttcttacaagcaagaaagtcagaaaaaattggcctcttccagtatatccactaacgataatgaaaaagaagatgaaatgattgtcattttagaaagacttattaaacacattcgtaaccaaatggcacatttagtggatttggcaaagggaaaacttcaagatagttactttggtgcttaccaaactgttcccatgtttagatacgttgtgtatttgatcgatgttggcggcttagtatctgtgacaaatgggttttgggataagatttccagtgatggtgaaataccgccaaaagtacaacaagccgtgagattgaaatggggattggactgcaataattctagaagaatcaaacaaaagttaataagcagccagagtttgcagagtttcaatcaagttttattgtgccagatggaggatgcagttctctccagttccttcgcaataaaagccaataccgctatgtcccaaaacacggctgaagaatttttcaatatcagcgaagaagaggctttaaatcaattattggaaaacaacaattttgatgccttctgggatttattaggtgaaaatttgagcgatatgccttctttgtga

SEQ ID NO: 1333 - DNA, 1092 bp, Saccharomyces cerevisiae
atgattgggtccgcgtccgactcatctagcaagttaggacgcctccgatttctttctgaaactgccgctattaaagtatccccgttaatcctaggagaagtctcatacgatggagcacgttcggattttctcaaatcaatgaacaagaatcgagcttttgaattgcttgatactttttacgaggcaggtggaaatttcattgatgccgcaaacaactgccaaaacgagcaatcagaagaatggattggtgaatggatacagtccagaaggttacgtgatcaaattgtcattgcaaccaagtttataaaaagcgataaaaagtataaagcaggtgaaagtaacactgccaactactgtggtaatcacaagcgtagtttacatgtgagtgtgagggattctctccgcaaattgcaaactgattggattgatatactttacgttcactggtgggattatatgagttcaatcgaagaatttatggatagtttgcatattctggtccagcagggcaaggtcctctatttgggtgtatctgatacacctgcttgggttgtttctgcggcaaactactacgctacatcttatggtaaaactccctttagtatctaccaaggtaaatggaacgtgttgaacagagattttgagcgtgatattattccaatggctaggcatttcggtatggccctcgccccatgggatgtcatgggaggtggaagatttcagagtaaaaaagcaatggaggaacggaggaagaatggagagggtattcgttctttcgttggcgcctccgaacaaacagatgcagaaatcaagattagtgaagcattggccaagattgctgaggaacatggcactgagtctgttactgctattgctattgcctatgttcgctctaaggcgaaaaatttttttccgtcggttgaaggaggaaaaattgaggatctcaaagagaacattaaggctctcagtatcgatctaacgccagacaatataaaatacttagaaagtatagttccttttgacatcggatttcctaataattttatcgtgttaaattccttgactcaaaaatatggtacgaataatgtttag

SEQ ID NO: 1334 - DNA, 1092 bp, Artificial Sequence
  Description of Artificial Sequence: Synthetic polynucleotide
atgattgggtccgcgtccgactcttctagcaagttaggacgcctcaggtttctttctgaaactgccgctattaaagtatccccgttaatcttgggagaagtctcttacgatggagcacgttctgattttctcaaatctatgaacaagaatagggcttttgaattgcttgatactttttacgaggcaggtggaaatttcattgatgccgcaaacaactgccaaaacgagcaaagtgaagaatggattggtgaatggatacagtccagaaggttacgtgatcaaattgtcattgcaaccaagtttataaaaagcgataaaaagtataaagcaggtgaaagtaacactgccaactactgtggtaatcacaagcgtagtttacatgtgagtgtgagggattctctccgcaaattgcaaactgattggattgatatactttacgttcactggtgggattatatgagttctatcgaagaatttatggatagtttgcatattttagtccagcagggcaaggtcctctatttgggtgtatctgatacacctgcttgggttgtttctgcggcaaactactacgctacatcttatggtaaaactccctttagtatctaccaaggtaaatggaacgtgttgaacagagattttgagcgtgatattattccaatggctaggcatttcggtatggccctcgccccatgggatgtcatgggaggtggaagatttcagagtaaaaaagcaatggaggaaagaaggaagaatggagagggtattcgttctttcgttggcgcctccgaacaaacagatgcagaaatcaagattagtgaagcattggccaagattgctgaggaacatggcactgagtctgttactgctattgctattgcctatgttcgctctaaggcgaaaaatttttttccgtctgttgaaggaggaaaaattgaggatctcaaagagaacattaaggctctcagtatcgatttgacgccagacaatataaaatacttagaaagtatagttccttttgacatcggatttcctaataattttatcgtgttaaattccttgactcaaaaatatggtacgaataatgtttga

SEQ ID NO: 1335 - DNA, 192 bp, Saccharomyces cerevisiae
atgccatactcaccttcacttatattgatggggcatacgcacacggatgctacagtatataccactctcaagttaccctactctcacactccaatccatggcccattctcactaaatcagtaccaaatgcacccacatcattatgcacggcacttgcctcagcggtctataccctgtgccatttacccataa

SEQ ID NO: 1336 - DNA, 192 bp, Artificial Sequence
  Description of Artificial Sequence: Synthetic polynucleotide
atgccatactctccttctcttatattgatggggcatacgcacacggatgctacagtatataccactctcaagttaccctactctcacactccaatccatggcccattctctttgaatcagtaccaaatgcacccacatcattatgcaagacacttgcctcagagatctataccctgtgccatttacccatga

SEQ ID NO: 1337 - DNA, 1152 bp, Saccharomyces cerevisiae
atgaaagagaatgaagtcaaagatgagaaaagcgtagatgtgttatccttcaaacagctcgaatcccaaaagattgttctacctcaagatcttttcagaagcagctttacctggttttgttatgaaatttacaagtccttagcgtttcgcatctggatgctattatggctaccacttagcgtctggtggaaactttccaacaattgtatttacccacttatagtttcacttctggtcctgtttctgggaccaatatttgtccttgttatttgtggactttctcgtaagcgttccttatcgaaacaactcattcagttttgcaaagagattactgaaaacacaccaagttctgatcctcatgattgggaagtcgttgtagcaaatctaaattcgtacttatatgaaaataaggcttggaatactaagaatttctttttcaatgctacggattgtgagaaaatgttcagaacaactgttcttgaaccattttctttgaaaaaagataaagctgccaaggttaagtcatttaaggattctgtcccttatatcgaagaggctttgcaagtgtatgctacaggatttgacaaacagtggaagttgtttattactgaaaaatcatggagccctgttggcctggaagacgttcagcttcccaaggatattcatcggtccaagcttacttggtttttaaagcggattttcactatttactctctaccattatggcttgcttttttgaactgtatctgcgtgtcacagcatttttgccttgcatttcgtatcttgtgtcctggattgtttttcctcatgatggtgtggcttttccaaaatatgaggacgactgctttactcgtgaaaatggaacacaagatgcaattcttgttgactattataaatgagcaagaaagtggtgcgaatggatgggacgaaattgcaaggaaaatgaataggtacttgtttgagaaaaaagcctggaagaatgaagagtttttcttcgacgggattgactgtgaatggttttttagccacttcttctaccgccttctatctgcaaagaaatctatgtggcttttaccattgaatgtggaactatggccatatattaaagaagcgcaattgtcccgcaatgaagagtctttaatgaagaaatga

SEQ ID NO: 1338 - DNA, 1152 bp, Artificial Sequence
  Description of Artificial Sequence: Synthetic polynucleotide
atgaaagagaatgaagtcaaagatgagaaaagcgtagatgtgttatccttcaaacagctcgaatcccaaaagattgttttacctcaagatcttttcagaagcagctttacctggttttgttatgaaatttacaagtccttagcgtttcgcatctggatgcttttatggttaccacttagcgtctggtggaaactttccaacaattgtatttacccacttatagtttcccttttggtcttgtttttgggaccaatatttgtccttgttatttgtggactttctcgtaagcgttccttatccaaacaactcattcagttttgcaaagagattactgaaaacacaccaagttctgatcctcatgattgggaagtcgttgtagcaaatttgaattcttacttatatgaaaataaggcttggaatactaagaatttctttttcaatgctacggattgtgagaaaatgttcagaacaactgttcttgaaccattttctttgaaaaaagataaagctgccaaggttaagagctttaaggattctgtcccttatatcgaagaggctttgcaagtgtatgctacaggatttgacaaacagtggaagttgtttattactgaaaaaagttggagccctgttggccttgaagacgttcagcttcccaaggatattcatcgttccaagcttacttggtttttaaagagaattttcactatttactctttaccattatggcttgcttttttgaactgtatctgcgtgtcccagcatttttgccttgcatttcgtatcttgtgtcctggattgtttttcctcatgatggtgtggcttttccaaaatatgaggacgactgctttactcgtgaaaatggaacacaagatgcaattcttgttgactattataaatgagcaagaaagtggtgcgaatggatgggacgaaattgcaaggaaaatgaataggtacttgtttgagaaaaaagcctggaagaatgaagagtttttcttcgacgggattgactgtgaatggttttttagccacttcttctaccgccttttatctgcaaagaaatctatgtggcttttaccattgaatgtggaattatggccatatattaaagaagcgcaattgtcccgcaatgaagagtctttaatgaagaaatga

SEQ ID NO: 1339 - DNA, 1830 bp, Saccharomyces cerevisiae
atgaaaaacttatcttttctcataaacagaagaaaggaaaatacaagtgactcgaatgtatacccaggaaaggctaagtcgcatgaacccagctggatagaaatggatgatcaaactaagaaggacggcttagatattgttcatgttgagttcagtccggatacaagagcgccaagcgatagcaataaagtaataacagagatatttgacgctactgaggatgccaaggaggcagacgaaagtgaaagaggaatgccacttgcgacagcattgaatacatatcccaaggcagcagcttggtcactattggtctctacaactttaatcatggaagggtacgacacagctattcttggagctttctacgccttgcctatttttcagagaaagtttggctcacaaaatgacaaaactggagaatgggaaatttcagcgtcatggcaaatcgggctgaccttatgttatatggcaggtgaaattgtggggctacagctaacggggccctccgtggatcttgttggaaatcgttacacattgattattgcattgttttttttagctgccttcacttttatactgtacttttgcaatagtttaggcatgattgctgtgggacaagcattgtgcgggatgccatggggttgttttcagtgtttgacggtgtcttacgcttctgaaatatgcccattggctctgagatattaccttacaacctattcaaacttgtgctggttatttggacaactttttgcagctggaatcatgaaaaattctcaaaaaaaatatgcggattcagaattaggatataaactaccatttgccctacagtggattttgccagttcctttagcactgggaattttttttgcacctgaatctccatggtggctagttaaaaaaggaaggtttgatgaggcaaggagatcacttagaagaactttaagcggcaagggacctgaaaaagaaatactagtaactctggaggtggacaaaataaaagtgactatagataaggaaaagagactcacaagtaaagaaggctcctatagtgattgttttgaagacaagattaatcgaagaagaacgagaattacttgtctctgctgggctggtcaagccacttgtggttcaatactaataggttattcaacttacttttacgaaaaggctggcgttagtactgaaatgtccttcacttttagtattattcaatactgtctcggtatttgtgctacatttctatcttggtgggcgtcaaagtattttggtagatatgacctttacgcttttggactagccttccaaaccattgtttttttcattattggcggtttggggtgctcaagtacgcacggttccaaaatgggaagtggttctcttttaatggctgtagcatttttttacaatttaggaattgccccggtcgttttttgcctagtctctgaaatgccatcttcaagactaagaacgaaaacaatcattctagcacgtaacacttataatgtggtcagtatcatatgtagcgttctcatcttataccaactgaactctaagaagtggaactggggcgctaagtcaggctttttctggggtgtcttatgcttttgtactttaatctgggctgtggttgacctaccagaaactgccggaaagactttcgtggaaataaatgagttatttaaacttggagtttctgcaagaaagttcaaatcgacgaaagtagatccgtttgttgtcaaaacccccctaaagacgtctctcataacgaccccaagggagatatcgaagcttccattgcagaggaatagcaatgtatcccatcacctatga

SEQ ID NO: 1340 - DNA, 1830 bp, Artificial Sequence
  Description of Artificial Sequence: Synthetic polynucleotide
atgaaaaacttatcttttctcataaacagaagaaaggaaaatacaagtgactctaatgtatacccaggaaaggctaagagtcatgaacccagctggatagaaatggatgatcaaactaagaaggacggcttagatattgttcatgttgagttcagtccggatacaagagcgccaagcgatagcaataaagtaataacagagatatttgacgctactgaggatgccaaggaggcagacgaaagtgaaagaggaatgccacttgcgacagcattgaatacatatcccaaggcagcagcttggtctttgttggtctctacaactttaatcatggaagggtacgacacagctattcttggagctttctacgccttgcctatttttcagagaaagtttggctctcaaaatgacaaaactggagaatgggaaattagtgcgtcttggcaaatcgggttaaccttatgttatatggcaggtgaaattgtggggttgcagttaacggggccctccgtggatcttgttggaaatcgttacacattgattattgcattgttttttttagctgccttcacttttatattatacttttgcaatagtttaggcatgattgctgtgggacaagcattgtgcgggatgccatggggttgttttcagtgtttgacggtgtcttacgcttctgaaatatgcccattggctttgagatattaccttacaacctattccaacttgtgctggttatttggacaactttttgcagctggaatcatgaaaaattctcaaaaaaaatatgcggattctgaattaggatataaattaccatttgccttgcagtggattttgccagttcctttagcattgggaattttttttgcacctgaatctccatggtggttagttaaaaaaggaaggtttgatgaggcaaggagatctcttagaagaactttaagcggcaagggacctgaaaaagaaatattagtaactttagaggtggacaaaataaaagtgactatagataaggaaaagagactcacaagtaaagaaggctcctatagtgattgttttgaagacaagattaatagaagaagaacgagaattacttgtctctgctgggctggtcaagccacttgtggttccatattaataggttattctacttacttttacgaaaaggctggcgttagtactgaaatgtccttcacttttagtattattcaatactgtctcggtatttgtgctacatttttatcttggtgggcgtctaagtattttggtagatatgacctttacgcttttggattggccttccaaaccattgtttttttcattattggcggtttggggtgcagcagtacgcacggttccaaaatgggaagtggttctcttttaatggctgtagcatttttttacaatttaggaattgccccggtcgttttttgcttagtctctgaaatgccatcttctagattgagaacgaaaacaatcattttggcacgtaacacttataatgtggtcagtatcatatgtagcgttctcatcttataccaattgaactctaagaagtggaactggggcgctaagtctggctttttctggggtgtcttatgcttttgtactttaatctgggctgtggttgacttaccagaaactgccggaaagactttcgtggaaataaatgagttatttaaacttggagtttctgcaagaaagttcaaatctacgaaagtagatccgtttgttgtcaaaacccccttgaagacgtctctcataacgaccccaagggagatatccaagcttccattgcagaggaatagcaatgtatcccatcacttgtga

SEQ ID NO: 1341 - DNA, 1074 bp, Saccharomyces cerevisiae
atgtctcaaaatagtaaccctgcagtagttctagagaaagtcggcgatattgccatcgagcaaagaccaatccctaccattaaggacccccattatgtcaagttagctattaaagccactggtatctgcggctctgatattcattattatagaagcggtggtattggtaagtacatattgaaggcgccaatggttttaggtcatgaatcaagcggacaggttgtggaagttggtgatgccgtcacaagggtcaaagttggtgaccgtgttgctattgaacctggtgttcctagccgttactctgatgagaccaaagaagggagctataacctttgcccacatatggcatttgctgcaactcctccaattgatggtactcttgtgaagtactatttatctccagaagatttccttgtgaaattgccagaaggcgtcagttatgaagagggcgcttgtgtcgaacccttatcagtcggtgtacactctaataaattggctggggtccgctttggtaccaaagttgttgtatttggtgcaggtcctgtggggcttttaactggcgcagtcgcccgcgcttttggtgccaccgacgtcattttcgtcgatgtattcgacaacaagctacagagagcaaaagatttcggagccacaaacactttcaattcttcccagttttccaccgataaagcccaagacttggccgatggggtccaaaagcttttgggcggaaatcacgcagatgtggtgtttgagtgttcaggtgctgatgtttgcattgatgccgctgtcaaaacaactaaggttggaggtaccatggtgcaagtcggtatgggtaaaaactacactaattttccaattgctgaagttagtggaaaggaaatgaaattgattggatgtttccgttattcattcggtgattatcgtgacgctgtgaacttggttgccacaggaaaagtcaatgtcaagccattgataacccacaaatttaaatttgaagatgcagccaaggcttacgactacaacattgcccatggtggagaggtagtcaagactattatctttggtcctgaatga

SEQ ID NO: 1342 - DNA, 1074 bp, Artificial Sequence
  Description of Artificial Sequence: Synthetic polynucleotide
atgtctcaaaatagtaaccctgcagtagttttggagaaagtcggcgatattgccatcgagcaaagaccaatccctaccattaaggacccccattatgtcaagttagctattaaagccactggtatctgcggctctgatattcattattatagaagcggtggtattggtaagtacatattgaaggcgccaatggttttaggtcatgaaagtagcggacaggttgtggaagttggtgatgccgtcacaagggtcaaagttggtgaccgtgttgctattgaacctggtgttcctagccgttactctgatgagaccaaagaagggagctataacctttgcccacatatggcatttgctgcaactcctccaattgatggtactcttgtgaagtactatttatctccagaagatttccttgtgaaattgccagaaggcgtcagttatgaagagggcgcttgtgtcgaacccttaagtgtcggtgtacactctaataaattggctggggtccgctttggtaccaaagttgttgtatttggtgcaggtcctgtggggcttttaactggcgcagtcgcccgcgcttttggtgccaccgacgtcattttcgtcgatgtattcgacaacaagttacagagagcaaaagatttcggagccacaaacactttcaattcttcccagttttccaccgataaagcccaagacttggccgatggggtccaaaagcttttgggcggaaatcacgcagatgtggtgtttgagtgttctggtgctgatgtttgcattgatgccgctgtcaaaacaactaaggttggaggtaccatggtgcaagtcggtatgggtaaaaactacactaattttccaattgctgaagttagtggaaaggaaatgaaattgattggatgtttccgttattctttcggtgattatcgtgacgctgtgaacttggttgccacaggaaaagtcaatgtcaagccattgataacccacaaatttaaatttgaagatgcagccaaggcttacgactacaacattgcccatggtggagaggtagtcaagactattatctttggtcctgaatga

SEQ ID NO: 1343 - DNA, 1704 bp, Saccharomyces cerevisiae
atggcaagcgaacagtcctcaccagaaattaatgcagataatctaaacagtagtgcagctgacgttcatgtacagccacccggagagaaagaatggtcagacgggttttatgacaaagaagtcattaatggaaatacgccagacgcaccgaagagaggctttttaggttaccttattatctacttactatgctatcctgtatcctttggcggttttttacctggttgggatagtggtattactgcaggcttcatcaatatggataactttaaaatgaattttggttcttacaagcacagtactggtgagtattatttgagcaacgtgcgtatgggtcttctcgtggccatgttcagtgtaggatgttccattggcggtgttgcttttgcgagacttgctgatactttaggtagaaggctagcaattgtaatcgtggttttggtatatatggttggtgcaattattcagatcagttcgaatcacaaatggtaccaatactttgtcggtaagatcatctacggtcttggtgctggtggctgttcggtgttgtgtccaatgcttttatctgaaatagcccccacagatttgagaggtggacttgtctcattgtaccaacttaacatgaccttcggtattttcttgggttattgtagcgtttatggaacaaggaagtatagtaatactgcgcaatggaggattcctgtgggactatgctttctgtgggctctaattatcatcgttggcatgttattagttccagagtccccaagatatctgattgaatgtgagagacatgaagaggcctgtgtctccatcgccaagatcaacaaggtttcaccagaggatccatgggtactcaaacaggctgatgaaatcaacgccggtgtccttgcccaaagagaactaggggaagcctcatggaaagaacttttctccgtcaaaacaaaagtccttcaacgtttgatcacaggtattcttgtgcaaacctttttgcaacttactggtgaaaactacttcttcttctacggaactaccattttcaaatcagttgggcttactgatgggtttgagacttcgatcgtcctaggtacagtgaatttcttctccactattattgctgttatggtcgtagacaaaataggccgtcgtaaatgtctgttattcggagcggcttcaatgatggcttgtatggtcatatttgcaagtatcggggtaaaatgtctttaccctcatggccaggatggtccatcctcgaaaggtgcaggtaatgccatgattgtgttcacatgcttctatatattctgctttgcaacgacatgggcccctgttgcttatattgtggttgccgagtcattcccttcgaaggtcaaatctaaagcaatgtcaatttcgactgcattcaactggttatggcaattcttgattggttttttcacaccattcattactgggtctatccacttctattatggttatgtgttcgtaggttgtttggttgctatgtttttgtacgttttcttctttttaccagaaacaattggtctatctttggaggaaatccagttactatatgaagaaggtataaaaccatggaaatctgcatcttgggtaccaccctcaaggagaggagcttcttccagggaaactgaggctaagaagaaaagctggaaagaagttttgaagttcccaaagagttttaattga

SEQ ID NO: 1344 - DNA, 1704 bp, Artificial Sequence
  Description of Artificial Sequence: Synthetic polynucleotide
atggcaagcgaacagtcctctccagaaattaatgcagataatttgaacagtagtgcagctgacgttcatgtacagccacccggagagaaagaatggtctgacgggttttatgacaaagaagtcattaatggaaatacgccagacgcaccgaagagaggctttttaggttaccttattatctacttattatgctatcctgtatcctttggcggttttttacctggttgggatagtggtattactgcaggcttcatcaatatggataactttaaaatgaattttggttcttacaagcacagtactggtgagtattatttgagcaacgtgcgtatgggtcttctcgtggccatgttcagtgtaggatgttccattggcggtgttgcttttgcgagacttgctgatactttaggtagaaggttagcaattgtaatcgtggttttggtatatatggttggtgcaattattcagatcagtagtaatcacaaatggtaccaatactttgtcggtaagatcatctacggtcttggtgctggtggctgttctgtgttgtgtccaatgcttttatctgaaatagcccccacagatttgagaggtggacttgtctctttgtaccaacttaacatgaccttcggtattttcttgggttattgtagcgtttatggaacaaggaagtatagtaatactgcgcaatggaggattcctgtgggattatgctttttatgggctttgattatcatcgttggcatgttattagttccagagtccccaagatatttgattgaatgtgagagacatgaagaggcctgtgtctccatcgccaagatcaacaaggtttctccagaggatccatgggtactcaaacaggctgatgaaatcaacgccggtgtccttgcccaaagagaattgggggaagccagttggaaagaacttttctccgtcaaaacaaaagtccttcaacgtttgatcacaggtattcttgtgcaaacctttttgcaacttactggtgaaaactacttcttcttctacggaactaccattttcaaatctgttgggcttactgatgggtttgagacttctatcgtcttgggtacagtgaatttcttctccactattattgctgttatggtcgtagacaaaataggccgtcgtaaatgtcttttattcggagcggcttccatgatggcttgtatggtcatatttgcaagtatcggggtaaaatgtctttaccctcatggccaggatggtccatcctctaaaggtgcaggtaatgccatgattgtgttcacatgcttctatatattctgctttgcaacgacatgggcccctgttgcttatattgtggttgccgagagtttcccttctaaggtcaaatctaaagcaatgtctatttctactgcattcaactggttatggcaattcttgattggttttttcacaccattcattactgggtctatccacttctattatggttatgtgttcgtaggttgtttggttgctatgtttttgtacgttttcttctttttaccagaaacaattggtctttctttggaggaaatccagttattatatgaagaaggtataaaaccatggaaatctgcatcttgggtaccaccctctaggagaggagcttcttccagggaaactgaggctaagaagaaaagctggaaagaagttttgaagttcccaaagagttttaattga

SEQ ID NO: 1345 - DNA, 1023 bp, Saccharomyces cerevisiae
atgtctacagacaagatcacatttttgttgaactggcaaccaaccccataccatattccaattttcttggctcaaaccaaaggttacttcaaggagcaaggtctagacattgccatcctagaaccaaccaatccttcggatgtcactgagttaattggatctggtaaggtcgacatgggtttgaaagccatgatccacaccttggctgccaaggcccgtggtttcccagtgacctctgttgcctctttgttggacgaaccattcaccggtgtcttgtacttaaagggcagtggtatcactgaagacttccagtccctaaagggcaagaagatcggttacgttggtgaatttggtaagatccaaatcgatgaattgaccaagcactacggtatgaagccagaagactacaccgctgtcagatgtggtatgaatgtcgccaagtacatcattgaaggtaagatcgatgccggtatcggtatcgaatgtatgcaacaagttgaattggaagaatacttggctaagcaaggtagaccagcttctgatgctaaaatgttgagaattgacaagttggcttgcttgggttgctgttgtttctgtaccgttctttacatctgcaacgatgaatttttgaagaagaaccctgaaaaggtcagaaagttcttgaaagccatcaagaaggcaaccgactacgttctagccgaccctgtgaaggcttggaaagaatacatcgacttcaagcctcaattgaacaacgatctatcctacaagcaatatcaaagatgttacgcttacttctcttcatctttgtacaatgttcaccgtgactggaagaaggttaccggttacggtaagagattagccattctgccaccagactatgtctcgaactacactaatgaatacctgtcctggccagaaccagaagaggtttctgatcctttggaagcccaaagattgatggctattcatcaagaaaaatgcagacaggaaggtactttcaagagattggctcttccagcttaa

SEQ ID NO: 1346 - DNA, 1023 bp, Artificial Sequence
  Description of Artificial Sequence: Synthetic polynucleotide
atgtctacagacaagatcacatttttgttgaactggcaaccaaccccataccatattccaattttcttggctcaaaccaaaggttacttcaaggagcaaggtttggacattgccatcttggaaccaaccaatccttctgatgtcactgagttaattggatctggtaaggtcgacatgggtttgaaagccatgatccacaccttggctgccaaggcccgtggtttcccagtgacctctgttgcctctttgttggacgaaccattcaccggtgtcttgtacttaaagggcagtggtatcactgaagacttccagtccttgaagggcaagaagatcggttacgttggtgaatttggtaagatccaaatcgatgaattgaccaagcactacggtatgaagccagaagactacaccgctgtcagatgtggtatgaatgtcgccaagtacatcattgaaggtaagatcgatgccggtatcggtatcgaatgtatgcaacaagttgaattggaagaatacttggctaagcaaggtagaccagcttctgatgctaaaatgttgagaattgacaagttggcttgcttgggttgctgttgtttctgtaccgttctttacatctgcaacgatgaatttttgaagaagaaccctgaaaaggtcagaaagttcttgaaagccatcaagaaggcaaccgactacgttttggccgaccctgtgaaggcttggaaagaatacatcgacttcaagcctcaattgaacaacgatttatcctacaagcaatatcaaagatgttacgcttacttctcttcttctttgtacaatgttcaccgtgactggaagaaggttaccggttacggtaagagattagccattttaccaccagactatgtctccaactacactaatgaatacttgtcctggccagaaccagaagaggtttctgatcctttggaagcccaaagattgatggctattcatcaagaaaaatgcagacaggaaggtactttcaagagattggctcttccagcttga

SEQ ID NO: 1347 - DNA, 990 bp, Saccharomyces cerevisiae
atgggctctatgaataaggaacaggcttttgaacttcttgatgctttttatgaagcaggaggtaattgcattgatactgcaaacagttaccaaaatgaagagtcagagatttggataggtgaatggatgaaatcaagaaagttgcgtgaccaaattgtaattgccaccaagtttaccggagattataagaagtatgaagtaggtggcggtaaaagtgccaactattgtggtaatcacaagcatagtttacatgtgagtgtgagggattctctccgcaaattgcaaactgattggattgatatactttacgttcactggtgggattatatgagttcaatcgaagaagttatggatagtttgcatattttagttcagcagggcaaagtcctctatttgggtgtgtctgatacacctgcttgggttgtttctgcggcaaactactacgccacatctcatgggaaaactccttttagtatctatcaaggtaaatggaatgtgttgaacagggactttgagcgcgatatcattccaatggccagacattttggtatggctctagccccatgggatgttatgggaggtggaagatttcagagtaaaaaagcaatggaggaacggaagaagaatggagagggtctgcgtactgtttcgggtacttctaaacagacggataaagaggttaagatcagtgaagcattggccaaggttgctgaggaacatggcactgagtctgttactgctattgctattgcctatgttcgctctaaggcgaaaaatgttttcccattggttggtggaaggaaaattgaacacctcaaacagaacattgaggctttaagtatcaaactgacaccagaacagatagaatacttagaaagtattattccttttgatgttggttttcctactaattttatcggtgatgatccggctgttaccaagaaggcttcacttctcacggcaatgtctgcgcagatttccttcgattaa

SEQ ID NO: 1348 - DNA, 990 bp, Artificial Sequence
  Description of Artificial Sequence: Synthetic polynucleotide
atgggctctatgaataaggaacaggcttttgaacttcttgatgctttttatgaagcaggaggtaattgcattgatactgcaaacagttaccaaaatgaagagagtgagatttggataggtgaatggatgaaatctagaaagttgcgtgaccaaattgtaattgccaccaagtttaccggagattataagaagtatgaagtaggtggcggtaaaagtgccaactattgtggtaatcacaagcatagtttacatgtgagtgtgagggattctctccgcaaattgcaaactgattggattgatatactttacgttcactggtgggattatatgagttctatcgaagaagttatggatagtttgcatattttagttcagcagggcaaagtcctctatttgggtgtgtctgatacacctgcttgggttgtttctgcggcaaactactacgccacatctcatgggaaaactccttttagtatctatcaaggtaaatggaatgtgttgaacagggactttgagcgcgatatcattccaatggccagacattttggtatggctttggccccatgggatgttatgggaggtggaagatttcagagtaaaaaagcaatggaggaaagaaagaagaatggagagggtttacgtactgtttctggtacttctaaacagacggataaagaggttaagatcagtgaagcattggccaaggttgctgaggaacatggcactgagtctgttactgctattgctattgcctatgttcgctctaaggcgaaaaatgttttcccattggttggtggaaggaaaattgaacacctcaaacagaacattgaggctttaagtatcaaattaacaccagaacagatagaatacttagaaagtattattccttttgatgttggttttcctactaattttatcggtgatgatccggctgttaccaagaaggcttctcttctcacggcaatgtctgcgcagatttccttcgattga

SEQ ID NO: 1349 - DNA, 354 bp, Saccharomyces cerevisiae
atgaatttagaagagagccaatcaaataggggtacgcttaatattaaaaaaatattagtaattgtttgtatgacgaataaaatttgtaagcacctgatccaatccttattattgagcaagagacgtcttgtttctgtactctttgataactatcaaggcgacatgaaactaaggtcatctccatctgccattcctctagttccgtcaacgaaaattcttcaagctatggaggcccggaacgacattgttgacagtctgatcatcaatagtcacgcaacggaaagtgatcgccggactttaggagaccatgaggttagacaatgtgaggataccaacttcggcttcaaaatttga

SEQ ID NO: 1350 - DNA, 354 bp, Artificial Sequence
  Description of Artificial Sequence: Synthetic polynucleotide
atgaatttagaagagagccaaagcaataggggtacgcttaatattaaaaaaatattagtaattgtttgtatgacgaataaaatttgtaagcacttaatccaatccttattattgagcaagagacgtcttgtttctgtactctttgataactatcaaggcgacatgaaattgaggtcttctccatctgccattcctttggttccgtccacgaaaattcttcaagctatggaggccagaaacgacattgttgacagtttaatcatcaatagtcacgcaacggaaagtgatcgccgtactttaggagaccatgaggttagacaatgtgaggataccaacttcggcttcaaaatttga

SEQ ID NO: 1351 - DNA, 372 bp, Saccharomyces cerevisiae
atgaacgtaactgaaaatgctctattgtttaagtgcggtagcaagggctatattaatcaaacctatacgccgacagaaatttataattgtggggtagctgaaggaaagaaaactgctaaagaaaagaacccaacttattcaattttttatgatacatttctcactgggcagcctgctgaaagtcctgaaacgtttacgtgtggttcgcatggcttcacaaatgcgagttatgtggcaagcgacttttatgcatgtggttttctgcaagggaaaggtacagaaaccaatgcgggaatacataatacaaggccttctcattctctcgccaaatttaccatactgttcatgctagtgttgtatacaattgtctaa

SEQ ID NO: 1352 - DNA, 372 bp, Artificial Sequence
  Description of Artificial Sequence: Synthetic polynucleotide
atgaacgtaactgaaaatgctttattgtttaagtgcggtagcaagggctatattaatcaaacctatacgccgacagaaatttataattgtggggtagctgaaggaaagaaaactgctaaagaaaagaacccaacttattctattttttatgatacatttctcactgggcagcctgctgaaagtcctgaaacgtttacgtgtggttctcatggcttcacaaatgcgagttatgtggcaagcgacttttatgcatgtggttttttgcaagggaaaggtacagaaaccaatgcgggaatacataatacaaggccttctcattctctcgccaaatttaccatattattcatgttggtgttgtatacaattgtctga

SEQ ID NO: 1353 - DNA, 3054 bp, Saccharomyces cerevisiae
atgattcaaaattctgctggttatcgatcgctgaatactgcatctccgatgaccgtgcaggtgaagaatcagaagaaaatatgcgcccgttgtaacaagttagttatacccgatagccaacgaactaaaacaactttaaaggctctcggtaaatattatcatgaaagttgttttacctgccaagactgtcagaaacctttaaaaccgaagtacttcccatatcaagtagacaagacaagtgaatctatattgttatgccaatacgattattttagaagacataatttgttatgtcatgtatgtgataccccattgcgtggattatattataccgcattcggttacagatacgacgaagagcatttttcttgtacaatatgtgctactccttgtggggttaaaaaatgcttcatgtacggaaaccaattgtattgcaagtaccactttctcaagtatttttcgaaacgttgcaaagggtgcgagttcccaatatcggatcaatatatcgagtttcctaaaggtgaagaaatacattgttggcatccggaatgttatggaattcataaatattggcatgtaaatttagcagcagaaactgttggtttgcagtaccttcccaagctggaatataacccaaattccggagacaaagatataaacccaactgcctacgagttagataaacaaatgcaggcgtttaactttattctatctaaaacgtggtcggttttatatcgttttgaggaagaggcagcttcttgcatttctgatatgtttcaatatttgacaagcaatgatcagttaaagggcatagagtctacgggtctgttggtactaaaaatcgactgtcttttccggggactggatactttaaacctctcgacgaacaaaagtatgccagttaacagtgatcaagaatgcattgaaaacaacgcaatggcggccagtaaatacagcaagtttcccaaaaatctgtccacaaaaattatgatatatttacaactcttaagaaagttagggacagaaaacaaaaacgaaactatcacaatttcatcttttatgtctgttattactggattagcccattttctaaaactgttaacaagatttgggctatatacggctctagaaaacaataagttgactcattctgttaatccattgttgaggtttttaagagaagtagagaaaaatgagctttttgaaaataacccgtttcagtatataaagactcctgttaacgccacagatagttgcgctggatgcaataaatacatacaggaggaatgcattcaattttatgagcaccggtggcatattgcttgttttacttgttcttcatgccataagaatataaatccgaggagtttgacggatcccacctttaataaagagaaaaaaaagatactatgttctcactgctcaattgatgatccggcctctgtgccgggtttcaaatttgttactaagctagcacaactaatttttcttctaaaaattgccctagtcaaatcaagaactgtaatgttgaaatcgaaagcatctaacaaggtaggcagaaactctttacagagtactatgctaaaggaacaaacttacattaggacactgaatgatattaaaagattgagatctagaagagaaagtgttcgggtcactcataacaaacaacaagctagaaaatcagtgatactggaaactgcagagacagatttaaatgacccgacaaaacaaggagatagtaaaaatcttgtgattcaaacagatgacccatcatcgagccaacaagtgagcacacgtgaaaatgttttcagtaatactaagacgttgacactagatgatatttcacgtattgttgccgctgaacaagcaagggagctaagacctaacgcttttgcacactttaaaaaactaaaagaaaccgatgacgaaacttcgaatgttgttcccaagaaaagcggagtttattactctgaattaagtacgatggaactctcgatgataagggctatcagtttgtcactgctagctggtaaacaactgatatcgaagactgatcctaactatactagcttagtctcaatggtcttctcgaatgaaaagcaagtcacaggtagcttttggaacagaatgaaaatcatgatgagcatggagcctaaaaagcccatcactaagactgtttttggtgctcctttagatgtgttgtgcgagaaatggggtgttgattccgatttaggtgtggggccagtgaagattaggatccccataattattgacgagctaatatcatctttgaggcaaatggatatgtcagtagaaggtattttcaggaaaaatggaaatatcagaagactgagagaactaactgctaacatcgacagtaatccaacagaagctccagacttctcgaaagaaaatgcaatccaattatctgctcttttgaagaaatttatcagagagcttccccaaccgattttatcgacagacttatatgaactatggattaaggccgcgaaaattgatttagaggatgagaaacagcgtgttatattgctaatatattccttattacccacttacaatcgcaatttactggaggcacttttgtcatttttgcattggacgtcctcattctcttacattgagaatgaaatgggatcaaaaatggacattcacaatttatccacagtcataacacctaatattttatatttgcgacataaagaaatttccaatgataacgtccctgacgaaccagaatcaggtttagttgattcattcgctcaaaacaagggagaaaattactttttggctattgagatagttgattacctgattactcacaatgaagaaatggcaatggttccgaaatttttaatgaatcttttaaaagatgtgcagttacaaaaattagataactacgaatcaatcaaccattttatttccaccgttatgcaaagtaaaacaatcgattattccgaatgtgacataaaaactcctgtcacagtcaaagattcgaccacaacggtcatacaaggtgaaataaacaaataa

SEQ ID NO: 1354 - DNA, 3054 bp, Artificial Sequence
  Description of Artificial Sequence: Synthetic polynucleotide
atgattcaaaattctgctggttatagatctttgaatactgcatctccgatgaccgtgcaggtgaagaatcagaagaaaatatgcgcccgttgtaacaagttagttatacccgatagccaaagaactaaaacaactttaaaggctctcggtaaatattatcatgaaagttgttttacctgccaagactgtcagaaacctttaaaaccgaagtacttcccatatcaagtagacaagacaagtgaatctatattgttatgccaatacgattattttagaagacataatttgttatgtcatgtatgtgataccccattgcgtggattatattataccgcattcggttacagatacgacgaagagcatttttcttgtacaatatgtgctactccttgtggggttaaaaaatgcttcatgtacggaaaccaattgtattgcaagtaccactttctcaagtatttttccaaacgttgcaaagggtgcgagttcccaatatctgatcaatatatcgagtttcctaaaggtgaagaaatacattgttggcatccggaatgttatggaattcataaatattggcatgtaaatttagcagcagaaactgttggtttgcagtaccttcccaagttggaatataacccaaattccggagacaaagatataaacccaactgcctacgagttagataaacaaatgcaggcgtttaactttattttatctaaaacgtggtctgttttatatcgttttgaggaagaggcagcttcttgcatttctgatatgtttcaatatttgacaagcaatgatcagttaaagggcatagagtctacgggtttattggtattgaaaatcgactgtcttttcagaggattagatactttaaacctctccacgaacaaaagtatgccagttaacagtgatcaagaatgcattgaaaacaacgcaatggcggccagtaaatacagcaagtttcccaaaaatttatccacaaaaattatgatatatttacaactcttaagaaagttagggacagaaaacaaaaacgaaactatcacaatttcttcttttatgtctgttattactggattagcccattttttgaaattattaacaagatttgggttatatacggctttggaaaacaataagttgactcattctgttaatccattgttgaggtttttaagagaagtagagaaaaatgagctttttgaaaataacccgtttcagtatataaagactcctgttaacgccacagatagttgcgctggatgcaataaatacatacaggaggaatgcattcaattttatgagcacagatggcatattgcttgttttacttgttctagttgccataagaatataaatccgaggagtttgacggatcccacctttaataaagagaaaaaaaagatattatgttctcactgctccattgatgatccggcctctgtgccgggtttcaaatttgttactaagttagcacaattgatttttcttttgaaaattgccttggtcaaatctagaactgtaatgttgaaatctaaagcatctaacaaggtaggcagaaactctttacagagtactatgttgaaggaacaaacttacattaggacattaaatgatattaaaagattgagatctagaagagaaagtgttagagtcactcataacaaacaacaagctagaaaatctgtgatattggaaactgcagagacagatttaaatgacccgacaaaacaaggagatagtaaaaatcttgtgattcaaacagatgacccatcttctagccaacaagtgagcacacgtgaaaatgttttcagtaatactaagacgttgacattagatgatatttctcgtattgttgccgctgaacaagcaagggagttaagacctaacgcttttgcacactttaaaaaattgaaagaaaccgatgacgaaacttccaatgttgttcccaagaaaagcggagtttattactctgaattaagtacgatggaactctctatgataagggctatcagtttgtctttattagctggtaaacaattgatatccaagactgatcctaactatactagcttagtctccatggtcttcagtaatgaaaagcaagtcacaggtagcttttggaacagaatgaaaatcatgatgagcatggagcctaaaaagcccatcactaagactgtttttggtgctcctttagatgtgttgtgcgagaaatggggtgttgattccgatttaggtgtggggccagtgaagattaggatccccataattattgacgagttgatatcttctttgaggcaaatggatatgtctgtagaaggtattttcaggaaaaatggaaatatcagaagattgagagaattgactgctaacatcgacagtaatccaacagaagctccagacttctccaaagaaaatgcaatccaattatctgctcttttgaagaaatttatcagagagcttccccaaccgattttatctacagacttatatgaattatggattaaggccgcgaaaattgatttagaggatgagaaacagcgtgttatattgttaatatattccttattacccacttacaatcgcaatttattggaggcacttttgagttttttgcattggacgtccagtttctcttacattgagaatgaaatgggatctaaaatggacattcacaatttatccacagtcataacacctaatattttatatttgagacataaagaaatttccaatgataacgtccctgacgaaccagaaagtggtttagttgattctttcgctcaaaacaagggagaaaattactttttggctattgagatagttgattacttgattactcacaatgaagaaatggcaatggttccgaaatttttaatgaatcttttaaaagatgtgcagttacaaaaattagataactacgaaagtatcaaccattttatttccaccgttatgcaaagtaaaacaatcgattattccgaatgtgacataaaaactcctgtcacagtcaaagattctaccacaacggtcatacaaggtgaaataaacaaatga

SEQ ID NO: 1355 - DNA, 2373 bp, Saccharomyces cerevisiae
atgaatcattggttagcatttttgaataagcctgaatccctaaaggaacaaaactcggattgcgaccagcagggggagatgagacatgttactgatggcactttaactaagtctccagaaagtaaaccttttcgagagcggcgttcacaaacttggatagactctgaagtacctacgtccactgaaaaatctaatgtgcaggaaagtatttcttctgatattatatcaaaactgtcgaataggcgttcccgaagaaaccgctcagagagttgggcaggttcagaagcctcttcaccttctggtaacattagtacattggaaaatgctacggaaaaaaatactttaaaatcgcctaataaatttctacaaaggggtggtttaccaactgtaggaataggctcgcaggctctgtcacctgcaggaaagcccagtacattaggaaatgtaagccctggtaaatttaccacatacaaagtacacaatagtattgaagtgaatagattttcttctacacctacaaagctcctcacgaatccccacaaagtcgcagcaatctcaaatgatgagcattatgttgtaagcaatgagagtctggaggagaatatagaggttgcgcatctagagaacgtatttcgctcatctaaaactccagatgaagaacagtccgaatatatgaaattaggagaaattaggctatcttcttcatcatatggaggaagtatttctaaagaaaatagtttacccaaggtattagatgagctccagtcccaaaatgaagagatcaaagcactaagacaaaaactagaagagaaggatgacaggattcaagaactagaagaacttaatagcatgaatgatgctaaacttcaaagaatagaagacttgcagaaggaattccacaacgaaagaaaagctgcatcaaaaaggctcaacattgttcaggaccggtttcgcaaagaaattaaaaaaattagagaagaaaaaattacagactttcaaaacaaaaacgctagcaagaaggagaagaatgaagtgactagtgccaaaactaaatgtaaagctttttctcaaagaaatattttagtttcggaactatacaggaagcaaaaacaaatcctaaacttgcagcaagaaaatgataaatttctaaaagatattaacgaatcgaataactctatagtaaaattaagatctgaagttgaaatactgaaaagcaatttgcaactttctcaagatgaaaataaaaaattacatgataatggttcgttttacgagaaaaggttaaatgatgtttacagctatatgcaaaatctttctctttttgagaaagaccttggtaaattcatactagaagaaatgaaatgtggccattccccttcgatgtttcaaaacggttttgccaagctttatccggattttcaagatatcaaaaatcttgaaaatatggagcaatacaaacaattaaaaggaaagatagaacttttggaaaagaatgaccgtatacgtcttgaaaaaatcatttctgtctttaaattgattaatgaaagattacattttatgcaacagcagcacagtcacaaaataaaatatcttcaaaaagaggcgttaacaaaagaacaacaatttcgtttggaaaaaaggagatggcatgatatcctgaacctcaaggaagaaaactttcaaaaactgaagagcgagttaaaagaaaaattaatactaagtgaaaaaattcagaaaaatgccgaagataaattgaacgattacatgaatgaacaccaggaaattgttgagaaacttcagaatcaggctttgattgcttcaagatggagcactcaaattcaagagtcagaaaacacacataagaaaattactgacgagttagctggaaaacaaagtgaaatattaaaactcgaagaaacaattctatcactaaaagaagatgtattccaagagaagctgaatttaaaaaaactatatggtgatccttctaccgaacttaattttgaaactgttggaaaatcttttccacatataacgaaggaaaagtacgactccttgggtcttgatattctgacagaccttacctatgtgcaatcgcaaaatctaatcaaaaatttattaattgtgttggatatcccattaaaaaccttcttaaaaattgtaccaacaattgtcattcaacttagatgtgagcttacacttctcacaaaatttgctaatgatttgaaccttaaggtttttggtaaacagttagatttcaaaagtagaagaaaggtcgcaatgaatgagtttttgaacaatcatgatattgctgaagtaaagcatcctcttgagtatgatttgcaagcgttgtttaaatatttcttttcttag

SEQ ID NO: 1356 - DNA, 2373 bp, Artificial Sequence
  Description of Artificial Sequence: Synthetic polynucleotide
atgaatcattggttagcatttttgaataagcctgaatccttgaaggaacaaaacagtgattgcgaccagcagggggagatgagacatgttactgatggcactttaactaagtctccagaaagtaaaccttttagagagagacgttctcaaacttggatagactctgaagtacctacgtccactgaaaaatctaatgtgcaggaaagtatttcttctgatattatatccaaattatccaataggcgttccagaagaaaccgcagtgagagttgggcaggttctgaagcctcttctccttctggtaacattagtacattggaaaatgctacggaaaaaaatactttaaaatctcctaataaatttttgcaaaggggtggtttaccaactgtaggaataggctctcaggctttatctcctgcaggaaagcccagtacattaggaaatgtaagccctggtaaatttaccacatacaaagtacacaatagtattgaagtgaatagattttcttctacacctacaaagctcctcacgaatccccacaaagtcgcagcaatctctaatgatgagcattatgttgtaagcaatgagagtttggaggagaatatagaggttgcgcatttagagaacgtatttcgctcttctaaaactccagatgaagaacagtccgaatatatgaaattaggagaaattaggttatcttcttcttcttatggaggaagtatttctaaagaaaatagtttacccaaggtattagatgagctccagtcccaaaatgaagagatcaaagcattgagacaaaaattagaagagaaggatgacaggattcaagaattggaagaacttaatagcatgaatgatgctaaacttcaaagaatagaagacttgcagaaggaattccacaacgaaagaaaagctgcatccaaaaggctcaacattgttcaggacagatttcgcaaagaaattaaaaaaattagagaagaaaaaattacagactttcaaaacaaaaacgctagcaagaaggagaagaatgaagtgactagtgccaaaactaaatgtaaagctttttctcaaagaaatattttagtttctgaattatacaggaagcaaaaacaaatcttgaacttgcagcaagaaaatgataaatttttgaaagatattaacgaaagtaataactctatagtaaaattaagatctgaagttgaaatattgaaaagcaatttgcaactttctcaagatgaaaataaaaaattacatgataatggttctttttacgagaaaaggttaaatgatgtttacagctatatgcaaaatctttctctttttgagaaagaccttggtaaattcatattggaagaaatgaaatgtggccattccccttctatgtttcaaaacggttttgccaagctttatccggattttcaagatatcaaaaatcttgaaaatatggagcaatacaaacaattaaaaggaaagatagaacttttggaaaagaatgaccgtatacgtcttgaaaaaatcatttctgtctttaaattgattaatgaaagattacattttatgcaacagcagcacagtcacaaaataaaatatcttcaaaaagaggcgttaacaaaagaacaacaatttcgtttggaaaaaaggagatggcatgatatcttgaacctcaaggaagaaaactttcaaaaattgaagagcgagttaaaagaaaaattaatattgagtgaaaaaattcagaaaaatgccgaagataaattgaacgattacatgaatgaacaccaggaaattgttgagaaacttcagaatcaggctttgattgcttccagatggagcactcaaattcaagagagtgaaaacacacataagaaaattactgacgagttagctggaaaacaaagtgaaatattaaaactcgaagaaacaattttaagtttgaaagaagatgtattccaagagaagttgaatttaaaaaaactttatggtgatccttctaccgaacttaattttgaaactgttggaaaatcttttccacatataacgaaggaaaagtacgactccttgggtcttgatattttaacagaccttacctatgtgcaatctcaaaatttgatcaaaaatttattaattgtgttggatatcccattaaaaaccttcttaaaaattgtaccaacaattgtcattcaacttagatgtgagcttacacttctcacaaaatttgctaatgatttgaaccttaaggtttttggtaaacagttagatttcaaaagtagaagaaaggtcgcaatgaatgagtttttgaacaatcatgatattgctgaagtaaagcatcctcttgagtatgatttgcaagcgttgtttaaatatttcttttcttga

SEQ ID NO: 1357 - DNA, 1470 bp, Saccharomyces cerevisiae
atgacaaaaagtgatttattatttgataaattcaacgacaaacatggaaagtttctagttttttttggtacctttgtagatacccctaaattaggagagctgagaatcagagagaaaacatctgttggagttctcaacggaatcatcaggtttgtgaacagaaattcactcgatcctgtcaaagattgtttagatcacgatagtagcttatcaccagaggatgtcacggtggttgacataattggaaaagacaagactcgaaataacagcttttattttccaggttttgttgacacgcataaccatgtctcgcaatatccaaatgtcggcgtatttgggaattctaccctgctggattggctagagaagtataccttccccatagaagccgcactagcaaacgaaaatattgcgagagaagtttacaataaggtaataagtaagacgctttctcacggtacaacgactgtggcttactataataccattgatctcaagtccactaagctcttggctcaactaagctccttattggggcagcgtgttcttgttggaaaagtgtgcatggataccaatggtcccgagtattatattgaagatactaaaacttcctttgaaagcactgtgaaagttgttaagtacatacgggaaaccatttgtgatcccctcgtaaatcctatagtgacaccaaggttcgcgccctcttgttctagagaactaatgcaacagttgtccaagctagtcaaggatgaaaacatacacgttcaaacccacttgtcggaaaataaggaggagatacagtgggttcaagatttatttcccgaatgtgagagctatactgatgtatacgacaaatatgggctgctcacagaaaaaacagtattggcacattgtattcatctaacagatgccgaagcgcgtgtgattaaacagcgtcgctgtggtatatctcattgtcccatttccaactcctctctgacttctggagagtgtagggttcgatggttgctggaccagggcataaaggttggtctaggcaccgacgtttcagccggtcattcttgtagcatactcaccaccggaaggcaggcctttgcagtttcaaggcatttggcaatgagagaaactgatcatgcaaaactttcagtctccgagtgcctatttcttgctacaatgggcggagcacaagtcttgcgtatggatgagaccttggggacttttgacgtcggtaagcagtttgacgctcaaatgatcgataccaatgctcccggctcaaacgtggatatgtttcattggcagctaaaggagaaggatcaaatgcaagagcaagagcaagagcaagggcaagacccttataagaacccaccgctgcttactaatgaagacataatcgcaaaatggttctttaacggtgatgatcgcaacaccactaaagtttgggtagccggccagcaagtctaccagatttag

SEQ ID NO: 1358 - DNA, 1470 bp, Artificial Sequence
  Description of Artificial Sequence: Synthetic polynucleotide
atgacaaaaagtgatttattatttgataaattcaacgacaaacatggaaagtttttggttttttttggtacctttgtagatacccctaaattaggagagttaagaatcagagagaaaacatctgttggagttctcaacggaatcatcaggtttgtgaacagaaatagtctcgatcctgtcaaagattgtttagatcacgatagtagcttatctccagaggatgtcacggtggttgacataattggaaaagacaagactagaaataacagcttttattttccaggttttgttgacacgcataaccatgtctctcaatatccaaatgtcggcgtatttgggaattctaccttattagattggttggagaagtataccttccccatagaagccgcattggcaaacgaaaatattgcgagagaagtttacaataaggtaataagtaagacgctttctcacggtacaacgactgtggcttactataataccattgatctcaagtccactaagctcttggctcaattgagctccttattggggcagcgtgttcttgttggaaaagtgtgcatggataccaatggtcccgagtattatattgaagatactaaaacttcctttgaaagcactgtgaaagttgttaagtacataagagaaaccatttgtgatcccctcgtaaatcctatagtgacaccaaggttcgcgccctcttgttctagagaattgatgcaacagttgtccaagttggtcaaggatgaaaacatacacgttcaaacccacttgagtgaaaataaggaggagatacagtgggttcaagatttatttcccgaatgtgagagctatactgatgtatacgacaaatatgggttactcacagaaaaaacagtattggcacattgtattcatttaacagatgccgaagcgcgtgtgattaaacagcgtcgctgtggtatatctcattgtcccatttccaactcctctttgacttctggagagtgtagggttcgttggttgttggaccagggcataaaggttggtcttggcaccgacgtttctgccggtcattcttgtagcatactcaccaccggaaggcaggcctttgcagtttccaggcatttggcaatgagagaaactgatcatgcaaaactttctgtctccgagtgcttatttcttgctacaatgggcggagcacaagtcttgcgtatggatgagaccttggggacttttgacgtcggtaagcagtttgacgctcaaatgatcgataccaatgctcccggctctaacgtggatatgtttcattggcagttgaaggagaaggatcaaatgcaagagcaagagcaagagcaagggcaagacccttataagaacccaccgttacttactaatgaagacataatcgcaaaatggttctttaacggtgatgatcgcaacaccactaaagtttgggtagccggccagcaagtctaccagatttga

SEQ ID NO: 1359 - DNA, 1173 bp, Saccharomyces cerevisiae
atgttaggactgaaagggtgtctaactattcttattggatacgttattgctgtctgtgctttgttttccagtaggggaagaaatccttcattaactgattgggaaaagttaaaggaccagaaaatatcgaatattgataactttgggttgaccggtcaacatcttttagaatttttccaggaaaacttgccatttctaagtttttcagaggaaaagtatcgtcacaaacacgtttctttatattatgatgtattcaaagaatatatcttacgtcgtgccagttcaaaaaagtgtttaccagtagactctgctatcgcaaagttgaacaaagatgttaacccaatgccagttcactcccataatgactactggaggaaacttccgctttttgaaggtctggcctatggtgctagtagtactgaagccgacgtgtggaatatagatgaaaagatcctagctgtgggtcataatgaagcgtatttggacccagttgaattgacattagacaagctatacactggccccctcttggagattttagacgaggtgaattgccaagattcagacgccgatcgcaaaaatggtgtatttttcaactctccagaaacttcactcttcttttatattgatttcaagtcggatgataacgaactaacttataaactgctgatggagcaatatttcaaatctctgattgattctggatatttgacatattacgatatgaagaaggatgaaattatttggagacctgttactgtgatactaacgggcaactacccgacgtcattggatattttagacaatggaaatgataacggctattttgagtcaagtcaaaggtttgcatttctagatgcgccgttgttaagtttggagcccaaatactcaaagctatctgtagctgcgacggtttcgttcagccaattaatgaaacattgtggttctgatcattggaaagtatcgctaagaggtcgtatggattcgaatgagatcagttgtgctaaaagcataattgatggtgctcacgcattgaaacttaaaacaagaatttggggagccccaacctggccagctaacctggtggaaactatttctcgccaaattattcatgacttgggttccgatttacttaacctggacaatttattcatggcatcgtcattgatataa

SEQ ID NO: 1360 - DNA, 1173 bp, Artificial Sequence
  Description of Artificial Sequence: Synthetic polynucleotide
atgttaggattgaaagggtgtttaactattcttattggatacgttattgctgtctgtgctttgttttccagtaggggaagaaatccttctttaactgattgggaaaagttaaaggaccagaaaatatccaatattgataactttgggttgaccggtcaacatcttttagaatttttccaggaaaacttgccatttttgagtttttctgaggaaaagtatcgtcacaaacacgtttctttatattatgatgtattcaaagaatatatcttacgtcgtgccagttctaaaaagtgtttaccagtagactctgctatcgcaaagttgaacaaagatgttaacccaatgccagttcactcccataatgactactggaggaaacttccgctttttgaaggtttagcctatggtgctagtagtactgaagccgacgtgtggaatatagatgaaaagatcttggctgtgggtcataatgaagcgtatttggacccagttgaattgacattagacaagttgtacactggccccctcttggagattttagacgaggtgaattgccaagattctgacgccgatcgcaaaaatggtgtatttttcaactctccagaaacttctctcttcttttatattgatttcaagagtgatgataacgaattgacttataaattattgatggagcaatatttcaaatctttgattgattctggatatttgacatattacgatatgaagaaggatgaaattatttggagacctgttactgtgatattaacgggcaactacccgacgtctttggatattttagacaatggaaatgataacggctattttgagagcagtcaaaggtttgcatttttggatgcgccgttgttaagtttggagcccaaatactccaagttatctgtagctgcgacggtttctttcagccaattaatgaaacattgtggttctgatcattggaaagtatctttgagaggtcgtatggattctaatgagatcagttgtgctaaaagcataattgatggtgctcacgcattgaaacttaaaacaagaatttggggagccccaacctggccagctaacttggtggaaactatttctcgccaaattattcatgacttgggttccgatttacttaacttggacaatttattcatggcatcttctttgatatga

SEQ ID NO: 1361 - DNA, 939 bp, Saccharomyces cerevisiae
atgactgctcaacaaggtgtaccaataaagataaccaataaggagattgctcaagaattcttggacaaatatgacacgtttctgttcgattgtgatggtgtattatggttaggttctcaagcattaccatacaccctggaaattctaaaccttttgaagcaattgggcaaacaactgatcttcgttacgaataactctaccaagtcccgtttagcatacacgaaaaagtttgcttcgtttggtattgatgtcaaagaagaacagattttcacctctggttatgcgtcagctgtttatattcgtgactttctgaaattgcagcctggcaaagataaggtatgggtatttggagaaagcggtattggtgaagaattgaaactaatggggtacgaatctctaggaggtgccgattccagattggatacgccgttcgatgcagctaaatcaccatttttggtgaacggccttgataaggatgttagttgtgttattgctgggttagacacgaaggtaaattaccaccgtttggctgttacactgcagtatttgcagaaggattctgttcactttgttggtacaaatgttgattctactttcccgcaaaagggttatacatttcccggtgcaggctccatgattgaatcattggcattctcatctaataggaggccatcgtactgtggtaagccaaatcaaaatatgctaaacagcattatatcggcattcaacctggatagatcaaagtgctgtatggttggtgacagattaaacaccgatatgaaattcggtgttgaaggtgggttaggtggcacactactcgttttgagtggtattgaaaccgaagagagagccttgaagatttcgcacgattatccaagacctaaattttacattgataaacttggtgacatctacaccttaaccaataatgagttatag

SEQ ID NO: 1362 - DNA, 939 bp, Artificial Sequence
  Description of Artificial Sequence: Synthetic polynucleotide
atgactgctcaacaaggtgtaccaataaagataaccaataaggagattgctcaagaattcttggacaaatatgacacgtttcttttcgattgtgatggtgtattatggttaggttctcaagcattaccatacaccttagaaattttgaaccttttgaagcaattgggcaaacaattgatcttcgttacgaataactctaccaagtcccgtttagcatacacgaaaaagtttgcttcttttggtattgatgtcaaagaagaacagattttcacctctggttatgcgtctgctgtttatattcgtgactttttgaaattgcagcctggcaaagataaggtatgggtatttggagaaagcggtattggtgaagaattgaaattaatggggtacgaatctttgggaggtgccgattccagattggatacgccgttcgatgcagctaaatctccatttttggtgaacggccttgataaggatgttagttgtgttattgctgggttagacacgaaggtaaattaccaccgtttggctgttacattacagtatttgcagaaggattctgttcactttgttggtacaaatgttgattctactttcccgcaaaagggttatacatttcccggtgcaggctccatgattgaatctttggcattcagttctaataggaggccatcttactgtggtaagccaaatcaaaatatgttgaacagcattatatctgcattcaaccttgatagatccaagtgctgtatggttggtgacagattaaacaccgatatgaaattcggtgttgaaggtgggttaggtggcacattactcgttttgagtggtattgaaaccgaagagagagccttgaagatttctcacgattatccaagacctaaattttacattgataaacttggtgacatctacaccttaaccaataatgagttatga

SEQ ID NO: 1363 - DNA, 504 bp, Saccharomyces cerevisiae
atgtctactattccctcagaaatcatcaattggaccatcttaaatgaaattatatctatggatgacgatgattccgatttttctaaaggtctaattattcaatttatcgaccaggcacaaacaacttttgctcaaatgcaacgacagctggacggtgaaaaaaatcttaccgaattagacaatctgggccattttttaaagggttcttctgctgcattaggcttacaaagaattgcctgggtttgtgaaagaattcaaaacttgggaagaaaaatggaacatttcttccccaacaagaccgaattggtcaacactctgagcgataaatcgattattaatggaatcaatattgatgaagatgacgaggaaataaagatacaagtggacgataaagacgaaaattccatatatctcatcttgatagcaaaagctttgaaccagtctaggttggagttcaaactggcgagaattgagttatctaaatattacaacacaaacctataa

SEQ ID NO: 1364 - DNA, 504 bp, Artificial Sequence
  Description of Artificial Sequence: Synthetic polynucleotide
atgtctactattcccagtgaaatcatcaattggaccatcttaaatgaaattatatctatggatgacgatgattccgatttttctaaaggtttgattattcaatttatcgaccaggcacaaacaacttttgctcaaatgcaaagacagttagacggtgaaaaaaatcttaccgaattagacaatttgggccattttttaaagggttcttctgctgcattaggcttacaaagaattgcctgggtttgtgaaagaattcaaaacttgggaagaaaaatggaacatttcttccccaacaagaccgaattggtcaacactttaagcgataaatccattattaatggaatcaatattgatgaagatgacgaggaaataaagatacaagtggacgataaagacgaaaattccatatatctcatcttgatagcaaaagctttgaaccagtctaggttggagttcaaattagcgagaattgagttatctaaatattacaacacaaacttgtga

SEQ ID NO: 1365 - DNA, 2241 bp, Saccharomyces cerevisiae
atgagtaagatactattctgcaaatctaaagtgttcttacacccaacaagcgatgctagagataatattgctggtttcctgctactcacattggaagcgaataagctatcccaccaagcaattctccaatatatcccagaatctggcttatccacattagagatatcaaaactactaaaacatgaagctaaagtgggcacatgtccaacttctacaccatttgttattgaaaattcaataaactttagtaacctggtcaatacttctttaggtcaagctttcgaaatttctctctcacaaatatactgcatccaatttaggcctcctagtccaaatggttggtatgtcggatctctggtaatatatcccttgacagaacagtttacgggctttcaacctcctgtcttgttctttcatgaccaactctgcccatcaactacggacaagttaaaaagactacgcaaatccatgaacccatttgatgactcggacgaattgtattggggtggcgtagatttgagaaacaaaatcaacgaactgatggaactcaagaaatcaaacttagagccagagttttggttagtaaatccctctttgaatgatttgagaaatttcgtttccaaggatctattggaaagttataacaattcgaagaaagatacaactgaactcgctaccgccggtgtgaaactaaacgagaaattccaagaatggaaatggaacgtaatgagcaagatagcagacgtgactaccaagtctaccaattttatcgatagttggctgactaacaactcacccatacaaaaatcacaaatcgacaatgaatacttgcaaaagcttctgaacaatgagaaggttaaacaaattgaacaggattatgactctgcaagagtgtatttggcaaactggtcattaggagtaaaacaggaagctgagaggtatcaaaagcagaacaaactctttgattcgtataggaataacattttcaacgacctgaatctaactgatgaattaagtgatactgaaataaataatgctctgcaaagacaatttcctttaacggaagcgaaatggaattcgctatgggatgagaacgatgggaggctgagggtcacggtaaacgaagttaaggatttcatatttcatggtgggttagaaaatgacagtttgcgagggaaagtttggggttttctcttagaaatatatccgtgggattcttctcaagacgagagggtacaaatcgatcaaactttagccgcggaatacgatcaattgaaactaacctggtcaaaagattttttacaatttgacgatgaagatgaagaggaatattggaacgatcaattattcagaatatctaaagatgtgagacgctgtgatagaaacttggagatatttcaatacaataccatcgatggattaccaccaccgccacaacaactcccagcaaatgaaaataacagtaccagccccgaatccgctaatgacgagagcgatgatgcagacgatggagtcaggaacccacatttgatacatttacaaaacattcttatcacttataatgtctacaacacaaacttaggctacgtgcaggggatgaccgatcttttatcgcctatttatgtcatcatgaaggaagaatggaaaacgttttggtgttttacgcacttcatggacattatggaaagaaattttctaagagaccagagtggcatccatgaacaaatgttaactctcgtggaattggtacaattaatgctacccgaattgagcgaacatttaaacaagtgtgattcaggaaacttgttcttttgctttcgaatgcttctagtatggttcaagagagaatttgaaatggaagatattatgcacatttgggagaatttctggactttctactacagttcacaattccaattattcttcatgttggccattctacagaaaaactcacaagctattttacaacatctaaatcagttcgaccaaatattaaaattttttaatgaacttaacgggaagttggattggaatgacctaatggttagagcagagcttttgttcaagaagtttgagaaaatgatgcacgtcatggaaagagatttacaaaacgtatcctcctcttcatcctcatcctctaccggcgtattgccttgtcagagcgagaggttgaccctgcttctttctaaaaaacctatcataagacatgaagggcaaaggagcaaaaattccgttaaatag

SEQ ID NO: 1366 - DNA, 2241 bp, Artificial Sequence
  Description of Artificial Sequence: Synthetic polynucleotide
atgagtaagatattattctgcaaatctaaagtgttcttacacccaacaagcgatgctagagataatattgctggtttcttacttctcacattggaagcgaataagttatcccaccaagcaattctccaatatatcccagaatctggcttatccacattagagatatccaaattattgaaacatgaagctaaagtgggcacatgtccaacttctacaccatttgttattgaaaattctataaactttagtaacttggtcaatacttctttaggtcaagctttcgaaatttctctctctcaaatatactgcatccaatttaggcctcctagtccaaatggttggtatgtcggatctttagtaatatatcccttgacagaacagtttacgggctttcaacctcctgtcttgttctttcatgaccaactctgcccatctactacggacaagttaaaaagattacgcaaatccatgaacccatttgatgacagtgacgaattgtattggggtggcgtagatttgagaaacaaaatcaacgaattgatggaactcaagaaaagtaacttagagccagagttttggttagtaaatccctctttgaatgatttgagaaatttcgtttccaaggatttattggaaagttataacaattctaagaaagatacaactgaactcgctaccgccggtgtgaaattgaacgagaaattccaagaatggaaatggaacgtaatgagcaagatagcagacgtgactaccaagtctaccaattttatcgatagttggttgactaacaactctcccatacaaaaatctcaaatcgacaatgaatacttgcaaaagcttttgaacaatgagaaggttaaacaaattgaacaggattatgactctgcaagagtgtatttggcaaactggtctttaggagtaaaacaggaagctgagaggtatcaaaagcagaacaaactctttgattcttataggaataacattttcaacgacttgaatttaactgatgaattaagtgatactgaaataaataatgctttacaaagacaatttcctttaacggaagcgaaatggaattctctttgggatgagaacgatgggaggttgagggtcacggtaaacgaagttaaggatttcatatttcatggtgggttagaaaatgacagtttgagagggaaagtttggggttttctcttagaaatatatccgtgggattcttctcaagacgagagggtacaaatcgatcaaactttagccgcggaatacgatcaattgaaattgacctggtccaaagattttttacaatttgacgatgaagatgaagaggaatattggaacgatcaattattcagaatatctaaagatgtgagacgctgtgatagaaacttggagatatttcaatacaataccatcgatggattaccaccaccgccacaacaactcccagcaaatgaaaataacagtaccagccccgaatccgctaatgacgagagcgatgatgcagacgatggagtcaggaacccacatttgatacatttacaaaacattcttatcacttataatgtctacaacacaaacttaggctacgtgcaggggatgaccgatcttttatctcctatttatgtcatcatgaaggaagaatggaaaacgttttggtgttttacgcacttcatggacattatggaaagaaattttttaagagaccagagtggcatccatgaacaaatgttaactctcgtggaattggtacaattaatgttgcccgaattgagcgaacatttaaacaagtgtgattctggaaacttgttcttttgctttagaatgcttttggtatggttcaagagagaatttgaaatggaagatattatgcacatttgggagaatttctggactttctactacagttctcaattccaattattcttcatgttggccattttacagaaaaactctcaagctattttacaacatttgaatcagttcgaccaaatattaaaattttttaatgaacttaacgggaagttggattggaatgacttgatggttagagcagagcttttgttcaagaagtttgagaaaatgatgcacgtcatggaaagagatttacaaaacgtatcctcctcttcttcctcctcctctaccggcgtattgccttgtcagagcgagaggttgaccttacttctttctaaaaaacctatcataagacatgaagggcaaaggagcaaaaattccgttaaatga

SEQ ID NO: 1367 - DNA, 1377 bp, Saccharomyces cerevisiae
atgtaccaaggcccaccgcaaccgcctcctcaagctgtgccgatgccttacattgtgaataataacacaccaccgtacccaaatggtaatattaactttcctcccaccgcgcagcagaatataccgcccacggtttatccacaacaagtgccatttccaggtcaaccacaggggggtcaatttccacagccttcatcagaacagcaggtgtttaaccagcttccacaagtgactcaaacttttcacaactctgcgcagaatacgaatgcaactgggggccctggcagcgggtctatgccaatgtttacgccggtagcatcctttccccatcccatggctacagcagcaacggcagctgctccgttaccacggtctgcatcccaggcatctttatctatgttacgggtgccgtatcatgtaagaaaatacttatctaatttggcgatgttgaaattgtacgaaataataaatgaggtgaatacggcaatgggtaagattggcctgctttcattctggacagaattaatatcagatatttttacacctgatgcagttataaggtatagtaaaaagtctatgacagattatagagaattcgaatttatcatcccagtgttcccagttatttgctctacattaggcagatttggcatcgttagaatggaagttaaggttttacaattgaaaacacaagttctaagtaattctacgatttttttcaactgtcctcgtgtcacatttgtctattattatcctgatggttcatatattacacatttttcccaaatgaaaggtgctttcgatttggacttgaaaattaattggctggacgtatctatgcatagttttgtccctgatattgaatggaatgcagtggaacggcttttgagtgatgacacaaagtctacagaaattgaacaaatattccgtaaattgaaacaagaagatgtcaaagagcaagggaattcttttgcagaaaataatgctacgaatgttcctccgaattttgaggccatcactcagctgagatcatattttgacgtattcagaaacgtctctgtgtttggcactcaagaagggttgatgagagtcatgcaaataagtaccgttatgtctactttgaaaaaccttcgaaagtttcaaattgaaaagaacattgatagtcccgtgaccgccctaagtgcgtacattgacgccgacaagaaggacagtggaagcgagcccttgcacgcaaagaggcgacgcaacagcggtatctctcctcgcaccacgacgttggggccaaacggcaactccaatacaagcaatgaagagcttccaacaagtgatgtgaatgatattaacaaagacatgacaaaaaagaagatgaagttttaa

SEQ ID NO: 1368 - DNA, 1377 bp, Artificial Sequence
  Description of Artificial Sequence: Synthetic polynucleotide
atgtaccaaggcccaccgcaaccgcctcctcaagctgtgccgatgccttacattgtgaataataacacaccaccgtacccaaatggtaatattaactttcctcccaccgcgcagcagaatataccgcccacggtttatccacaacaagtgccatttccaggtcaaccacaggggggtcaatttccacagccttcttctgaacagcaggtgtttaaccagcttccacaagtgactcaaacttttcacaactctgcgcagaatacgaatgcaactgggggccctggcagcgggtctatgccaatgtttacgccggtagcatcctttccccatcccatggctacagcagcaacggcagctgctccgttaccaagatctgcatcccaggcatctttatctatgttaagagtgccgtatcatgtaagaaaatacttatctaatttggcgatgttgaaattgtacgaaataataaatgaggtgaatacggcaatgggtaagattggccttctttctttctggacagaattaatatctgatatttttacacctgatgcagttataaggtatagtaaaaagtctatgacagattatagagaattcgaatttatcatcccagtgttcccagttatttgctctacattaggcagatttggcatcgttagaatggaagttaaggttttacaattgaaaacacaagttttgagtaattctacgatttttttcaactgtcctcgtgtcacatttgtctattattatcctgatggttcttatattacacatttttcccaaatgaaaggtgctttcgatttggacttgaaaattaattggttagacgtatctatgcatagttttgtccctgatattgaatggaatgcagtggaaagacttttgagtgatgacacaaagtctacagaaattgaacaaatattccgtaaattgaaacaagaagatgtcaaagagcaagggaattcttttgcagaaaataatgctacgaatgttcctccgaattttgaggccatcactcagttaagatcttattttgacgtattcagaaacgtctctgtgtttggcactcaagaagggttgatgagagtcatgcaaataagtaccgttatgtctactttgaaaaaccttagaaagtttcaaattgaaaagaacattgatagtcccgtgaccgccttgagtgcgtacattgacgccgacaagaaggacagtggaagcgagcccttgcacgcaaagaggagacgcaacagcggtatctctcctcgcaccacgacgttggggccaaacggcaactccaatacaagcaatgaagagcttccaacaagtgatgtgaatgatattaacaaagacatgacaaaaaagaagatgaagttttga

SEQ ID NO: 1369 - DNA, 111 bp, Saccharomyces cerevisiae
atgatctctgatgaacagctgaactccttggccatcaccttcggtattgtgatgatgactttaattgtcatttaccatgctgttgactccaccatgtctcctaagaactaa

SEQ ID NO: 1370 - DNA, 111 bp, Artificial Sequence
  Description of Artificial Sequence: Synthetic polynucleotide
atgatctctgatgaacagttgaactccttggccatcaccttcggtattgtgatgatgactttaattgtcatttaccatgctgttgactccaccatgtctcctaagaactga

SEQ ID NO: 1371 - DNA, 3378 bp, Saccharomyces cerevisiae
atgaaaagatatgagcgagatcgaagtcccactcctgatcctgatattgtgaaaggttcatactctcaaacatcactcaggtcactacatgaacttaactataagaatcctgccggtataagcgggcttagctttgcaggaagcccacaacaatccgtggcatccttatcgcaaatgcggctggaaaatttggttaaggacaaacactgggaggaagtagaggactttgggctggaagagctgagagatgggttttttgatgctgcttttaccaagccggacagcaaagctaggtctcctaacagcgacatcgatgacgacaatggcgctgcaaggaaaaaactgcaatctggttttaccaagctttccgaatatgtttggactgctatctacaggcccattattcatttccctagagatattagaaaaaatggggtatccatattcaagttttttattgcttatttcattgctatcgtgatttgcgttatcaggccttctggtaggtggattggccatgagttcaggtattttctacccatcgcagtacttatacatcatccggtcagaaatattggtgttcaactggaaatgactataagctccattatcggcgcaagttttggcctgggatggtcggctttggcatggtacatttccacagcgacaaagccgaccgcaaactaccagggaggaattttatttcagagtctgactatggccctcttatttgccatctggctaaggtctgtttaccgtcggttcttctatttcacaacttcgttttcgatatcgattatattcactcatacagttcggttggcctcatccaagtttgatttgaagtggcaaattttttgggattttggaatctcatatctcttcggccttttgctatctctcttggtttgtgtatgtgtatcaccacatagtggcaatgcagagttaatggaacattataacaagtgtctacagaccacaaagacctttttaatggcactagtagatactgaattaataaagtccaaagaacaaatttacctagcccaagtaaaaatggtgaaaacactaaacattgatttatctcaaggttttagagattttgtaaatcagttgacaatttccaggtttgaccttcaatcgttgaagagtttaagaaattctttaactgccatggaaacttctctgagagtattacccattgcacccaaaatttttaatgatgatgaattgaaaaagatgtatgaagaattggagaagtatagatcggattctgcgaccctgagcaaagaagcaagcgctagccctcaatcttcaggaattccaacaagagaaaacacgcccagtgcctttaagcctatcggtccggggcttttaaaaaatgaaatctacattaatgcattaaaggcgtccttctcgaaaagcatcttcaacttaatactggaaatgatcttcgttttggaaaatctatcaagagtactaaagaaatacgagtctccaaatcaaaaaaacaacttagatgagtgtgtcaaaatattaagtcactcgcattctaaattaaagaggaaaatttacaaactagatgtttgttacagggattttgtgaattctagttttttttcacaggaactgttgaatgacgaagagtctgtcgatattttcctttttctaagatatttgagaaactccgcaaggcagctagttactgttatccacgattgccaagttttgggtgagaatattcactggagaattgctctgccatcatatccactgtctcgtgcgttgacaagattgcccaaacaatgtgttctcgatgaaggtgcaggaaatgttcttcattattttgaggccaaacgtgatgtcgatgaaatttttgaaagagtttataacacctacacgtcaagacacaagtataacaaaggcgaagaagaagcgctgagacttgattcacaaggtggtgacgaaaagtcacagaatcgcaaaaaccacactatttccatcagagcaattgatcacaacgacttcaattttcatacaactcaaaatccttggagatttaaactatggaaattgagtagaattttatctggtgatgaatgtaagtggacactaaagattactttttgtatgatatttttgtgtctaccaacttggctacctgaatcctatcactggtaccaagaatttcattgttggtgggccccactcacgttttacttattagcacatagaagatactctggtaactgggcgttggtaatgaggagattaatctgtggtatagtaggtatcttttgggggtgggctgccaaccaatcgagacattttggtagtccatacgtggtttgcacgtttgctggtctgatcgtggtcccatttagcatcaactttcttgtctatagaaacaccaaatcgagcttcactgcattaatgtgctttaccataattgctcttgaaccatacagcaaacctaatagacattataacttaaccaccgctggaatatggaaatctacgtgggttacaggcttggcacttattatcggtattttggtttcgattcccatcaactggatagtgtggccctttagagctaggacagaactaagagatagtatgtcatcattactggcacacttgggccagtcctaccaaaccgtggcggaccggtatttatacagggatgccgacgacgcacctactgatttaactttcgcattttcccacattcgtgaagttagactgactcaaagtcttgaagcaatcagggaacttttgaagaaagcccgtcatgagccaatcattatttccaacttcaatcctgagaagtacgcaagtctaatcaattcatgccaatttttgttatctaagatcattgaagcgagaatttcaggtgcattttttgaaatttgggatcaggattttgatattgaaaccacgagagccttactatcgctacgaagagatagtgtctcatcagtgattttcgttttttacattttatccaattgtttcagatcaaaaaacaagataccgcgatacttgccaaatccaattatgtcacgtaaaaaactttaccacttcatcaagaaatttagtgaaatgaaggaccaatcacattcgaatttaaattcaggaggcaattctatggagaagaacctattcaagaaaatataccaacagaaggcatcaagttcagggcagcaacaattacccttgccttcagtggcgaacagctctgaaatagacagtgaaaaaatgcattggacagaggttcacggcattgcatttgcgagagcttttacggatatttctgaagccttgttccaggtagagagttgtgcaaaagatatactgggcgaagaaaacttttaa

SEQ ID NO: 1372 - DNA, 3378 bp, Artificial Sequence
  Description of Artificial Sequence: Synthetic polynucleotide
atgaaaagatatgagagagatagaagtcccactcctgatcctgatattgtgaaaggttcttactctcaaacatctctcaggtccttgcatgaacttaactataagaatcctgccggtataagcgggcttagctttgcaggaagcccacaacaatccgtggcatccttatctcaaatgagattagaaaatttggttaaggacaaacactgggaggaagtagaggactttgggttggaagagttaagagatgggttttttgatgctgcttttaccaagccggacagcaaagctaggtctcctaacagcgacatcgatgacgacaatggcgctgcaaggaaaaaattacaatctggttttaccaagctttccgaatatgtttggactgctatctacaggcccattattcatttccctagagatattagaaaaaatggggtatccatattcaagttttttattgcttatttcattgctatcgtgatttgcgttatcaggccttctggtaggtggattggccatgagttcaggtattttttgcccatcgcagtacttatacatcatccggtcagaaatattggtgttcaattggaaatgactataagctccattatcggcgcaagttttggcttgggatggagtgctttggcatggtacatttccacagcgacaaagccgaccgcaaactaccagggaggaattttatttcagagtttgactatggccctcttatttgccatctggttaaggtctgtttaccgtagattcttctatttcacaacttctttttccatatctattatattcactcatacagttagattggcctcttccaagtttgatttgaagtggcaaattttttgggattttggaatcagttatctcttcggccttttgttatctctcttggtttgtgtatgtgtatctccacatagtggcaatgcagagttaatggaacattataacaagtgtttacagaccacaaagacctttttaatggcattggtagatactgaattaataaagtccaaagaacaaatttacttggcccaagtaaaaatggtgaaaacattgaacattgatttatctcaaggttttagagattttgtaaatcagttgacaatttccaggtttgaccttcaatctttgaagagtttaagaaattctttaactgccatggaaacttctttgagagtattacccattgcacccaaaatttttaatgatgatgaattgaaaaagatgtatgaagaattggagaagtatagaagtgattctgcgaccttgagcaaagaagcaagcgctagccctcaatcttctggaattccaacaagagaaaacacgcccagtgcctttaagcctatcggtccggggcttttaaaaaatgaaatctacattaatgcattaaaggcgtccttctccaaaagcatcttcaacttaatattggaaatgatcttcgttttggaaaatttatctagagtattgaagaaatacgagtctccaaatcaaaaaaacaacttagatgagtgtgtcaaaatattaagtcactctcattctaaattaaagaggaaaatttacaaattggatgtttgttacagggattttgtgaattctagttttttttcccaggaattattgaatgacgaagagtctgtcgatattttcctttttttaagatatttgagaaactccgcaaggcagttggttactgttatccacgattgccaagttttgggtgagaatattcactggagaattgctttgccatcttatccattatctcgtgcgttgacaagattgcccaaacaatgtgttctcgatgaaggtgcaggaaatgttcttcattattttgaggccaaacgtgatgtcgatgaaatttttgaaagagtttataacacctacacgtccagacacaagtataacaaaggcgaagaagaagcgttaagacttgattctcaaggtggtgacgaaaagtctcagaatcgcaaaaaccacactatttccatcagagcaattgatcacaacgacttcaattttcatacaactcaaaatccttggagatttaaattatggaaattgagtagaattttatctggtgatgaatgtaagtggacattgaagattactttttgtatgatatttttgtgtttgccaacttggttacctgaatcctatcactggtaccaagaatttcattgttggtgggccccactcacgttttacttattagcacatagaagatactctggtaactgggcgttggtaatgaggagattaatctgtggtatagtaggtatcttttgggggtgggctgccaaccaatctagacattttggtagtccatacgtggtttgcacgtttgctggtttgatcgtggtcccatttagcatcaactttcttgtctatagaaacaccaaaagtagcttcactgcattaatgtgctttaccataattgctcttgaaccatacagcaaacctaatagacattataacttaaccaccgctggaatatggaaatctacgtgggttacaggcttggcacttattatcggtattttggtttctattcccatcaactggatagtgtggccctttagagctaggacagaattgagagatagtatgtcttctttattggcacacttgggccagtcctaccaaaccgtggcggacagatatttatacagggatgccgacgacgcacctactgatttaactttcgcattttcccacattcgtgaagttagattaactcaaagtcttgaagcaatcagggaacttttgaagaaagcccgtcatgagccaatcattatttccaacttcaatcctgagaagtacgcaagtttaatcaattcttgccaatttttgttatctaagatcattgaagcgagaatttctggtgcattttttgaaatttgggatcaggattttgatattgaaaccacgagagccttattaagtcttagaagagatagtgtcagttctgtgattttcgttttttacattttatccaattgtttcagaagtaaaaacaagataccgcgctacttgccaaatccaattatgtcccgtaaaaaactttaccacttcatcaagaaatttagtgaaatgaaggaccaatctcattctaatttaaattctggaggcaattctatggagaagaacttgttcaagaaaatataccaacagaaggcaagtagttccgggcagcaacaattacccttgccttctgtggcgaacagctctgaaatagacagtgaaaaaatgcattggacagaggttcacggcattgcatttgcgagagcttttacggatatttctgaagccttgttccaggtagagagttgtgcaaaagatatattgggcgaagaaaacttttga

SEQ ID NO: 1373 - DNA, 1008 bp, Saccharomyces cerevisiae
atggcagctgcaccatggtatattagacagcgtgacacggatttattgggtaaattcaagttcatacagaatcaagaagacggcagattaagggaagctacaaacggaacggtgaattcacgatggtcgttgggggtcagcatagaacctcgtaacgatgctagaaacagatacgttaacattatgccgtatgagaggaaccgcgttcatttgaagactctatccgggaatgattacattaatgcctcgtatgtcaaagtgaacgtgccagggcagagcatcgaaccgggctactatattgctactcaaggtcccacgcgtaaaacttgggatcagttttggcaaatgtgctatcacaattgtcctttagacaatattgtcattgtgatggtcacgcctctggtagaatacaatagggagaagtgctaccagtactggcctcgcggtggtgtagacgatacggttagaatagcatcaaaatgggaaagtccgggcggcgccaatgatatgactcaatttccctctgatttgaaaatagagtttgttaacgtacataaggtgaaggactattatacggtcaccgatatcaaactcacacccacggaccctcttgtaggacctgtcaaaactgttcaccacttttacttcgacctttggaaagatatgaacaagccagaggaagtagtacccataatggaattatgcgctcactcccacagcttgaattcccgcgggaaccccattatcgtacactgttccgcaggcgtgggcagaacggggacgttcattgccctagatcatctcatgcatgataccttggattttaaaaatattacagaacggtcaaggcattcagacagggctacagaggagtacacacgggacttgatcgaacagatcgtgttacagttgcgctcgcaaagaatgaaaatggttcagacaaaggatcagttcctatttatctaccatgctgccaagtatcttaacagtctttccgtgaaccaatag

SEQ ID NO: 1374 - DNA, 1008 bp, Artificial Sequence
  Description of Artificial Sequence: Synthetic polynucleotide
atggcagctgcaccatggtatattagacagcgtgacacggatttattgggtaaattcaagttcatacagaatcaagaagacggcagattaagggaagctacaaacggaacggtgaattctcgttggtctttgggggtcagcatagaacctcgtaacgatgctagaaacagatacgttaacattatgccgtatgagaggaaccgcgttcatttgaagactttatccgggaatgattacattaatgcctcttatgtcaaagtgaacgtgccagggcagagcatcgaaccgggctactatattgctactcaaggtcccacgcgtaaaacttgggatcagttttggcaaatgtgctatcacaattgtcctttagacaatattgtcattgtgatggtcacgcctttggtagaatacaatagggagaagtgctaccagtactggcctcgcggtggtgtagacgatacggttagaatagcatccaaatgggaaagtccgggcggcgccaatgatatgactcaatttccctctgatttgaaaatagagtttgttaacgtacataaggtgaaggactattatacggtcaccgatatcaaactcacacccacggaccctcttgtaggacctgtcaaaactgttcaccacttttacttcgacctttggaaagatatgaacaagccagaggaagtagtacccataatggaattatgcgctcactcccacagcttgaattcccgcgggaaccccattatcgtacactgttccgcaggcgtgggcagaacggggacgttcattgccttggatcatctcatgcatgataccttggattttaaaaatattacagaaagaagtaggcattctgacagggctacagaggagtacacaagagacttgatcgaacagatcgtgttacagttgcgctctcaaagaatgaaaatggttcagacaaaggatcagttcttatttatctaccatgctgccaagtatcttaacagtctttccgtgaaccaatga

SEQ ID NO: 1375 - DNA, 1842 bp, Saccharomyces cerevisiae
atggctgaaggtgttttccaaggtgctatcggtatcgatttaggtacaacctactcttgtgttgctacttacgaatcctccgttgaaattattgccaacgaacaaggtaacagagtcaccccatctttcgttgctttcactccagaagaaagattgattggtgatgctgccaagaaccaagctgctttgaacccaagaaacactgtcttcgatgctaagcgtttgattggtagaagattcgacgacgaatctgttcaaaaggacatgaagacctggcctttcaaggttatcgacgtcgatggtaacccagtcatcgaagtccaatacttggaagaaaccaagactttctccccacaagaaatttccgctatggttttgaccaagatgaaggaaattgctgaagctaagattggtaagaaggttgaaaaggccgtcattactgtcccagcttactttaacgacgctcaaagacaagctaccaaggatgccggtgccatttctggtttgaacgttttgcgtatcatcaacgaacctactgccgctgctattgcttacggtctaggtgctggtaagtccgaaaaggaaagacatgttttgattttcgatttgggtggtggtactttcgatgtttccttgttgcacattgctggtggtgtttacactgttaaatctacttccggtaacactcacttgggtggtcaagatttcgacaccaacttgttggaacacttcaaggctgaattcaagaagaagactggtttggacatctccgacgatgccagagctttgagaagattgagaactgctgctgaaagagctaagagaaccttatcttctgtcactcaaactaccgttgaagttgactctttgtttgacggtgaagatttcgaatcctctttgactagagctagatttgaagacttgaacgccgcattgttcaagtctactttggaacctgttgaacaagttttgaaggatgctaagatctctaagtctcaaatcgacgaagttgtcttggttggtggttccaccagaattccaaaggtccaaaagttgttgtctgacttctttgacggtaagcaattggaaaaatctattaacccagatgaagctgttgcttacggtgctgctgttcaaggtgctatcttgaccggccaatccacatctgacgaaaccaaggacttgttgttgttagatgttgctccattatctctaggtgttggtatgcaaggtgacatgttcggtatcgttgttccaagaaacactactgttccaaccatcaagagaagaacctttactacatgtgctgacaaccaaaccaccgttcaattcccagtctaccaaggtgaacgtgttaactgtaaagaaaacactttgttgggtgaattcgacttgaagaacatcccaatgatgccagctggtgaaccagtcttggaagctatcttcgaagttgatgctaacggtatcttgaaggttactgccgtcgaaaagtctaccggtaagtcttctaacatcactatctctaacgctgttggtagattgtcttctgaagaaattgaaaagatggttaaccaagctgaagagttcaaggctgccgatgaagcttttgccaagaagcacgaagctagacaaagattggaatcctacgttgcctccatcgaacaaactgtcactgacccagtcttgtcttctaaattgaagagaggttccaagtccaagattgaagctgctttgtccgatgctttggctgctttgcaaatcgaagacccatctgctgatgaattgagaaaggctgaagttggtttgaagagagttgtcaccaaggccatgtcttctcgttaa

SEQ ID NO: 1376 - DNA, 1842 bp, Artificial Sequence
  Description of Artificial Sequence: Synthetic polynucleotide
atggctgaaggtgttttccaaggtgctatcggtatcgatttaggtacaacctactcttgtgttgctacttacgaatcctccgttgaaattattgccaacgaacaaggtaacagagtcaccccatctttcgttgctttcactccagaagaaagattgattggtgatgctgccaagaaccaagctgctttgaacccaagaaacactgtcttcgatgctaagcgtttgattggtagaagattcgacgacgaatctgttcaaaaggacatgaagacctggcctttcaaggttatcgacgtcgatggtaacccagtcatcgaagtccaatacttggaagaaaccaagactttctccccacaagaaatttccgctatggttttgaccaagatgaaggaaattgctgaagctaagattggtaagaaggttgaaaaggccgtcattactgtcccagcttactttaacgacgctcaaagacaagctaccaaggatgccggtgccatttctggtttgaacgttttgcgtatcatcaacgaacctactgccgctgctattgcttacggtttaggtgctggtaagtccgaaaaggaaagacatgttttgattttcgatttgggtggtggtactttcgatgtttccttgttgcacattgctggtggtgtttacactgttaaatctacttccggtaacactcacttgggtggtcaagatttcgacaccaacttgttggaacacttcaaggctgaattcaagaagaagactggtttggacatctccgacgatgccagagctttgagaagattgagaactgctgctgaaagagctaagagaaccttatcttctgtcactcaaactaccgttgaagttgactctttgtttgacggtgaagatttcgaatcctctttgactagagctagatttgaagacttgaacgccgcattgttcaagtctactttggaacctgttgaacaagttttgaaggatgctaagatctctaagtctcaaatcgacgaagttgtcttggttggtggttccaccagaattccaaaggtccaaaagttgttgtctgacttctttgacggtaagcaattggaaaaatctattaacccagatgaagctgttgcttacggtgctgctgttcaaggtgctatcttgaccggccaatccacatctgacgaaaccaaggacttgttgttgttagatgttgctccattatctttgggtgttggtatgcaaggtgacatgttcggtatcgttgttccaagaaacactactgttccaaccatcaagagaagaacctttactacatgtgctgacaaccaaaccaccgttcaattcccagtctaccaaggtgaacgtgttaactgtaaagaaaacactttgttgggtgaattcgacttgaagaacatcccaatgatgccagctggtgaaccagtcttggaagctatcttcgaagttgatgctaacggtatcttgaaggttactgccgtcgaaaagtctaccggtaagtcttctaacatcactatctctaacgctgttggtagattgtcttctgaagaaattgaaaagatggttaaccaagctgaagagttcaaggctgccgatgaagcttttgccaagaagcacgaagctagacaaagattggaatcctacgttgcctccatcgaacaaactgtcactgacccagtcttgtcttctaaattgaagagaggttccaagtccaagattgaagctgctttgtccgatgctttggctgctttgcaaatcgaagacccatctgctgatgaattgagaaaggctgaagttggtttgaagagagttgtcaccaaggccatgtcttctcgttga

SEQ ID NO: 1377 - DNA, 1761 bp, Saccharomyces cerevisiae
atgctttctgaaaacacgactattctgatggctaacggtgaaattaaagacatcgcaaacgtcacggctaactcttacgttatgtgcgcagatggctccgctgcccgcgtcataaatgtcacacagggctatcagaaaatctataatatacagcaaaaaaccaaacacagagcttttgaaggtgaacctggtaggttagatcccaggcgtagaacagtttatcagcgtcttgcattacaatgtactgcaggtcataaattgtcagtcagggtccctaccaaaccactgttggaaaaaagtggtagaaatgccaccaaatataaagtgagatggagaaatctgcagcaatgtcagacgcttgatggtaggataataataattccaaaaaaccatcataagacattcccaatgacagttgaaggtgagtttgccgcaaaacgcttcatagaagaaatggagcgctctaaaggagaatatttcaactttgacattgaagttagagatttggattatcttgatgctcaattgagaatttctagctgcataagatttggtccagtactcgcaggaaatggtgttttatctaaatttctcactggacgtagtgaccttgtaactcctgctgtaaaaagtatggcttggatgcttggtctgtggttaggtgacagtacaacaaaagagccagaaatctcagtagatagcttggatcctaagctaatggagagtttaagagaaaatgcgaaaatctggggtctctaccttacggtttgtgacgatcacgttccgctacgtgccaaacatgtaaggcttcattatggagatggtccagatgaaaacaggaagacaaggaatttgaggaaaaataatccattctggaaagctgtcacaattttaaagtttaaaagggatcttgatggagagaagcaaatccctgaatttatgtacggcgagcatatagaagttcgtgaagcattcttagccggcttgatcgactcagatgggtacgttgtgaaaaagggcgaaggccctgaatcttataaaatagcaattcaaactgtttattcatccattatggacggaattgtccatatttcaagatctcttggtatgtcagctactgtgacgaccaggtcagctagggaggaaatcattgaaggaagaaaagtccaatgtcaatttacatacgactgtaatgttgctgggggaacaacttcacagaatgttttgtcatattgtcgaagtggtcacaaaacaagagaagttccgccaattataaaaagggaacccgtatatttcagcttcacggatgatttccagggtgagagtactgtatatgggcttacgatagaaggccataaaaatttcttgcttggcaacaaaatagaagtgaaatcatgtcgaggctgctgtgtgggagaacagcttaaaatatcacaaaaaaagaatctaaaacactgtgttgcttgtcccagaaagggaatcaagtatttttataaagattggagtggtaaaaatcgagtatgtgctagatgctatggaagatacaaattcagcggtcatcactgtataaattgcaagtatgtaccagaagcacgtgaagtgaaaaaggcaaaagacaaaggcgaaaaattgggcattacgcccgaaggtttgccagttaaaggaccagagtgtataaaatgtggcggaatcttacagtttgatgctgtccgcgggcctcataagagttgtggtaacaacgcaggtgcgcgcatctgctaa

SEQ ID NO: 1378 - DNA, 1761 bp, Artificial Sequence
  Description of Artificial Sequence: Synthetic polynucleotide
atgctttctgaaaacacgactattttgatggctaacggtgaaattaaagacatcgcaaacgtcacggctaactcttacgttatgtgcgcagatggctccgctgcccgcgtcataaatgtcacacagggctatcagaaaatctataatatacagcaaaaaaccaaacacagagcttttgaaggtgaacctggtaggttagatcccaggcgtagaacagtttatcagcgtcttgcattacaatgtactgcaggtcataaattgtctgtcagggtccctaccaaaccattgttggaaaaaagtggtagaaatgccaccaaatataaagtgagatggagaaatttacagcaatgtcagacgcttgatggtaggataataataattccaaaaaaccatcataagacattcccaatgacagttgaaggtgagtttgccgcaaaacgcttcatagaagaaatggagcgctctaaaggagaatatttcaactttgacattgaagttagagatttggattatcttgatgctcaattgagaatttctagctgcataagatttggtccagtactcgcaggaaatggtgttttatctaaatttctcactggacgtagtgaccttgtaactcctgctgtaaaaagtatggcttggatgcttggtttatggttaggtgacagtacaacaaaagagccagaaatctctgtagatagcttggatcctaagttgatggagagtttaagagaaaatgcgaaaatctggggtctctaccttacggtttgtgacgatcacgttccgttacgtgccaaacatgtaaggcttcattatggagatggtccagatgaaaacaggaagacaaggaatttgaggaaaaataatccattctggaaagctgtcacaattttaaagtttaaaagggatcttgatggagagaagcaaatccctgaatttatgtacggcgagcatatagaagttcgtgaagcattcttagccggcttgatcgacagtgatgggtacgttgtgaaaaagggcgaaggccctgaatcttataaaatagcaattcaaactgtttattcttccattatggacggaattgtccatatttctagatctcttggtatgtctgctactgtgacgaccaggtctgctagggaggaaatcattgaaggaagaaaagtccaatgtcaatttacatacgactgtaatgttgctgggggaacaacttctcagaatgttttgagttattgtaggagtggtcacaaaacaagagaagttccgccaattataaaaagggaacccgtatatttcagcttcacggatgatttccagggtgagagtactgtatatgggcttacgatagaaggccataaaaatttcttgcttggcaacaaaatagaagtgaaaagttgtcgtggctgctgtgtgggagaacagcttaaaatatctcaaaaaaagaatttgaaacactgtgttgcttgtcccagaaagggaatcaagtatttttataaagattggagtggtaaaaatagagtatgtgctagatgctatggaagatacaaattcagcggtcatcactgtataaattgcaagtatgtaccagaagcacgtgaagtgaaaaaggcaaaagacaaaggcgaaaaattgggcattacgcccgaaggtttgccagttaaaggaccagagtgtataaaatgtggcggaatcttacagtttgatgctgtccgcgggcctcataagagttgtggtaacaacgcaggtgcgcgcatctgctga

SEQ ID NO: 1379 - DNA, 1059 bp, Saccharomyces cerevisiae
atgtcagattggaaagtggacccagatacccgcaggcgtcttttgcaattgcaaaagattggtgcaaataagaaatgtatggattgtggtgcgccaaatccacaatgggccacgcctaagtttggagctttcatttgccttgaatgtgccggtatccatagagggcttggtgtgcatatatcttttgtaagatctatcactatggatcagtttaaaccggaggaacttcttcgtatggaaaaaggtggtaacgaacctttgactgaatggttcaagtcgcataatattgacctgagtttaccacaaaaagtgaaatacgataaccccgtcgcagaggattataaagaaaagttaacatgtctttgcgaagatagagtatttgaagagcgtgagcatttggattttgatgcttccaagttatcagcaacctctcaaaccgctgcatccgctacgcctggtgttgctcaaagtcgagaagggacaccactggagaaccgtcgatctgcaacaccagcaaactctagtaatggtgccaattttcaaaaggagaagaacgaagcttattttgctgagctgggcaagaagaaccaatctagaccagatcatttgcccccttctcaaggtggtaaatatcagggctttggaagtacacccgcaaaacctccacaagaacggtctgcagggtccagcaatactttgagcctggaaaattttcaagctgatcctttgggaacattgagcagaggatggggcctcttctccagcgctgtaaccaaatcgttcgaggacgtaaacgaaacggttattaagcctcacgtccagcaatggcaatccggagagttgtcagaagaaacgaagagagcagctgcccagtttggccaaaagtttcaagaaacgagtagttatggattccaagcatttagtaacttcactaaaaatttcaatggtaatgcagaggatagctctacagcagggaatacaacccatacagaatatcaaaagattgataataacgataagaagaatgaacaggacgaggacaaatgggacgatttctaa

SEQ ID NO: 1380 - DNA, 1059 bp, Artificial Sequence
  Description of Artificial Sequence: Synthetic polynucleotide
atgagtgattggaaagtggacccagatacccgcaggcgtcttttgcaattgcaaaagattggtgcaaataagaaatgtatggattgtggtgcgccaaatccacaatgggccacgcctaagtttggagctttcatttgccttgaatgtgccggtatccatagagggcttggtgtgcatatatcttttgtaagatctatcactatggatcagtttaaaccggaggaacttcttcgtatggaaaaaggtggtaacgaacctttgactgaatggttcaagagtcataatattgacttgagtttaccacaaaaagtgaaatacgataaccccgtcgcagaggattataaagaaaagttaacatgtctttgcgaagatagagtatttgaagagcgtgagcatttggattttgatgcttccaagttaagtgcaacctctcaaaccgctgcatccgctacgcctggtgttgctcaaagtagagaagggacaccattggagaaccgtcgttctgcaacaccagcaaactctagtaatggtgccaattttcaaaaggagaagaacgaagcttattttgctgagttgggcaagaagaaccaatctagaccagatcatttgcccccttctcaaggtggtaaatatcagggctttggaagtacacccgcaaaacctccacaagaaagatctgcagggtccagcaatactttgagcttggaaaattttcaagctgatcctttgggaacattgagcagaggatggggcctcttctccagcgctgtaaccaaatctttcgaggacgtaaacgaaacggttattaagcctcacgtccagcaatggcaatccggagagttgagtgaagaaacgaagagagcagctgcccagtttggccaaaagtttcaagaaacgagtagttatggattccaagcatttagtaacttcactaaaaatttcaatggtaatgcagaggatagctctacagcagggaatacaacccatacagaatatcaaaagattgataataacgataagaagaatgaacaggacgaggacaaatgggacgatttctga

SEQ ID NO: 1381 - DNA, 1656 bp, Saccharomyces cerevisiae
atgagcactgcttcaacaccgccaattaacttatttcgtagaaagaaagaacataaacgtgggatcacatacacaatgttactatgtgggccagcaggtacaggaaagaccgcctttgctaacaatctattggaaactaagatctttccgcataagtatcaatacggtaaatcaaatgctagtattagctctaacccagaagtaaaagttattgctccgacaaaagttgtttcatttaattcgaaaaatgggattccatcttatgtttctgaattcgatccaatgagagccaatttggaaccaggtattaccatcacctccacttcattagaacttgggggcaacaaagatcaaggaaagccagaaatgaacgaggatgataccgtgtttttcaacttgattatgacgcatggtataggcgaaaacttggacgattcgttgtgttctgaggaagttatgtcgtatttagaacaacaatttgacattgttttagctgaggaaaccagaattaaaaggaatccgaggtttgaggacaccagggttcacgtagcattatattttattgaacccactggacacggtctgagagaagtcgatgtagagctcatgaaaagcatctccaaatacacaaatgtactgccaataataacaagagctgactcattcaccaaggaggagctaactcaattcaggaaaaatattatgtttgatgtggaaagatacaacgtcccaatttacaaatttgaggttgaccctgaagatgatgatttggaatccatggaagagaatcaagccttggcatccttgcaaccatttgctattataacttcagataccagagatagtgaaggtagatacgttagggagtatccgtgggggataatatcaatcgacgacgacaaaatttcggatttgaaagttttaaaaaacgtcctgtttggttctcacttacaagaattcaaagacaccacgcaaaatttgctttacgagaattaccgttccgaaaaactatcgtccgtggccaacgctgaagaaattggtcctaattctacaaagagacagtcaaatgctccaagtttaagcaactttgcctctttgataagcactggtcaattcaattcttctcaaactcttgcaaacaatttgagagcggacacaccaagaaaccaagtaagtggaaactttaaggaaaacgaatacgaagacaatggcgaacatgattcagcagaaaatgaacaggaaatgtctcccgtgagacagttgggtagagaaataaaacaagaaaatgaaaatttgataagatctatcaaaacagaatcttcaccaaaattcttgaactctccggacttaccagagcgtaccaagttaagaaatatttcagaaaccgttccatatgtcttgagacatgaaagaattttagcaagacaacaaaaactggaagagttagaggcccagtcagctaaagaattacaaaaaagaattcaagaattagaaagaaaagcacacgaattgaaattgagggaaaaactaataaatcagaataaactaaacggttcatcatcttcaatcaattctctacaacagagcacaaggagccaaattaaaaaaaatgacacgtatactgatttagcctctattgcatcgggtagagattga

SEQ ID NO: 1382 - DNA, 1656 bp, Artificial Sequence
  Description of Artificial Sequence: Synthetic polynucleotide
atgagcactgcttctacaccgccaattaacttatttcgtagaaagaaagaacataaacgtgggatcacatacacaatgttattatgtgggccagcaggtacaggaaagaccgcctttgctaacaatttattggaaactaagatctttccgcataagtatcaatacggtaaatctaatgctagtattagctctaacccagaagtaaaagttattgctccgacaaaagttgtttcttttaattctaaaaatgggattccatcttatgtttctgaattcgatccaatgagagccaatttggaaccaggtattaccatcacctccacttctttagaacttgggggcaacaaagatcaaggaaagccagaaatgaacgaggatgataccgtgtttttcaacttgattatgacgcatggtataggcgaaaacttggacgattctttgtgttctgaggaagttatgtcttatttagaacaacaatttgacattgttttagctgaggaaaccagaattaaaaggaatccgaggtttgaggacaccagggttcacgtagcattatattttattgaacccactggacacggtttaagagaagtcgatgtagagctcatgaaaagcatctccaaatacacaaatgtattgccaataataacaagagctgactctttcaccaaggaggagttaactcaattcaggaaaaatattatgtttgatgtggaaagatacaacgtcccaatttacaaatttgaggttgaccctgaagatgatgatttggaatccatggaagagaatcaagccttggcatccttgcaaccatttgctattataacttctgataccagagatagtgaaggtagatacgttagggagtatccgtgggggataatatccatcgacgacgacaaaatttctgatttgaaagttttaaaaaacgtcttgtttggttctcacttacaagaattcaaagacaccacgcaaaatttgctttacgagaattaccgttccgaaaaattatcttccgtggccaacgctgaagaaattggtcctaattctacaaagagacagtctaatgctccaagtttaagcaactttgcctctttgataagcactggtcaattcaattcttctcaaactcttgcaaacaatttgagagcggacacaccaagaaaccaagtaagtggaaactttaaggaaaacgaatacgaagacaatggcgaacatgattctgcagaaaatgaacaggaaatgtctcccgtgagacagttgggtagagaaataaaacaagaaaatgaaaatttgataagatctatcaaaacagaatcttctccaaaattcttgaactctccggacttaccagagcgtaccaagttaagaaatatttctgaaaccgttccatatgtcttgagacatgaaagaattttagcaagacaacaaaaattagaagagttagaggcccagtctgctaaagaattacaaaaaagaattcaagaattagaaagaaaagcacacgaattgaaattgagggaaaaattgataaatcagaataaattgaacggttcttcttcttctatcaattctttacaacagagcacaaggagccaaattaaaaaaaatgacacgtatactgatttagcctctattgcatctggtagagattga

SEQ ID NO: 1383 - DNA, 1950 bp, Saccharomyces cerevisiae
atgtcattagtgcataatcagacgaatttaaacgaatccaaatttcttatagaaagggcatttagttctagttcagaaaccgttccattatcaaaggaggcaacatatcccatgccaactgcatatagtttttccgcagttaggagcaacagcgagactaacattaaaagagagaacccgcaaggttttgcaaaagaacctattatgacttctatgcttcataatttgaccatgtccacggggaaagggaacgggaatgacgtcaattctttagccccacatgatgtggatgttggcccctactgtcttttgctgaggaatttgccaaaagacattacactaagagagtgttattgtatattttcactagcaactggggtgtcaagtatagaactaaaaagggatgatagagaaccctttaatgacaatgaaaaagtcgttgtggtcaaatttggatccctttctttagtaacccattatgctaatatattaaactcgaagtctgagatttttgggcctagtttcccctttaggtctcacattgacgtagtaaatgaacaaacgcagcttccagtgagttttcaagaacatgtttcatctggcactacaaatagttctccaaagaattaccaattgtcgtccagtgcgcaaaatgaaattcaaaatcaaagttttaatactatatcatatggaaaaactagttcctctccattagggccttcagcggccaagccaaggccttcattactttcagagagatccctccgtttctcattcaatgacccattcggattggaaacaatctctcaaagaaaagaatccgtaccctttctacgaaatagcatctcacaacatgatttatcaaacgtaaccaccacaccagttccagcaggaatgccacctcagaaggacgctggcaagtcacttttgctactagaaaaggatgaaataaatgaaagtatttggaatggtgatgaattagttaatgatgttggtaattcttcatttggtgcatctttacaagagcctccgatgtcatctacgcctgtgatggagtggaatgcttcctcaactgctaatattcctctttttcaattatctagccaagaaaatcatcagtctaatctgttgcctccatcccaccattcaattagccaggatgttccacatattcaatcacaacctaatctgaacaattcaggagtaatacattccgcgacttctctaccgcattatcacttattgaaccaaattaatgcttcaactaagacacaaagtattcagcagagcgtttcgaatgttccttccaatttggacctgaatctccaaacggaaaatggccacccacaatcttctgctcctaacgggtcttcaatattcaacaaccaaaaggtgaatcaaggctttttagtgagtgaacaagacaccagtacaatatcacgacagaaagaatgttcttctacagcttctgcctctgcattttcgaaaaataacgaaacaaatgtggcaggttccacaactatttcacaggctgacctatcactactagccaaggtgccaccaccagccaatcccgcggaccaaaatcctccttgtaatactctttatgtgggtaatctacctccggatgccacggaacaagaattaaggcaattgttttctaatcagcaaggttttcgtagattatccttcaggaataaaatgaactctcacggtcatggcaacggtcatggccatggtccaatttgttttgtagaatttgaggatgttagctttgccactagagcattggcagaattatatggtagtcaactacctcacccccgcccttccctcaacaacaaaggaggtatcaggttgagcttctctaaaaatccattaggcgttagaggctcaaacagtaggagtaaatctggttacagctttaatggaagttacgggaaatcatga

SEQ ID NO: 1384 - DNA, 1950 bp, Artificial Sequence
  Description of Artificial Sequence: Synthetic polynucleotide
atgtctttagtgcataatcagacgaatttaaacgaatccaaatttcttatagaaagggcatttagttctagttctgaaaccgttccattatccaaggaggcaacatatcccatgccaactgcatatagtttttccgcagttaggagcaacagcgagactaacattaaaagagagaacccgcaaggttttgcaaaagaacctattatgacttctatgcttcataatttgaccatgtccacggggaaagggaacgggaatgacgtcaattctttagccccacatgatgtggatgttggcccctactgtcttttgttgaggaatttgccaaaagacattacattaagagagtgttattgtatattttctttggcaactggggtgtccagtatagaattgaaaagggatgatagagaaccctttaatgacaatgaaaaagtcgttgtggtcaaatttggatccctttctttagtaacccattatgctaatatattaaactccaagtctgagatttttgggcctagtttcccctttaggtctcacattgacgtagtaaatgaacaaacgcagcttccagtgagttttcaagaacatgtttcttctggcactacaaatagttctccaaagaattaccaattgtcttccagtgcgcaaaatgaaattcaaaatcaaagttttaatactatatcttatggaaaaactagttcctctccattagggccttctgcggccaagccaaggccttctttactttctgagagatccctccgtttcagtttcaatgacccattcggattggaaacaatctctcaaagaaaagaatccgtaccctttttaagaaatagcatctctcaacatgatttatctaacgtaaccaccacaccagttccagcaggaatgccacctcagaaggacgctggcaagtctcttttgttattggaaaaggatgaaataaatgaaagtatttggaatggtgatgaattagttaatgatgttggtaattcttcttttggtgcatctttacaagagcctccgatgtcttctacgcctgtgatggagtggaatgcttccagcactgctaatattcctctttttcaattatctagccaagaaaatcatcagtctaatttattgcctccatcccaccattctattagccaggatgttccacatattcaatctcaacctaatttgaacaattctggagtaatacattccgcgacttctttaccgcattatcacttattgaaccaaattaatgcttccactaagacacaaagtattcagcagagcgtttctaatgttccttccaatttggacttgaatctccaaacggaaaatggccacccacaatcttctgctcctaacgggtcttctatattcaacaaccaaaaggtgaatcaaggctttttagtgagtgaacaagacaccagtacaatatctagacagaaagaatgttcttctacagcttctgcctctgcattttccaaaaataacgaaacaaatgtggcaggttccacaactatttctcaggctgacttaagtttattagccaaggtgccaccaccagccaatcccgcggaccaaaatcctccttgtaatactctttatgtgggtaatttacctccggatgccacggaacaagaattaaggcaattgttttctaatcagcaaggttttcgtagattatccttcaggaataaaatgaactctcacggtcatggcaacggtcatggccatggtccaatttgttttgtagaatttgaggatgttagctttgccactagagcattggcagaattatatggtagtcaattacctcacccccgcccttccctcaacaacaaaggaggtatcaggttgagcttctctaaaaatccattaggcgttagaggctctaacagtaggagtaaatctggttacagctttaatggaagttacgggaaaagttga

SEQ ID NO: 1385 - DNA, 3141 bp, Saccharomyces cerevisiae
atgaatatgaacgagtccatttccaaagatggtcaaggcgaagaagaacaaaataatttttcgtttggtggtaagcccggttcctatgattccaattcagattctgctcaacgcaaaaagtctttcagtactacaaagccgaccgaatataacttaccaaaagaacagcccgaatcaacgtccaagaatttggaaaccaaggctaaaaacattctgttaccttggaggaagaagcataataaagactcggaaactccacacgaagacactgaggcggacgctaaccgccgtgccaacgtaacttctgatgtgaaccctgtttctgccgacaccaagtcaagttctggccctaatgctactattactacccatggatactcttatgtcaaaacaacgacacccgctgctacaagtgagcaatccaaagtgaaaacgtcacctcccactagccatgaacattcaaatataaaggcgtcccccactgcgcatagacattccaaaggtgatgcagggcatccaagtattgcaaccactcataaccacagcacttccaaagctgccacttctcctgttactcacacgcatggtcattccagtgctaccacttcccctgtcactcacacacatggtcatgccagtgtgaaaaccacatctcctaccaatactcatgagcattctaaagcgaatactggtccatcagccactgcaactacacatggacatatcaacgtcaaaactacccaccctgttagccatggtcactctggttcaagcactggtcctaaatccaccgctgctgcacaggatcattccagtactaaaactaacccttcagttactcatggacatacaagtgttaaagataactcctcagctacgaagggttattcgaacactgattccaactcagatcgagatgtcatacctggtagtttccggggcatgactggtactgatgtgaaccctgttgatcctagtgtttacacaagtacaggcccaaagagtaatgttagttccggtatgaacgctgtcgaccctagtgtctacacggacacaagttcgaagtctgcagatcgtagaaagtactctggcaacactgcgactggtcctcctcaagatacaattaaagaaattgcacagaacgtgaagatggatgagagcgaacaaactggattgaaaaatgaccaagtttctggttctgatgcaatccaacagcaaactatggaacctgaacccaaagcagcagtcgggacaagtggttttgtaagccagcaaccttcttatcatgatagcaataaaaacattcaacacccagaaaagaataaggttgataataaaaatatatcagaaagagcggctgaaaaatttaacattgaaagagatgacattctggaatccgccgatgattatcaacagaaaaacattaaatccaagacggattctaattggggtccaattgaatatagttccagcgctggtaaaaataagaatctgcaggatgttgttataccttctagtatgaaggagaaattcgacagcggtacatctggatctcagaatatgcctaaagcgggaaccgaattaggacatatgaagtataatgataatggtagggataacttgcaatatgttgccggttcacaagctggttctcaaaatacgaacaacaatattgacatgtcaccccgtcatgaagcagaatggtccgggctttctaatgatgccaccacccgaaacaatgttgtatcacctgctatgaaggacgaagatatgaatgaagattctactaaacctcatcaatatgggttggattatttggatgatgttgaagactaccacgagaatgatattgacgactactcaaatgcaaagaaaaacgacttgtattctaagaaagcgtaccagggaaaaccatcggattacaattatgagcagagagagaaaatcccaggtacttttgaacctgatacgttgtcaaaatcagtgcaaaaacaagatgaagacccgttgtctccaaggcaaaccactaaccgtgctggtatggagactgcaagagatgagagtcttggcaattacgaatactcgaatacttctggtaacaaaaaattatctgatttaagcaaaaataaatcaggcccaactccaacgcgttctaattttattgaccaaattgagccaagaagagcaaaaacaacacaggatattgcatccgatgccaaggatttcaccaataatccggaaacaggtactactggaaacgtagatacaaccggaaggatgggtgcaaaatccaagaccttcagctcgaacccttttgatgatagtaaaaatacagacactcatctcgaaaacgctaatgttgctgcctttgataattccagatctggagacactacatactccaaatcaggggatgctgaaacagctgcttacgataatattaaaaatgcggaccctacatatgccaaatcacaagatattactggaatgactcacgatcaggaaccatcatcagaacaaaaggccagttacggttctggcggcaattcccaaaatcaagaatattctagcgacgataatattgatgtcaataagaatgcgaaagttttagaggaagacgcaccgggctacaagcgtgaagtagatttgaagaacaaacgtagaaccgaccttggtggtgccgacgcctcaaacgcttatgctgccgaagttggtaatttccctagtttgattgacccacatgtcccaacatacggatttaaagacaccaacacctctagttctcaaaagccatctgagggcacctacccagaaaccacttcctattcaattcataatgaaacaacttctcagggaaggaaagtgtcggtgggttcaatgggttccggaaaatcaaaacatcatcacaatcatcaccgtcacagcagacagaattcttcaaaagggtctgactacgactataataattctactcattcagccgagcacactccaagacatcatcagtacggttccgatgagggtgagcaagattaccatgacgacgagcaaggtgaggaacaggctggtaaacaaagtttcatgggtagagtgagaaaaagtatttctggcggtacttttggatttaggagtgaaatttaa

SEQ ID NO: 1386 - DNA, 3141 bp, Artificial Sequence
  Description of Artificial Sequence: Synthetic polynucleotide
atgaatatgaacgagtccatttccaaagatggtcaaggcgaagaagaacaaaataatttttcttttggtggtaagcccggttcctatgattccaattctgattctgctcaacgcaaaaagtctttcagtactacaaagccgaccgaatataacttaccaaaagaacagcccgaaagtacgtccaagaatttggaaaccaaggctaaaaacattttattaccttggaggaagaagcataataaagactctgaaactccacacgaagacactgaggcggacgctaaccgccgtgccaacgtaacttctgatgtgaaccctgtttctgccgacaccaagagtagttctggccctaatgctactattactacccatggatactcttatgtcaaaacaacgacacccgctgctacaagtgagcaatccaaagtgaaaacgtctcctcccactagccatgaacattctaatataaaggcgtcccccactgcgcatagacattccaaaggtgatgcagggcatccaagtattgcaaccactcataaccacagcacttccaaagctgccacttctcctgttactcacacgcatggtcattccagtgctaccacttcccctgtcactcacacacatggtcatgccagtgtgaaaaccacatctcctaccaatactcatgagcattctaaagcgaatactggtccatctgccactgcaactacacatggacatatcaacgtcaaaactacccaccctgttagccatggtcactctggttccagcactggtcctaaatccaccgctgctgcacaggatcattccagtactaaaactaacccttctgttactcatggacatacaagtgttaaagataactcctctgctacgaagggttattccaacactgattccaacagtgatagagatgtcatacctggtagtttcagaggcatgactggtactgatgtgaaccctgttgatcctagtgtttacacaagtacaggcccaaagagtaatgttagttccggtatgaacgctgtcgaccctagtgtctacacggacacaagttccaagtctgcagatcgtagaaagtactctggcaacactgcgactggtcctcctcaagatacaattaaagaaattgcacagaacgtgaagatggatgagagcgaacaaactggattgaaaaatgaccaagtttctggttctgatgcaatccaacagcaaactatggaacctgaacccaaagcagcagtcgggacaagtggttttgtaagccagcaaccttcttatcatgatagcaataaaaacattcaacacccagaaaagaataaggttgataataaaaatatatctgaaagagcggctgaaaaatttaacattgaaagagatgacattttggaatccgccgatgattatcaacagaaaaacattaaatccaagacggattctaattggggtccaattgaatatagttccagcgctggtaaaaataagaatttacaggatgttgttataccttctagtatgaaggagaaattcgacagcggtacatctggatctcagaatatgcctaaagcgggaaccgaattaggacatatgaagtataatgataatggtagggataacttgcaatatgttgccggttctcaagctggttctcaaaatacgaacaacaatattgacatgtctccccgtcatgaagcagaatggtccgggctttctaatgatgccaccaccagaaacaatgttgtatctcctgctatgaaggacgaagatatgaatgaagattctactaaacctcatcaatatgggttggattatttggatgatgttgaagactaccacgagaatgatattgacgactactctaatgcaaagaaaaacgacttgtattctaagaaagcgtaccagggaaaaccaagtgattacaattatgagcagagagagaaaatcccaggtacttttgaacctgatacgttgagtaaatctgtgcaaaaacaagatgaagacccgttgtctccaaggcaaaccactaaccgtgctggtatggagactgcaagagatgagagtcttggcaattacgaatactctaatacttctggtaacaaaaaattatctgatttaagcaaaaataaatctggcccaactccaacgcgttctaattttattgaccaaattgagccaagaagagcaaaaacaacacaggatattgcatccgatgccaaggatttcaccaataatccggaaacaggtactactggaaacgtagatacaaccggaaggatgggtgcaaaatccaagaccttcagcagtaacccttttgatgatagtaaaaatacagacactcatctcgaaaacgctaatgttgctgcctttgataattccagatctggagacactacatactccaaaagtggggatgctgaaacagctgcttacgataatattaaaaatgcggaccctacatatgccaaatctcaagatattactggaatgactcacgatcaggaaccatcttctgaacaaaaggccagttacggttctggcggcaattcccaaaatcaagaatattctagcgacgataatattgatgtcaataagaatgcgaaagttttagaggaagacgcaccgggctacaagcgtgaagtagatttgaagaacaaacgtagaaccgaccttggtggtgccgacgcctccaacgcttatgctgccgaagttggtaatttccctagtttgattgacccacatgtcccaacatacggatttaaagacaccaacacctctagttctcaaaagccatctgagggcacctacccagaaaccacttcctattctattcataatgaaacaacttctcagggaaggaaagtgtctgtgggttctatgggttccggaaaatctaaacatcatcacaatcatcaccgtcacagcagacagaattcttctaaagggtctgactacgactataataattctactcattctgccgagcacactccaagacatcatcagtacggttccgatgagggtgagcaagattaccatgacgacgagcaaggtgaggaacaggctggtaaacaaagtttcatgggtagagtgagaaaaagtatttctggcggtacttttggatttaggagtgaaatttga

SEQ ID NO: 1387 - DNA, 930 bp, Saccharomyces cerevisiae
atgattttcaaaaggttcgttaatttgcttgtgtttttattcctactcggtgctggcttattgacgttttttcttattctgtcaggaggcagagaatctggaacgctgaaaaatttttattggttacaggctgatacaaacggctttaacagcgctccatcgaccacgagatggtacaattacaattggtgcggctacgaagacggccagctagctaattgctctagcagggcgcccgccaagcctttctctcccagagacaattttggtaactctgtcaatttaccatcgtcgttcagaaacaaccgggatacctactattatctatccagggttggatgggccatgctgctgatttccctatttttcatcgtactggcgctggtacccggctttctggctaccttccttcctttcaaggcagtgccagtcctgtactgtgtgttgtcctggttggcctttttcttcattatattggctgcatgcttgtacacaggttgctatgtgaaggccagaaagaccttccgcaacagcgggaggtctgcaaggctgggacccaaaaactttgcgttcatctggacttcggtcttcttgatgctcgtgaacgccatttggtccactatattcagtgctacccacaaggcccactctacctactcggaccacgacatgtatgcccaatatgaaagcccttctgttgacaccggtgctcaaatggagaaatccacttacaatagtggggcgacggacggcgcgggccctatcacagccgcacctgtggttggacagcctcaacctacaaccaccactactccggctggcaatggcaagttctttcaaaaactgaaaacaagaaagcaggtgccatcagctgagttagaaccagctggggatggtggtcttgccgggccagtgacggtacgcgactag

SEQ ID NO: 1388 - DNA, 930 bp, Artificial Sequence
  Description of Artificial Sequence: Synthetic polynucleotide
atgattttcaaaaggttcgttaatttgcttgtgtttttattcttactcggtgctggcttattgacgttttttcttattttatctggaggcagagaatctggaacgttgaaaaatttttattggttacaggctgatacaaacggctttaacagcgctccatctaccacgagatggtacaattacaattggtgcggctacgaagacggccagttagctaattgctctagcagggcgcccgccaagcctttctctcccagagacaattttggtaactctgtcaatttaccatcttctttcagaaacaacagagatacctactattatttatccagggttggatgggccatgttattgatttccttatttttcatcgtattggcgttggtacccggctttttggctaccttccttcctttcaaggcagtgccagtcttgtactgtgtgttgtcctggttggcctttttcttcattatattggctgcatgcttgtacacaggttgctatgtgaaggccagaaagaccttccgcaacagcgggaggtctgcaaggttaggacccaaaaactttgcgttcatctggactagtgtcttcttgatgctcgtgaacgccatttggtccactatattcagtgctacccacaaggcccactctacctacagtgaccacgacatgtatgcccaatatgaaagcccttctgttgacaccggtgctcaaatggagaaatccacttacaatagtggggcgacggacggcgcgggccctatcacagccgcacctgtggttggacagcctcaacctacaaccaccactactccggctggcaatggcaagttctttcaaaaattgaaaacaagaaagcaggtgccatctgctgagttagaaccagctggggatggtggtcttgccgggccagtgacggtacgcgactga

SEQ ID NO: 1389 - DNA, 2775 bp, Saccharomyces cerevisiae
atggataccttagaagagcctgagtgtcctccacataaaaatcgtatttttgtgagctcgagtaaagattttgaaggctatcccagcaaagcaatagttcccgtgcaattcgtggcgcttttaacctcaatacacctgactgaaacaaaatgtttgctaggcttttctaattttgagaggcgaggagatcaatcccaagaagatcaatatttaatcaaactgaagttcaaagataggggctcggagaggttagcccggatcactatttccttactttgccaatactttgatattgaactgccagatttagattctgactcaggcgcatccccaacagtaatactgagagatattcaccttgaaaggttatgtttttcaagttgtaaagctttatatgtatcaaaacacgggaactatactctattcttagaggacataaaaccgttggatttggtaagtgtgataagcaccatatctacaaaatcgacaaatagcagcaagcattcgtcatcagaacttatttcagaatgtgatttgaacaactcacttgtggatatcttcaacaatttaatagaaatgaatagagacgagaaaaacaggtttaaatttgtaaagttgattcactacgatatagaactaaaaaagttcgttcaagaccaacaaaaggtattatcgcagaaatcaaaagccgcagcaattaatcctttctttgtgccaaatagactagggataccttacattgaatcccaaaacgaattcaactcgcagcttatgacgcttaatgtagatgaaccgaccacagatataagcaacatgggagaggaaatgcatgacagcgcagatcccattgaggattcagattcctcaactacctcctctaccgggaaatatttcagctcaaaatcctacatccagtcacagacacctgaaaggaaaacaagcgtaccaaataattggcacgatgatgattccggaagcaagaggaagagaaagctttctttccacagtccgaacgcgtcctcaatccgcaaagccatcagttatgagcaactttccctagctagtgtaggctcagttgaaaggttagagggcaaaattgttggcatgaatccacctcaattcgccagtataaatgagttcaaatattgcacattgaaattatattttacgcagctcttaccaaatgtcccagacaaggtcctggtgccaggcgtcaattgcattgagatcgttatcccgacgagagagcgaatctgtgagctcttcggtgttttaaactgtcaaagcgacaagatatcggatattttactactggaaaagcctgatcgaatttccgtcgaagttgaaaggatcctgtgggacaatgacaagaccgccagcccaggtatggcagtatggagtttgaagaacattagcaccgacacgcaggcgcaggcgcaggtgcaggtgcctgcgcaatcgtcggcgtcaatcgatccgtctcgcacaaggatgagcaaaatggcaaggaaagaccccaccatcgaattctgtcagttgggactcgacacttttgagaccaaatacataacaatgtttggcatgctagtctcctgctcgtttgataaacctgcctttatatcttttgtctttagcgattttaccaagaacgatatcgtccaaaactatctttacgacagatatctaatagattacgagaacaagttagagctgaacgagggcttcaaagccatcatgtacaaaaaccaattcgaaacgtttgactctaagctcagaaaaatattcaacaacgggctaagagatctacagaacggccgcgatgaaaacctttcgcaatacggcatagtttgtaagatgaatataaaagtgaaaatgtacaacggcaaattgaatgccattgtgcgcgaatgtgagccggtcccgcattcccaaataagcagcatcgcctcgccttcacagtgcgaacatttaagattgttctaccaacgagcgttcaagagaattggcgaatccgcaatttcacgctatttcgaagagtaccggaggtttttccccatacatagaaacggttctcatctcgcgaaactgaggttcgatgaagtaaagcatgaaccaaaaaaatcacccactacaccagctctcgcagaacacatacccgacctgaatgcagacgtgtcctccttcgatgtaaagttcacagatatatcttctctcttggactcctcggctcgcctcccgcgcccacagcaaacacacaagagcaacacattatacagttgcgagggccgtatcatcgccatcgagtaccacgcatctgatctctgcttccatatcacgaatgagctcccacttttacaaacccgcggcttggccccggagcgagtgttgcaactacacatcattacctccaagaactttgcttattttttcaaccgctcaagcgcctacttacagcgtcagcctcttgaggaaaaatatacgcaattggcacaatttctcggccattcatttaaattcaatataacctcctcgctcacgctgttccctgacactaccgtggcactccagatctggtgcccaattgaatgcacctttcgggaattgcaacaacagctggcccatccgaaggttgcagcggctcctgattcagggagtcttgattgcgcaattaatgctaccgtcaatcctctgcgacttcttgccgcgcaaaatggcgtcaccgtgaaaaaggaggaggataatgacgatgacgccggagccgttcccacctcgtaa

SEQ ID NO: 1390 - DNA, 2775 bp, Artificial Sequence
  Description of Artificial Sequence: Synthetic polynucleotide
atggataccttagaagagcctgagtgtcctccacataaaaatcgtatttttgtgagcagtagtaaagattttgaaggctatcccagcaaagcaatagttcccgtgcaattcgtggcgcttttaaccagtatacacttgactgaaacaaaatgtttgttgggcttttctaattttgagaggagaggagatcaatcccaagaagatcaatatttaatcaaattgaagttcaaagataggggcagtgagaggttagccagaatcactatttccttactttgccaatactttgatattgaattaccagatttagattctgacagtggcgcatccccaacagtaatattaagagatattcaccttgaaaggttatgtttttctagttgtaaagctttatatgtatccaaacacgggaactatactttattcttagaggacataaaaccgttggatttggtaagtgtgataagcaccatatctacaaaatctacaaatagcagcaagcattcttcttctgaacttatttctgaatgtgatttgaacaactctcttgtggatatcttcaacaatttaatagaaatgaatagagacgagaaaaacaggtttaaatttgtaaagttgattcactacgatatagaattgaaaaagttcgttcaagaccaacaaaaggtattatctcagaaatctaaagccgcagcaattaatcctttctttgtgccaaatagattagggataccttacattgaatcccaaaacgaattcaactctcagcttatgacgcttaatgtagatgaaccgaccacagatataagcaacatgggagaggaaatgcatgacagcgcagatcccattgaggattctgattccagcactacctcctctaccgggaaatatttcagcagtaaatcctacatccagtctcagacacctgaaaggaaaacaagcgtaccaaataattggcacgatgatgattccggaagcaagaggaagagaaagctttctttccacagtccgaacgcgtcctctatccgcaaagccatcagttatgagcaactttccttggctagtgtaggctctgttgaaaggttagagggcaaaattgttggcatgaatccacctcaattcgccagtataaatgagttcaaatattgcacattgaaattatattttacgcagctcttaccaaatgtcccagacaaggtcttggtgccaggcgtcaattgcattgagatcgttatcccgacgagagagagaatctgtgagctcttcggtgttttaaactgtcaaagcgacaagatatctgatattttattattggaaaagcctgatagaatttccgtcgaagttgaaaggatcttatgggacaatgacaagaccgccagcccaggtatggcagtatggagtttgaagaacattagcaccgacacgcaggcgcaggcgcaggtgcaggtgcctgcgcaatcttctgcgtctatcgatccgtctcgcacaaggatgagcaaaatggcaaggaaagaccccaccatcgaattctgtcagttgggactcgacacttttgagaccaaatacataacaatgtttggcatgcttgtctcctgctcttttgataaacctgcctttatatcttttgtctttagcgattttaccaagaacgatatcgtccaaaactatctttacgacagatatttgatagattacgagaacaagttagagttgaacgagggcttcaaagccatcatgtacaaaaaccaattcgaaacgtttgactctaagctcagaaaaatattcaacaacgggttgagagatttacagaacggccgcgatgaaaacctttctcaatacggcatagtttgtaagatgaatataaaagtgaaaatgtacaacggcaaattgaatgccattgtgcgcgaatgtgagccggtcccgcattcccaaataagcagcatcgcctctccttctcagtgcgaacatttaagattgttctaccaaagagcgttcaagagaattggcgaatccgcaatttctcgctatttcgaagagtacagaaggtttttccccatacatagaaacggttctcatctcgcgaaattgaggttcgatgaagtaaagcatgaaccaaaaaaaagtcccactacaccagctctcgcagaacacatacccgacttgaatgcagacgtgtcctccttcgatgtaaagttcacagatatatcttctctcttggactcctctgctcgcctcccgcgcccacagcaaacacacaagagcaacacattatacagttgcgagggccgtatcatcgccatcgagtaccacgcatctgatctctgcttccatatcacgaatgagctcccacttttacaaacccgcggcttggccccggagagagtgttgcaattacacatcattacctccaagaactttgcttattttttcaaccgcagcagcgcctacttacagcgtcagcctcttgaggaaaaatatacgcaattggcacaatttctcggccattcttttaaattcaatataacctcctctctcacgcttttccctgacactaccgtggcactccagatctggtgcccaattgaatgcacctttagagaattgcaacaacagttggcccatccgaaggttgcagcggctcctgattctgggagtcttgattgcgcaattaatgctaccgtcaatcctttgagacttcttgccgcgcaaaatggcgtcaccgtgaaaaaggaggaggataatgacgatgacgccggagccgttcccaccagctga

SEQ ID NO: 1391 - DNA, 453 bp, Saccharomyces cerevisiae
atgaagattgtcttacaaaaagtcagccaagcatctgtagtcgtcgattcaaaagttatttcaagtattaaacatggttatatgctcctagtaggtatttccattgatgattctatggcggagatagataaattatcgaaaaaggttcttagtttgagaatcttcgaagatgaatccagaaatctatggaagaagaatattaaagaggccaatggtgaaattctatccgtgtctcaattcactttgatggcaaaaaccaagaagggaactaaacccgatttccatttggcccaaaagggtcatatagctaaagaactttatgaagaattcttaaaattactaagaagtgatttgggtgaggaaaaagtaaaggatggtgaattcggcgcaatgatgagttgctctttaactaatgaagggcccgttacaatcattcttgacagtgaccaataa

SEQ ID NO: 1392 - DNA, 453 bp, Artificial Sequence
  Description of Artificial Sequence: Synthetic polynucleotide
atgaagattgtcttacaaaaagtcagccaagcatctgtagtcgtcgattctaaagttatttccagtattaaacatggttatatgctcttagtaggtatttccattgatgattctatggcggagatagataaattatccaaaaaggttcttagtttgagaatcttcgaagatgaatccagaaatttatggaagaagaatattaaagaggccaatggtgaaattttatccgtgtctcaattcactttgatggcaaaaaccaagaagggaactaaacccgatttccatttggcccaaaagggtcatatagctaaagaactttatgaagaattcttaaaattattaagaagtgatttgggtgaggaaaaagtaaaggatggtgaattcggcgcaatgatgagttgctctttaactaatgaagggcccgttacaatcattcttgacagtgaccaatga

SEQ ID NO: 1393 - DNA, 954 bp, Saccharomyces cerevisiae
atgaaacgagttactggagttttcttaacacttttgagattttctcaatttgcatcatcggttttggtgatgtcacttttggcgtatgccatccacgcctatggaaatagaggtaataagaaaaccaacttcacattggcaacaggtgtcattagtgtgttttatctgattgccttaggtattttgtgtctggccctacccacattgatctacataggaatgtacttctgtgccgaattgatcgtttgtatgctatggctagcagctttcgttgttcttgccaaagctcaaggtgaacgtagctgtagcaacactaatgcagacggattatactataatccgtacagtggccaatatactgctgacagtcatagaagagcatgtaattcttctcaggcggcaatcgccttttctggcctttgctttgtactgtttttgatcagtgtgatattactgggaattaatgtcttaacacctatcaggaagcgttatcaaacccaaggaatgtggagaagcggcgcttctatgggtacaaagctccataggtggagcggactagctttaagcgagccttttgaagaaacagctgcttacgataacaccaatgttaggaccggtgatgtcgaagcaggtgcaggtgataatgctgcttacacatctgaaccgaatggcgacgcacgctatgcaactaatgaccccaatgggcagtaccatactaccaccaccaacacacgttacaccacaacaacagcggaccctaagacgcgttacaccaccaacgatcgtaatcctggttctgcgaatgtcgctaacagtgcagtggaccagcacgcttactctacggatgagtcaggtgatcggtcttatcaagaaaaggtcacagaaggagctcactctggcgctatgagtggtagcactgcagaaccaaacaggaacgtcaatcaaatgccataa

SEQ ID NO: 1394 - DNA, 954 bp, Artificial Sequence
  Description of Artificial Sequence: Synthetic polynucleotide
atgaaaagagttactggagttttcttaacacttttgagattttctcaatttgcatcttctgttttggtgatgtctcttttggcgtatgccatccacgcctatggaaatagaggtaataagaaaaccaacttcacattggcaacaggtgtcattagtgtgttttatttgattgccttaggtattttgtgtttggccttgcccacattgatctacataggaatgtacttctgtgccgaattgatcgtttgtatgttatggttggcagctttcgttgttcttgccaaagctcaaggtgaacgtagctgtagcaacactaatgcagacggattatactataatccgtacagtggccaatatactgctgacagtcatagaagagcatgtaattcttctcaggcggcaatcgccttttctggcctttgctttgtattatttttgatcagtgtgatattattaggaattaatgtcttaacacctatcaggaagcgttatcaaacccaaggaatgtggagaagcggcgcttctatgggtacaaagctccataggtggagcggattggctttaagcgagccttttgaagaaacagctgcttacgataacaccaatgttaggaccggtgatgtcgaagcaggtgcaggtgataatgctgcttacacatctgaaccgaatggcgacgcacgctatgcaactaatgaccccaatgggcagtaccatactaccaccaccaacacacgttacaccacaacaacagcggaccctaagacgcgttacaccaccaacgatcgtaatcctggttctgcgaatgtcgctaacagtgcagtggaccagcacgcttactctacggatgagtctggtgatagatcttatcaagaaaaggtcacagaaggagctcactctggcgctatgagtggtagcactgcagaaccaaacaggaacgtcaatcaaatgccatga

SEQ ID NO: 1395 - DNA, 624 bp, Saccharomyces cerevisiae
atggtgtacacaggatttggtttggagcagataagtccagctcaaaagaaaccttataatgaactaactccggaagaacagggtgaacggggtgctgaaatgatcatgaacttcatgacttcctgtcctggaaaatcagttgtgagtggtgtaacagggtttgcactgggtggtgttttaggcctgttcatggcgtcaatggcatatgatacacctcttcatacacctacacctgcaaatacagcagcaactgcaactgcgggaaatataggtgtgggtggaatatcaagaacagttcagcaaatatctgatttacctttccggcagcaaatgaaacttcaatttaccgatatgggtaaaaaatcctactctagtgctaagaattttggctacattggtatgatatatgctggggtggagtgtgtcatagagtcacttagagctaaaaatgatatttacaacggagtaaccgcagggttttttaccggtgctgggctggcatacaaagctggaccacaagctgccttaatgggtggtgccgggtttgctgccttttcagctgcaattgatttgtatatgaaaagtgaggatggtagaccacctcaaaacgattttaaagaatga

SEQ ID NO: 1396 - DNA, 624 bp, Artificial Sequence
  Description of Artificial Sequence: Synthetic polynucleotide
atggtgtacacaggatttggtttggagcagataagtccagctcaaaagaaaccttataatgaattgactccggaagaacagggtgaaagaggtgctgaaatgatcatgaacttcatgacttcctgtcctggaaaatctgttgtgagtggtgtaacagggtttgcattgggtggtgttttaggccttttcatggcgtccatggcatatgatacacctcttcatacacctacacctgcaaatacagcagcaactgcaactgcgggaaatataggtgtgggtggaatatctagaacagttcagcaaatatctgatttacctttcagacagcaaatgaaacttcaatttaccgatatgggtaaaaaatcctactctagtgctaagaattttggctacattggtatgatatatgctggggtggagtgtgtcatagagtctcttagagctaaaaatgatatttacaacggagtaaccgcagggttttttaccggtgctgggttagcatacaaagctggaccacaagctgccttaatgggtggtgccgggtttgctgccttttctgctgcaattgatttgtatatgaaaagtgaggatggtagaccacctcaaaacgattttaaagaatga

SEQ ID NO: 1397 - DNA, 1323 bp, Saccharomyces cerevisiae
atgtcactttcaaataagactgtaaaggaattacgacaactactaaaggaaaggtacaccgtggaagatgaactaactgaatctatagcgctatcaagtatgcgattcaagccgtcgcaagaacctgaatttcatgcgctaagccaatcttccttgctcaaaactaaactaaaacaacaaagtagtacagatattccgagttacacccacgtacttatatcaaaattatcatgtgaaaagatcacccattatgcagttcgtggaggaaatattgaaatcatgggcatattaatggggttcacattaaaagataatattgttgtaatggattgtttcaatcttcccgtagtagggacagaaactcgcgtaaatgcacaattggagtcatacgaatatatggttcaatatatcgacgagatgtataatcataatgacggtggtgatgggcgagattacaagggcgctaaactgaatgttgttggctggttccattcacatcctggttacgactgttggttaagtaatatagatatccaaacccaggatttgaaccagagattccaagatccatatgtcgcaattgtggtcgatcccttgaaaagtctggaagataaaattttaagaatgggtgcatttaggacaatagaaagtaaaagtgatgataatagtgccacttcatactatgaactagaaacaatcatatttgattcagaattgaaccgagcgctatttgaaacaaagttaaacttacattgcgtaatagaggatgatgagtcagaacaaatatcattaaatagattgatcgattcaatgaagcagtatagctatttgatggattccaaaaatgttagaacaaggattaagttggctactaccagtgaacgtgttagcaacgaaaataaaaaaaacattgactatcaaaaccgttcaacaaggtctcagttctgcctcaatacgcaaaggggggatagcactgaaacaagctcctttggaagcatgttttcaggtgataatactagtgacgtagatatggaagatagaaaccttaccgagttcgacagtactgacactagtctgtgcataaacggcgaaccgagcattcatgtaaatcgcgtggaaagaagcagcaggtctaccgacaattttcacaattctaaaaaacgcatgaacagcaatcaggaaagatgtcatgatgagggcaatgatatgttacagagaaatgtcttggagacagattatgcaagagcaaaaaatcgaatacttgcgtcaaagataaaacaatatgagcggttacgtttttacaaggacacctttacattatga

SEQ ID NO: 1398 - DNA, 1323 bp, Artificial Sequence
  Description of Artificial Sequence: Synthetic polynucleotide
atgtctctttctaataagactgtaaaggaattaagacaattattgaaggaaaggtacaccgtggaagatgaattgactgaatctatagcgttatccagtatgagattcaagccgtctcaagaacctgaatttcatgcgttgagccaatcttccttgctcaaaactaaattgaaacaacaaagtagtacagatattccgagttacacccacgtacttatatccaaattaagttgtgaaaagatcacccattatgcagttcgtggaggaaatattgaaatcatgggcatattaatggggttcacattaaaagataatattgttgtaatggattgtttcaatcttcccgtagtagggacagaaactcgcgtaaatgcacaattggagagttacgaatatatggttcaatatatcgacgagatgtataatcataatgacggtggtgatgggcgtgattacaagggcgctaaattgaatgttgttggctggttccattctcatcctggttacgactgttggttaagtaatatagatatccaaacccaggatttgaaccagagattccaagatccatatgtcgcaattgtggtcgatcccttgaaaagtttagaagataaaattttaagaatgggtgcatttaggacaatagaaagtaaaagtgatgataatagtgccacttcttactatgaattggaaacaatcatatttgattctgaattgaacagggcgttatttgaaacaaagttaaacttacattgcgtaatagaggatgatgagagtgaacaaatatctttaaatagattgatcgattctatgaagcagtatagctatttgatggattccaaaaatgttagaacaaggattaagttggctactaccagtgaacgtgttagcaacgaaaataaaaaaaacattgactatcaaaaccgttccacaaggtctcagttctgcctcaatacgcaaaggggggatagcactgaaacaagctcctttggaagcatgttttctggtgataatactagtgacgtagatatggaagatagaaaccttaccgagttcgacagtactgacactagtttatgcataaacggcgaaccgagcattcatgtaaatcgcgtggaaagaagcagcaggtctaccgacaattttcacaattctaaaaaacgcatgaacagcaatcaggaaagatgtcatgatgagggcaatgatatgttacagagaaatgtcttggagacagattatgcaagagcaaaaaatagaatacttgcgtctaagataaaacaatatgagagattacgtttttacaaggacacctttacattatga

SEQ ID NO: 1399 - DNA, 3279 bp, Saccharomyces cerevisiae
atgctttttgataacaaaaatcgcggtgctttaaactcactgaacacaccagatattgcttctttatcaatatcatccatgtcggactatcacgtgtttgattttcccggtaaggacctgcagagagaggaagtgatagatttgctagatcagcaagggtttattcccgacgatttgatcgaacaagaagtagattggttttataactcattgggtattgacgatttgttcttctcgagagaatctccccaattaatctcgaatatcatacattctttgtatgcttcaaagctagatttctttgcgaagtccaaattcaacggaattcagccaaggctattcagcattaaaaacaaaattataactaatgataatcatgccatctttatggaatctaatactggtgtcagcataagcgattctcagcaaaaaaactttaaatttgctagtgacgccgtcggaaacgatactttggagcatggtaaggataccatcaaaaaaaataggattgaaatggatgattcttgtccaccttatgaattagattccgaaattgatgaccttttcctggataacaagtctcaaaaaaactgcagattagtttctttttgggctccagaaagcgaattaaagctaacttttgtttatgagagtgtttaccctaatgatgatccagccggcgtagatatttcctctcaggatttgctgaaaggtgatattgaatcgattagtgataagaccatgtacaaagtttcgtcgaacgaaaataaaaaactatacggtctcttacttaagttggttaaagaaagagaaggtcctgtcattaagactactcgctccgtagaaaataaggatgaaattaggttattagtcgcttacaagcgattcaccactaagcgttattactctgctttgaactctttgttccactattacaagttgaaaccttctaagttctatttagagtcgtttaatgttaaggatgatgacatcattatcttttccgtttatttgaacgagaaccagcaattggaagatgttctacttcacgatgtggaggcagcattgaaacaggttgaaagagaagcttcattgctatacgctatcccaaacaattctttccatgaggtttaccagagacgtcaattctcgcccaaagaagctatatatgctcatattggtgctatattcattaaccattttgttaatcgtttaggctctgattatcaaaaccttttatctcaaatcaccattaagcgtaatgatactactcttttggagattgtagaaaacctaaaaagaaagttaagaaatgaaaccttaactcagcaaactattatcaacatcatgtcgaagcattacactataatttccaagttgtataaaaattttgctcaaattcactattatcataatagtactaaagatatggagaagacattatcttttcaaagactggaaaaagtggagccttttaagaatgaccaagagttcgaagcttacttgaataaattcattccaaatgattcacctgatttgttgatcctgaaaacactgaacatcttcaacaagtctattttgaagacaaatttctttattacaagaaaagtagcaatatcattcagattagatccttccctggtgatgacaaaattcgaatatccagagacaccctatggtatattttttgtcgttggtaatactttcaaagggttccatatcaggttcagagatatcgcaaggggcggtattcgtatagtctgttccaggaatcaggatatttatgatttgaattccaagaacgttattgatgagaactatcaattggcctctactcagcaacgtaaaaataaggatattccagagggtggctctaaaggtgtcatcttattgaacccaggattggtagaacatgaccagacatttgtcgccttttcccaatatgtggatgcaatgattgacattctaatcaacgatccattaaaggaaaactatgtcaaccttttaccaaaggaggaaatattattttttggcccagatgaaggaactgctggtttcgtggattgggcaactaaccatgctcgtgtgaggaactgcccatggtggaaatcatttttgactggaaaatccccatctttgggtggtattccccatgacgaatatggtatgacttctctgggtgttcgtgcttatgttaataaaatttacgaaactttaaacttgacaaattctactgtttacaaattccaaactggtggtccggatggtgatttgggatccaatgaaattcttttatcttcgccaaacgaatgttatttggcaattctggacggttcaggtgtcctgtgtgatcctaaaggtttagataaagatgaattatgccgcttggcacatgaaaggaaaatgatttccgatttcgacacttccaaattatcaaacaacggattttttgtttctgtggatgcaatggatatcatgctaccaaatggtacaattgtagctaacggcacaaccttcagaaacacctttcatactcaaattttcaaatttgtggatcatgtcgacatttttgttccatgcggtggtagaccaaactcaattactctaaataatctacattattttgttgacgaaaagactgggaaatgtaaaattccatatattgtggagggtgccaatctatttataacgcaacctgctaaaaatgctttggaggaacatggctgtattctgttcaaagatgcttctgcaaacaaaggtggtgtcacatcttcatcaatggaagtgttggcctcactagcgcttaacgataacgacttcgtgcacaaatttattggagatgttagtggtgagaggtctgcgttgtacaagtcgtacgttgtagaagtgcagtcaagaattcagaaaaatgctgaattagagtttggtcagttatggaatttgaatcaactaaatggaacccacatttcagaaatttcaaaccaattgtccttcactataaacaaattgaacgacgatctagttgcttctcaagagttgtggctcaatgatctaaaattaagaaactacctattgttggataaaataattccaaaaattctgattgatgttgctgggcctcagtccgtattggaaaacattccagagagctatttgaaagttcttctgtcgagttacttatcaagcacttttgtttaccagaacggtatcgatgttaacattggaaaattcttggaatttattggtgggttaaaaagagaagcggaggcaagtgcttga

SEQ ID NO: 1400 - DNA, 3279 bp, Artificial Sequence
  Description of Artificial Sequence: Synthetic polynucleotide
atgctttttgataacaaaaatcgcggtgctttaaactctttgaacacaccagatattgcttctttatctatatcttccatgtctgactatcacgtgtttgattttcccggtaaggacttacagagagaggaagtgatagatttgttggatcagcaagggtttattcccgacgatttgatcgaacaagaagtagattggttttataactctttgggtattgacgatttgttcttcagtagagaatctccccaattaatctctaatatcatacattctttgtatgcttccaagttggatttctttgcgaagtccaaattcaacggaattcagccaaggttgttcagcattaaaaacaaaattataactaatgataatcatgccatctttatggaatctaatactggtgtcagcataagcgattctcagcaaaaaaactttaaatttgctagtgacgccgtcggaaacgatactttggagcatggtaaggataccatcaaaaaaaataggattgaaatggatgattcttgtccaccttatgaattagattccgaaattgatgaccttttcttggataacaagtctcaaaaaaactgcagattagtttctttttgggctccagaaagcgaattaaagttgacttttgtttatgagagtgtttaccctaatgatgatccagccggcgtagatatttcctctcaggatttgttgaaaggtgatattgaaagtattagtgataagaccatgtacaaagtttcttccaacgaaaataaaaaactttacggtctcttacttaagttggttaaagaaagagaaggtcctgtcattaagactactcgctccgtagaaaataaggatgaaattaggttattagtcgcttacaagagattcaccactaagcgttattactctgctttgaactctttgttccactattacaagttgaaaccttctaagttctatttagagtcttttaatgttaaggatgatgacatcattatcttttccgtttatttgaacgagaaccagcaattggaagatgttttacttcacgatgtggaggcagcattgaaacaggttgaaagagaagcttctttgttgtacgctatcccaaacaattctttccatgaggtttaccagagacgtcaattctctcccaaagaagctatatatgctcatattggtgctatattcattaaccattttgttaatcgtttaggctctgattatcaaaaccttttatctcaaatcaccattaagcgtaatgatactactcttttggagattgtagaaaacttgaaaagaaagttaagaaatgaaaccttaactcagcaaactattatcaacatcatgtccaagcattacactataatttccaagttgtataaaaattttgctcaaattcactattatcataatagtactaaagatatggagaagacattatcttttcaaagattagaaaaagtggagccttttaagaatgaccaagagttcgaagcttacttgaataaattcattccaaatgattctcctgatttgttgatcttgaaaacattgaacatcttcaacaagtctattttgaagacaaatttctttattacaagaaaagtagcaatatctttcagattagatccttccttagtgatgacaaaattcgaatatccagagacaccctatggtatattttttgtcgttggtaatactttcaaagggttccatatcaggttcagagatatcgcaaggggcggtattcgtatagtctgttccaggaatcaggatatttatgatttgaattccaagaacgttattgatgagaactatcaattggcctctactcagcaacgtaaaaataaggatattccagagggtggctctaaaggtgtcatcttattgaacccaggattggtagaacatgaccagacatttgtcgccttttcccaatatgtggatgcaatgattgacattttgatcaacgatccattaaaggaaaactatgtcaaccttttaccaaaggaggaaatattattttttggcccagatgaaggaactgctggtttcgtggattgggcaactaaccatgctcgtgtgaggaactgcccatggtggaaaagttttttgactggaaaatccccatctttgggtggtattccccatgacgaatatggtatgacttctttgggtgttcgtgcttatgttaataaaatttacgaaactttaaacttgacaaattctactgtttacaaattccaaactggtggtccggatggtgatttgggatccaatgaaattcttttatcttctccaaacgaatgttatttggcaattttggacggttctggtgtcttatgtgatcctaaaggtttagataaagatgaattatgccgcttggcacatgaaaggaaaatgatttccgatttcgacacttccaaattatctaacaacggattttttgtttctgtggatgcaatggatatcatgcttccaaatggtacaattgtagctaacggcacaaccttcagaaacacctttcatactcaaattttcaaatttgtggatcatgtcgacatttttgttccatgcggtggtagaccaaactctattactttgaataatttacattattttgttgacgaaaagactgggaaatgtaaaattccatatattgtggagggtgccaatttatttataacgcaacctgctaaaaatgctttggaggaacatggctgtattcttttcaaagatgcttctgcaaacaaaggtggtgtcacatcttcttctatggaagtgttggcctctttagcgcttaacgataacgacttcgtgcacaaatttattggagatgttagtggtgagaggtctgcgttgtacaagtcctacgttgtagaagtgcagtctagaattcagaaaaatgctgaattagagtttggtcagttatggaatttgaatcaattgaatggaacccacatttctgaaatttccaaccaattgtccttcactataaacaaattgaacgacgatttggttgcttctcaagagttgtggctcaatgatttgaaattaagaaactacttgttgttggataaaataattccaaaaattttaattgatgttgctgggcctcagtccgtattggaaaacattccagagagctatttgaaagttcttttatccagttacttatccagcacttttgtttaccagaacggtatcgatgttaacattggaaaattcttggaatttattggtgggttaaaaagagaagcggaggcaagtgcttga

SEQ ID NO: 1401 - DNA, 2100 bp, Saccharomyces cerevisiae
atgtcgttgtctagaatcctgcgatataatcagagaaataacaaaactacagcttccttgactgcagaacacgcctattccgataattgggcatattccgtctcgttaggcgatcccactagtgttggtgtgaatatggctgctaagacgggtgaggcgctaaataaatcatatgattccgttttttcttctctccctgttgcagatagtgtacctcggacagactttactgcatcttcccgggatgatgaaaacacggacgtgcaaaagctgaccacttcctggatggagaaaattgacacgaagatgcccgaaaacatatctaaaatcgactctaatattatttcctctcccatggtcagtaaggttgaagcaagatttattgttcctaaaggaagattgaggaaaaattctaccgattttacgtcatctttctcaaactcgttaagtttacccaaaagttatggcaaattaattttctttacatcaaagaaaaacagcagtagtaccaaaaaaaatctagcgaatgatatcagtgataacaagcataacaacaattcttctaatactatcggtcacaatattccagtcacgacagccacggcgacatgtgatgagattgcatgcacctccacagaacatgaatataatgtttatgaggaagagaggatgttcactactcgtgtatattctctagaagattcggtctcttcactgtccacgaatcctctcgacgacacgtattcagaagcagtgcaagtaaatacaagacatatcgaggacactgaaagcacggcccatataagaaaacactcctatactacgtcattgtcaagtatcaaaaggctcttcaaaataacgtcttttagcaataacaacagtaactcatgcgatcaccaggaaagcacagttgcagatgattgcgctatatcatcatcattgaaggaaacaacttcttcgccagtctcaactggatcattctctctcatgatcgagaatgaagacagcgatagagatcagattattcaggctttatatagtaatattgaagcatccactgacttggtttccaggaaatatagagatctcgacgttgttctcggcgaaggttctggtggtaaagtgaaactggtccaaagggtcctggataataaagtttttgcattaaaggaatacaggtcaaagaaaaaaagggaatctgagagaaaatacatcaagaacataatttctgaatattgtattgcctccacattgaagaacccaaatatttgtgaaacattggaaatactgtatgagaaaggtaaaattttccaaattctcgagtattgcgaatatgatttattttctttggttatgagtgaaaagatgcattacgaggaaatatgctgtctttttaaacagctgatcaacggcgtaaaatatttgcacgacatcggtctctctcatcgtgatttgaagctagacaactgcgttgtaacacgaaggggaatcttgaaattgattgattttggcgcttccagtgtcttccactatccattgtcttcacagatgattgaagcaaatggaattgttggtagcgacccctacttgtcacccgaagtcttttatttcaatgagtacgatccaagagcacttgacgtttggtccgtggggataatattcttttgtatgataacgagaagatttccttggaaatatcccaaagtgaaagatgttcaattcaaggcattttgttccggaagaggtgtgtcatcttttaaagatcttgtgacacggcctgctaccgatgacagcaataattatgataatgatggctacgaagaaggagtcattgatatgggtcccaatttcattctgcacagactaccagaagaaactcacaaaataatgaggcgtatactggaagtttcacctttcagaagaattaccataaacggaatattacaagatggctggatcaaagaaatagaaacgtgtcaagttgtgggcgcggcaagcccaaatgaggcatcgcttcgaataataaacaaaggtaatcacatacatacaaacatcgatcaacgatacgcccacattggcggcctgcatcagcgaacgtaa

SEQ ID NO: 1402 - DNA, 2100 bp, Artificial Sequence
  Description of Artificial Sequence: Synthetic polynucleotide
atgtctttgtctagaatcttgagatataatcagagaaataacaaaactacagcttccttgactgcagaacacgcctattccgataattgggcatattccgtctctttaggcgatcccactagtgttggtgtgaatatggctgctaagacgggtgaggcgttgaataaaagttatgattccgttttttcttctctccctgttgcagatagtgtacctagaacagactttactgcatcttccagagatgatgaaaacacggacgtgcaaaagttgaccacttcctggatggagaaaattgacacgaagatgcccgaaaacatatctaaaatcgactctaatattatttcctctcccatggtcagtaaggttgaagcaagatttattgttcctaaaggaagattgaggaaaaattctaccgattttacgtcttctttcagtaactctttaagtttacccaaaagttatggcaaattaattttctttacatccaagaaaaacagcagtagtaccaaaaaaaatttggcgaatgatatcagtgataacaagcataacaacaattcttctaatactatcggtcacaatattccagtcacgacagccacggcgacatgtgatgagattgcatgcacctccacagaacatgaatataatgtttatgaggaagagaggatgttcactactcgtgtatattctttggaagattctgtctcttctttatccacgaatcctctcgacgacacgtattctgaagcagtgcaagtaaatacaagacatatcgaggacactgaaagcacggcccatataagaaaacactcctatactacgtctttgagcagtatcaaaaggctcttcaaaataacgtcttttagcaataacaacagtaactcttgcgatcaccaggaaagcacagttgcagatgattgcgctatatcttcttctttgaaggaaacaacttcttctccagtctctactggaagtttctctctcatgatcgagaatgaagacagcgatagagatcagattattcaggctttatatagtaatattgaagcatccactgacttggtttccaggaaatatagagatctcgacgttgttctcggcgaaggttctggtggtaaagtgaaattggtccaaagggtcttggataataaagtttttgcattaaaggaatacaggtctaagaaaaaaagggaatctgagagaaaatacatcaagaacataatttctgaatattgtattgcctccacattgaagaacccaaatatttgtgaaacattggaaatactttatgagaaaggtaaaattttccaaattctcgagtattgcgaatatgatttattttctttggttatgagtgaaaagatgcattacgaggaaatatgctgtctttttaaacagttaatcaacggcgtaaaatatttgcacgacatcggtctctctcatcgtgatttgaagttggacaactgcgttgtaacaagaaggggaatcttgaaattgattgattttggcgcttccagtgtcttccactatccattgtcttctcagatgattgaagcaaatggaattgttggtagcgacccctacttgagccccgaagtcttttatttcaatgagtacgatccaagagcacttgacgtttggtccgtggggataatattcttttgtatgataacgagaagatttccttggaaatatcccaaagtgaaagatgttcaattcaaggcattttgttccggaagaggtgtgtcttcttttaaagatcttgtgacaagacctgctaccgatgacagcaataattatgataatgatggctacgaagaaggagtcattgatatgggtcccaatttcattttacacagattaccagaagaaactcacaaaataatgaggcgtatattggaagtttctcctttcagaagaattaccataaacggaatattacaagatggctggatcaaagaaatagaaacgtgtcaagttgtgggcgcggcaagcccaaatgaggcatctcttagaataataaacaaaggtaatcacatacatacaaacatcgatcaaagatacgcccacattggcggcttgcatcagaggacgtga

SEQ ID NO: 1403 - DNA, 678 bp, Saccharomyces cerevisiae
atggggtccgaggaagataaaaagttgaccaagaagcagctcaaagctcagcagtttagaaaaagtaaggaggaaaaagatcaagagaaagacgtaaaaaaagagcaagcaccagaaggaaaaagacccaacagtgcagccggaaatgatggtgaagaacccgtgaagaaaaaaagaaaaacacgtagaggccgtggtggtaagggcaaaaatggtaaaaagggcaacagatttattgtctttgtcggtagcttacctagagacatcactgctgttgaattgcaaaaccattttaaaaatagttcacccgaccagatccgcctcagagctgacaaaggtattgcatttttggaattcgatgctgacaaagatcgcaccggcattcaaagacgtatggacattgccttattacaacatgggaccttactgaaagagaagaagatcaatgtcgagctaactgttggcggaggtggtaacagtcaagagcgtctagaaaaattgaaaaacaaaaacatcaagttggatgaagaacgtaaagagaggttgacaaagatgattaacgacggcaaccaaaagaaaatcgccaaaactaccgccactgcagctcaaacctctggaacagacaacaagcctgttcctgcaggaattcatcctgatagagccaaactacttaaatga

SEQ ID NO: 1404 - DNA, 678 bp, Artificial Sequence
  Description of Artificial Sequence: Synthetic polynucleotide
atggggtccgaggaagataaaaagttgaccaagaagcagctcaaagctcagcagtttagaaaaagtaaggaggaaaaagatcaagagaaagacgtaaaaaaagagcaagcaccagaaggaaaaagacccaacagtgcagccggaaatgatggtgaagaacccgtgaagaaaaaaagaaaaacacgtagaggccgtggtggtaagggcaaaaatggtaaaaagggcaacagatttattgtctttgtcggtagcttacctagagacatcactgctgttgaattgcaaaaccattttaaaaatagttctcccgaccagatccgcctcagagctgacaaaggtattgcatttttggaattcgatgctgacaaagatcgcaccggcattcaaagacgtatggacattgccttattacaacatgggaccttattgaaagagaagaagatcaatgtcgagttaactgttggcggaggtggtaacagtcaagagcgtttagaaaaattgaaaaacaaaaacatcaagttggatgaagaacgtaaagagaggttgacaaagatgattaacgacggcaaccaaaagaaaatcgccaaaactaccgccactgcagctcaaacctctggaacagacaacaagcctgttcctgcaggaattcatcctgatagagccaaattacttaaatga

SEQ ID NO: 1405 - DNA, 633 bp, Saccharomyces cerevisiae
atgttctcatattcagatttctgttctatcggtacggccatgatcttatcggccacaacgttcctaatgggtgttttcttcagtaacatgccatacgattatcatcttttatttaatcctaactctactcaagagcatttcgatttggcactgagacattaccaaattttacatgagactccattgccggtgattgttactttgtgcgttgttgccggtattggcttagttggtggtacaattaaggttttcaagccaaaccctgaactgcagatgtttgagtattgttcattggggttgtacgtgttggctatctgtgtgtttctcactaatgtgaaaacaggtatcgactgttctgtgagccataattggggagaagttacggaaaatcagggtttggcagttattgcttcctccaacataattttattagttatgtttgccggtgttatcatcctacaaattggtttgtggtacagtaactgggatttgcaaaaaagattaaaggagttttatgctcaagaagaaagagaagctgccaatgccggtaaaaagactgagaaagttgacaatgcgaaaaagaatgataacaaatctaaaggtgctcaaaagaggaagaacgccaaaaaatag

SEQ ID NO: 1406 - DNA, 633 bp, Artificial Sequence
  Description of Artificial Sequence: Synthetic polynucleotide
atgttctcttattctgatttctgttctatcggtacggccatgatcttatctgccacaacgttcttaatgggtgttttcttcagtaacatgccatacgattatcatcttttatttaatcctaactctactcaagagcatttcgatttggcattgagacattaccaaattttacatgagactccattgccggtgattgttactttgtgcgttgttgccggtattggcttagttggtggtacaattaaggttttcaagccaaaccctgaattacagatgtttgagtattgttctttggggttgtacgtgttggctatctgtgtgtttctcactaatgtgaaaacaggtatcgactgttctgtgagccataattggggagaagttacggaaaatcagggtttggcagttattgcttcctccaacataattttattagttatgtttgccggtgttatcatcttgcaaattggtttgtggtacagtaactgggatttgcaaaaaagattaaaggagttttatgctcaagaagaaagagaagctgccaatgccggtaaaaagactgagaaagttgacaatgcgaaaaagaatgataacaaatctaaaggtgctcaaaagaggaagaacgccaaaaaatga

SEQ ID NO: 1407 - DNA, 1119 bp, Saccharomyces cerevisiae
atgctactaaatgtaacgtcttcgcaatacataagcacacctcaatccagaagtctgagtgaaattgacacgtcagaaaccgccagcttatcatcagctacagaccacatttttgcattatccactgaggttgtatcctcaattacgacgaacctcattgagggtttagaaagttcgattcaggtccccatatcaaccgcatatggtacgacttccttccgcaacaacacttcaagtccacaatatctggttagcaattgcacttcctctgttcaaagcaatatcactatcgatagaggactgttaagtacattgaagactttcactacttcacaggtgccaaccatagagccttcgacgactaaactaacaacaccattatctacaacatttacctcaacctctacatcggaaatatactccgtattcaccagcgagaactcagtttatatcatctatgaccaagaatacaaatttacagagcgatcgacaacatttaacacccactttccccaaacaactgtgcttcaagaatcaaatcctccgttaactttcaccattccatccaataccattaccggggatgctaaactttatcaatatctatctggtgcactaaacactcaagatacctcagatgccaataatagaaggaccggagttattgtcggttctacggttggagttgtcattggagttgtaatagtaatttttatcggattcataattattagaaacagacgaaacgtgaaaaatcacagcaaaaagggctttagccatgatattggcaagagggtaagttgtgatgaggtaacagaaacagaagcaccgtcaaatccgttcctaaatgtccttaattataaagtaacaaccaacggcgagggcaaacgagattcctttgaaaatggtagagatttacacagagctagttcctcagacggtatatatatagcacatccttattatgggatggcggatcacgaatccgggagattttcatacgtatcgtcatacaatgaatctgcggagtcatccattgaagaaacaagttccagtgcgtctactattactcggccaaatattcagcaaaccaatagctttttgagagaaattatttaa

SEQ ID NO: 1408 - DNA, 1119 bp, Artificial Sequence
  Description of Artificial Sequence: Synthetic polynucleotide
atgttattgaatgtaacgtcttctcaatacataagcacacctcaatccagaagtttaagtgaaattgacacgagtgaaaccgccagcttatcttctgctacagaccacatttttgcattatccactgaggttgtatccagtattacgacgaacctcattgagggtttagaaagttctattcaggtccccatatctaccgcatatggtacgacttccttccgcaacaacacttctagtccacaatatttggttagcaattgcacttcctctgttcaaagcaatatcactatcgatagaggattattaagtacattgaagactttcactacttctcaggtgccaaccatagagccttctacgactaaattaacaacaccattatctacaacatttacctccacctctacaagtgaaatatactccgtattcaccagcgagaactctgtttatatcatctatgaccaagaatacaaatttacagagaggtctacaacatttaacacccactttccccaaacaactgtgcttcaagaaagtaatcctccgttaactttcaccattccatccaataccattaccggggatgctaaactttatcaatatttatctggtgcattgaacactcaagatacctctgatgccaataatagaaggaccggagttattgtcggttctacggttggagttgtcattggagttgtaatagtaatttttatcggattcataattattagaaacagaagaaacgtgaaaaatcacagcaaaaagggctttagccatgatattggcaagagggtaagttgtgatgaggtaacagaaacagaagcaccgtccaatccgttcttgaatgtccttaattataaagtaacaaccaacggcgagggcaaaagagattcctttgaaaatggtagagatttacacagagctagttccagtgacggtatatatatagcacatccttattatgggatggcggatcacgaatccgggagattttcttacgtatcttcctacaatgaatctgcggagtcttccattgaagaaacaagttccagtgcgtctactattactagaccaaatattcagcaaaccaatagctttttgagagaaattatttga

SEQ ID NO: 1409 - DNA, 1716 bp, Saccharomyces cerevisiae
atgagtatgtcaagcaaaaacgagaataagatatcagtagaacaaagaatatccactgatatcggtcaggcttaccagttacaaggccttgggtctaacctaaggtcgattcgctccaagactggtgccggtgaagtgaactatatcgatgctgctaaatctgtaaatgataaccaactgcttgcagagatcggttataaacaagaattaaaaagacaattttcaacattacaagttttcggtattgcgttctccattatgggtctattgccctccattgcatctgtgatgggtggtgggctcggtggtggtccagcaacattagtgtggggttggttcgttgctgcgtttttcattttactggtgggtattaccatggctgaacatgcaagttccattcctaccgctggtggtttgtactactggacgtattactatgctccagaaggttataaagagattatttcttttattattggttgctcaaactccctagcgttggcagccggtgtgtgttccattgattacggtttggctgaggaaattgctgctgctgtcacattaaccaaagatggaaattttgaagtaacgagtgggaaactttacggtatatttgctggagcagtggtggttatgtgtatttgtacatgtgttgcttctggggccattgctcgtctgcagacgctaagtatatttgccaatcttttcattattgttttattgttcattgcgctaccgattggtaccaagcatagaatgggaggtttcaatgatggtgactttatatttgggaaatatgaaaacttaagtgactggaataatggttggcaattttgtcttgctggtttcatgcctgctgtctggactattggttcctttgattcatgtgtccatcaatctgaagaagccaaagatgccaagaaatcagtccccattggtataatctcatctattgctgtttgttggattttaggttggttgattattatttgtttaatggcctgtatcaaccctgatattgacagcgttttggactccaagtacggctttgctttggctcaaataatttatgattcgttaggaaaaaaatgggccattgcatttatgtcattgatcgcattctgtcaatttctaatgggtgcttccattaccacagctgtttctagacaagtttgggcattttcccgtgataacggtttgcccctatcaaagtatattaaaagagtggattctaaatactcggtcccttttttcgctattttggctgcctgtgtaggttccttgattttaggattgttatgtttgattgatgatgccgccactgatgcattatttagtctggctgttgcaggaaacaatttggcatggagtacccctacagttttccgtttaacatcaggtagagatttatttagacctggtccattttatttgggtaaaatctggtctccaattgttgcttggacaggtgttgctttccaattgttcattattattttggttatgttcccctctcaacaacatggtattactaaatccacaatgaattatgcatgcgttattggtcccggtatctggatccttgcaggtatctactacaaagtttacaagaagaaatactaccacggtccagcaaccaatttgtcggatgatgattatactgaagccgttggtgctgatgttatcgacacaattatgtccaaacaggaaccataa

SEQ ID NO: 1410 - DNA, 1716 bp, Artificial Sequence
  Description of Artificial Sequence: Synthetic polynucleotide
atgagtatgtctagcaaaaacgagaataagatatctgtagaacaaagaatatccactgatatcggtcaggcttaccagttacaaggccttgggtctaacttgaggtctattcgctccaagactggtgccggtgaagtgaactatatcgatgctgctaaatctgtaaatgataaccaattacttgcagagatcggttataaacaagaattaaaaagacaattttctacattacaagttttcggtattgcgttctccattatgggtttattgccctccattgcatctgtgatgggtggtgggctcggtggtggtccagcaacattagtgtggggttggttcgttgctgcgtttttcattttattggtgggtattaccatggctgaacatgcaagttccattcctaccgctggtggtttgtactactggacgtattactatgctccagaaggttataaagagattatttcttttattattggttgcagcaactccttagcgttggcagccggtgtgtgttccattgattacggtttggctgaggaaattgctgctgctgtcacattaaccaaagatggaaattttgaagtaacgagtgggaaactttacggtatatttgctggagcagtggtggttatgtgtatttgtacatgtgttgcttctggggccattgctcgtttgcagacgttgagtatatttgccaatcttttcattattgttttattgttcattgcgttaccgattggtaccaagcatagaatgggaggtttcaatgatggtgactttatatttgggaaatatgaaaacttaagtgactggaataatggttggcaattttgtcttgctggtttcatgcctgctgtctggactattggttcctttgattcttgtgtccatcaatctgaagaagccaaagatgccaagaaatctgtccccattggtataatctcttctattgctgtttgttggattttaggttggttgattattatttgtttaatggcctgtatcaaccctgatattgacagcgttttggactccaagtacggctttgctttggctcaaataatttatgattctttaggaaaaaaatgggccattgcatttatgtctttgatcgcattctgtcaatttttgatgggtgcttccattaccacagctgtttctagacaagtttgggcattttcccgtgataacggtttgcccttatccaagtatattaaaagagtggattctaaatactctgtcccttttttcgctattttggctgcctgtgtaggttccttgattttaggattgttatgtttgattgatgatgccgccactgatgcattatttagtttggctgttgcaggaaacaatttggcatggagtacccctacagttttccgtttaacatctggtagagatttatttagacctggtccattttatttgggtaaaatctggtctccaattgttgcttggacaggtgttgctttccaattgttcattattattttggttatgttcccctctcaacaacatggtattactaaatccacaatgaattatgcatgcgttattggtcccggtatctggatccttgcaggtatctactacaaagtttacaagaagaaatactaccacggtccagcaaccaatttgagtgatgatgattatactgaagccgttggtgctgatgttatcgacacaattatgtccaaacaggaaccatga

SEQ ID NO: 1411 - DNA, 1020 bp, Saccharomyces cerevisiae
atgacatcttggagggataaatccgcgaaagtgcaagtgaaggagtcagaactgccctcctctataccggcgcagactggattgacgtttaatatatggtataataaatggtcccaagggtttgcggggaatacacgatttgttagtccatttgctttgcagccgcaacttcattctgggaagactaggggcgataatgatggccagttgttcttctgtctattttttgcaaagggtatgtgttgccttggccctaaatgtgaatatctgcatcatataccagacgaagaagatataggtaaactggccctgaggacagaggtattggactgttttggtagagaaaaatttgctgactatagagaggatatgggcgggatcggttcatttaggaagaaaaacaagacattgtatgtaggtggtattgatggagcattgaatagcaagcatttgaagccagctcagatagaaagcagaattcgatttgtattttctcgattgggtgatattgatagaatacgatacgttgagagcaaaaactgtggatttgtgaagtttaaatatcaagctaatgcagaatttgccaaagaagccatgagcaatcagacattgctgctacccagcgataaagaatgggatgatagaagggagggtactggactattggtgaaatgggcaaatgaagatccagaccccgctgcacagaaaagactgcaagaagaactgaagttagagtctttaaacatgatggtgcatctaatcaataacaataccaatagtgctggcactgaggttaataataagaataatgaaaggttagacaggacatttccagaagcaagtgttgataatgtcaagaaaagactattgccattagataatggaatggagagtgatgattttatagaaaaattgaagaaagtgaaaaaaaatatcagtagagaaaatatttcatcaaagccatctgttggtaagcttggtggtcccttgctcgattacctctcctctgatgaggattag

SEQ ID NO: 1412 - DNA, 1020 bp, Artificial Sequence
  Description of Artificial Sequence: Synthetic polynucleotide
atgacatcttggagggataaatccgcgaaagtgcaagtgaaggagagtgaattgccctcctctataccggcgcagactggattgacgtttaatatatggtataataaatggtcccaagggtttgcggggaatacaagatttgttagtccatttgctttgcagccgcaacttcattctgggaagactaggggcgataatgatggccagttgttcttctgtttattttttgcaaagggtatgtgttgccttggccctaaatgtgaatatttgcatcatataccagacgaagaagatataggtaaattggccttaaggacagaggtattggactgttttggtagagaaaaatttgctgactatagagaggatatgggcgggatcggttcttttaggaagaaaaacaagacattgtatgtaggtggtattgatggagcattgaatagcaagcatttgaagccagctcagatagaaagcagaattagatttgtattttctagattgggtgatattgatagaataagatacgttgagagcaaaaactgtggatttgtgaagtttaaatatcaagctaatgcagaatttgccaaagaagccatgagcaatcagacattgttattgcccagcgataaagaatgggatgatagaagggagggtactggattattggtgaaatgggcaaatgaagatccagaccccgctgcacagaaaagattacaagaagaattgaagttagagtctttaaacatgatggtgcatttgatcaataacaataccaatagtgctggcactgaggttaataataagaataatgaaaggttagacaggacatttccagaagcaagtgttgataatgtcaagaaaagattattgccattagataatggaatggagagtgatgattttatagaaaaattgaagaaagtgaaaaaaaatatcagtagagaaaatatttcttccaagccatctgttggtaagcttggtggtcccttgctcgattacctctcctctgatgaggattga

SEQ ID NO: 1413 - DNA, 471 bp, Saccharomyces cerevisiae
atgggtaaagacaacaaggaacataaggaaagcaaagaaagcaaaaccgtagacaactatgaggccagaatgcctgctgtgttgccattcgctaaaccattggcctctaagaaactaaacaagaaggtcttgaagaccgtgaagaaggcttccaaggccaagaatgttaaaagaggtgtcaaggaagttgtcaaggccttaagaaagggtgaaaaaggtttagtcgtcatcgccggtgacatttctccagctgatgttatttcccacatcccagtcttatgtgaagatcactctgtcccatacatcttcataccttcaaagcaagacttaggtgccgctggcgctacaaaaagacctacctcagttgtctttatcgtcccaggtagcaataagaaaaaagatggaaaaaataaagaagaagaatacaaggaatctttcaacgaagttgtcaaagaagttcaagctttatga

SEQ ID NO: 1414 - DNA, 471 bp, Artificial Sequence
  Description of Artificial Sequence: Synthetic polynucleotide
atgggtaaagacaacaaggaacataaggaaagcaaagaaagcaaaaccgtagacaactatgaggccagaatgcctgctgtgttgccattcgctaaaccattggcctctaagaaattgaacaagaaggtcttgaagaccgtgaagaaggcttccaaggccaagaatgttaaaagaggtgtcaaggaagttgtcaaggccttaagaaagggtgaaaaaggtttagtcgtcatcgccggtgacatttctccagctgatgttatttcccacatcccagtcttatgtgaagatcactctgtcccatacatcttcataccttctaagcaagacttaggtgccgctggcgctacaaaaagacctacctctgttgtctttatcgtcccaggtagcaataagaaaaaagatggaaaaaataaagaagaagaatacaaggaatctttcaacgaagttgtcaaagaagttcaagctttatga

SEQ ID NO: 1415 - DNA, 1617 bp, Saccharomyces cerevisiae
atgagatttgtgttcgatgaggttttcaattcagatactgattctccagaatttgaggaaacatgttctacaacatcttctacgtcatcgcaatgccctacacctgagccgagcccagcaataaagttaccttcattcacgaaagttggcacgaagaaattggtaaatgagtcggtagttattttagatcctgctctagaaaacgccttgcgcgatttgaaccttcaatcgaaactgatccccattaatgagcccattgtagccgcgtcatcgataatagtaccgcattcaaccaatatgccactaccgagagcatcgcattcgtcattgctagataatgctaagaactcaaatgcgacagcacccttactcgaggcaatagaagaatcttttcaaaggaaaatgcaaaacttggtgcttgccaatcagaaagaaattcaatctattagagaaaataaacgtcgtgttgaagagcaacgtaagcgaaaagaggaggaagagcgcaaacgtaaggaagctgaggaaaaggccaagcgggagcaggaattattacgtcaaaagaaggatgaagaagaacgtaaacgcaaagaagctgaagcaaagctagcgcagcagaaacaagaagaagaaaggaagaaaatagaagaacagaatgaaaaggaaagacaattgaaaaaagaacatgaagccaaattattgcagcagaaggataaattgggtaaagcagttacaaactttgataaaatctccaaaatgttttggcattataaagacaaaattgctcaaataaagcaagacatagttctgcctataaaaaaagctgatgtgaatgtaaggaatttgctctcacgtcataaaaggaaaattaacccgaaattcggacaattaactaatagcaaccagcaactttttaaaatacagaatgaactaactcaattgataaatgatactaaaggcgactctctagcatatcattggattttaaactttattgccaaagccgtagtacatcaggcggaaacagaagtcagggtaaaaccagagtctgctctgcccctagggaaattgactttatatttgttagtccaattcccagagttacaggaattgtttatggcaagacttgtcaagaaatgcccctttgtgataggattcacgtgtgagattgacacagaaaaaggccgtcaaaacatgggatggaaaagaaacaacgagaataaatgggaagataacacatcctacgatgagagaatgggcgggatcttatcattatttgccataataacgagattacagttacctcaagaatttatcaccaccacgagtcatcctttccccatcgcattatcgtggcatattttggctagaatatgtaatacgccactaaatttaataacaaatacccattttgtcatactcggttcgtggtgggatgccgctgccgtacagtttcttcaggcgtatgggaaccaagcctctaaattgctaatcttgattggtgaggaattgacctccagaatggctgaaaagaaatatgtgggtgctgcgagattaagaattttattagaggcctggcaaaataataatatggagtcctttccggaaatgtctccttag

SEQ ID NO: 1416 - DNA, 1617 bp, Artificial Sequence
  Description of Artificial Sequence: Synthetic polynucleotide
atgagatttgtgttcgatgaggttttcaattctgatactgattctccagaatttgaggaaacatgttctacaacatcttctacgtcttctcaatgccctacacctgagccgagcccagcaataaagttaccttctttcacgaaagttggcacgaagaaattggtaaatgagagtgtagttattttagatcctgctttggaaaacgccttgcgcgatttgaaccttcaaagtaaattaatccccattaatgagcccattgtagccgcgtcttctataatagtaccgcattctaccaatatgccattaccgagagcatctcattcttctttgttggataatgctaagaacagtaatgcgacagcacccttactcgaggcaatagaagaatcttttcaaaggaaaatgcaaaacttggtgcttgccaatcagaaagaaattcaatctattagagaaaataaacgtcgtgttgaagagcaacgtaagagaaaagaggaggaagagcgcaaacgtaaggaagctgaggaaaaggccaagagagagcaggaattattacgtcaaaagaaggatgaagaagaacgtaaacgcaaagaagctgaagcaaagttggcgcagcagaaacaagaagaagaaaggaagaaaatagaagaacagaatgaaaaggaaagacaattgaaaaaagaacatgaagccaaattattgcagcagaaggataaattgggtaaagcagttacaaactttgataaaatctccaaaatgttttggcattataaagacaaaattgctcaaataaagcaagacatagttttacctataaaaaaagctgatgtgaatgtaaggaatttgctcagccgtcataaaaggaaaattaacccgaaattcggacaattaactaatagcaaccagcaactttttaaaatacagaatgaattgactcaattgataaatgatactaaaggcgactctttggcatatcattggattttaaactttattgccaaagccgtagtacatcaggcggaaacagaagtcagggtaaaaccagagtctgctcttcccttagggaaattgactttatatttgttagtccaattcccagagttacaggaattgtttatggcaagacttgtcaagaaatgcccctttgtgataggattcacgtgtgagattgacacagaaaaaggccgtcaaaacatgggatggaaaagaaacaacgagaataaatgggaagataacacatcctacgatgagagaatgggcgggatcttatctttatttgccataataacgagattacagttacctcaagaatttatcaccaccacgagtcatcctttccccatcgcattatcttggcatattttggctagaatatgtaatacgccattgaatttaataacaaatacccattttgtcatactcggttcttggtgggatgccgctgccgtacagtttcttcaggcgtatgggaaccaagcctctaaattgttgatcttgattggtgaggaattgacctccagaatggctgaaaagaaatatgtgggtgctgcgagattaagaattttattagaggcctggcaaaataataatatggagtcctttccggaaatgtctccttga

SEQ ID NO: 1417 - DNA, 2289 bp, Saccharomyces cerevisiae
atgcataaacctttaagatggctaataacgatagccttctacgtttcgaacgttatattaataggctattccctttctagtaatggctcaatatctgaattttatctgcattctgttgtacttattgaatgcttctctttactaggagtggttacctctgactgcttaacaccatctttgtcatacatttccagtaacatattccatatttccgatagagtatccggcatgactttattagcattggggaatgcacttcctgatattactagtacttaccagtcgatgaaatctggcgtgacttccttggccattggtgagttatttggtggcatattttttctgttaaccgttgtgattggactaatgggctgcgtagccactattcaatttcaacatgacaagtctattgaaacttacacagaagaaagctttgaccaaaatttatcgtatgatagaagcaattatatattggatgtcggaatattcacttttatgctcttagtttcgggcacttttctagcagatggaagactgtacttttgggagtgtattgtcatggttttaacctactgctgttgtgctgtctatttaataaaaagctacaaatatccctgcgaaatcaatgatgctttagaaagagaggtagaaataaaaaaaactgtacttgcaaataatcatatcactgttccaaatcgatttacattaacgactaccagtgacattacatccacagacgatggaataagatatgtaaggcctttgggggatacacagattgatgaggacaacgctattagtttagatccaactcgtttaccaagtaaatccctggataacatttcgagatttaatcaaggtatacctgaaagaagggatttaataagacgtagaatacggggatatttacggtcgcattatcatggctgggtaagaatgacgttacaagatcttttgaatatatgggagaagcagaatctttttaacaatacagtaaaatcgttgtctttaccctccgatgatactcatttatttactaaagcttctttagatgaagaagggaggcctttaataagaaaaaggatgaattcattacaacctaaggatttttacaaatatttgtccctacggaatggggaaaattcaaatgcgctggatactgcaatctctgctccccaaaacgagtatcaaacttactataatgaacccacaagtttgtttttgactgtgccacaaaaaaaaacctccaagaaatcattaagctgcgatcgcattccaaacttggtccggagtaataatattatattaaatgacgaggctacacgtacacaggaatctaccaatgccttgaacagcatatcagatgttatcgacaactctctcttacagtatgagagagatgatataattctcgatagaacactatctctctgttcaacaaagagtagaaccgcttggcatagtttccaactttacaattacttaacagatgtgtccttggaaattggtttctttgagttcttgtcattattagtcactacgccggtatcaataattctttatctttcaataccatcagagataagtcaaacagaccatgacttacccctttcatacctacagaatattcaattgattgcttcgccaataattctcaaccaactcatcacaaataacttttcattttggttgctcatcttatcgctggtgatagccatcttattatattttaaaactaggaccataccgaacaagttcaactctgatataatctttacagtagcatttttattgtcattggcctgtctttcgaaagctgtccacataattgtagtcacgttaacgcattggataaatgtgtttaatatatcggaaacaatactaggtttaaccatttttacatggggtaattcgattggtgatttagtgtcaaatattacattcgtcaaaataggtgttttagaaatcgcgataggagcttgttttggcagtccacttttatatttcttatttggcgtcggatttgatggaattatgataatgctaggcgacaaaactggaaaaatagtgagtggcagagatagtaatattttaatgcatcatattgattttaaagtggataaaaacttaatcaatactggagtcggaattctgatcgcgtttttgatatttacggttttgataccattaaacgactggaaaattgacaagaagattagtattgcacttcttacgttgtatatagttgtcacatgtattagtgtttttttagaagttcaccaagtgtaa

SEQ ID NO: 1418 - DNA, 2289 bp, Artificial Sequence
  Description of Artificial Sequence: Synthetic polynucleotide
atgcataaacctttaagatggttgataacgatagccttctacgtttctaacgttatattaataggctattccctttctagtaatggctctatatctgaattttatttgcattctgttgtacttattgaatgcttctctttattaggagtggttacctctgactgcttaacaccatctttgagttacatttccagtaacatattccatatttccgatagagtatccggcatgactttattagcattggggaatgcacttcctgatattactagtacttaccagtccatgaaatctggcgtgacttccttggccattggtgagttatttggtggcatattttttttattaaccgttgtgattggattaatgggctgcgtagccactattcaatttcaacatgacaagtctattgaaacttacacagaagaaagctttgaccaaaatttatcttatgatagaagcaattatatattggatgtcggaatattcacttttatgctcttagtttctggcacttttttggcagatggaagattatacttttgggagtgtattgtcatggttttaacctactgctgttgtgctgtctatttaataaaaagctacaaatatccctgcgaaatcaatgatgctttagaaagagaggtagaaataaaaaaaactgtacttgcaaataatcatatcactgttccaaatagatttacattaacgactaccagtgacattacatccacagacgatggaataagatatgtaaggcctttgggggatacacagattgatgaggacaacgctattagtttagatccaactcgtttaccaagtaaatccttggataacatttctagatttaatcaaggtatacctgaaagaagggatttaataagacgtagaataagaggatatttaagaagccattatcatggctgggtaagaatgacgttacaagatcttttgaatatatgggagaagcagaatctttttaacaatacagtaaaatctttgtctttaccctccgatgatactcatttatttactaaagcttctttagatgaagaagggaggcctttaataagaaaaaggatgaattctttacaacctaaggatttttacaaatatttgtccttgagaaatggggaaaatagtaatgcgttggatactgcaatctctgctccccaaaacgagtatcaaacttactataatgaacccacaagtttgtttttgactgtgccacaaaaaaaaacctccaagaaatctttaagctgcgatcgcattccaaacttggtcagaagtaataatattatattaaatgacgaggctacacgtacacaggaatctaccaatgccttgaacagcatatctgatgttatcgacaactctctcttacagtatgagagagatgatataattctcgatagaacattatctctctgttctacaaagagtagaaccgcttggcatagtttccaactttacaattacttaacagatgtgtccttggaaattggtttctttgagttcttgtctttattagtcactacgccggtatctataattctttatctttccataccaagtgagataagtcaaacagaccatgacttacccctttcttacttacagaatattcaattgattgcttctccaataattctcaaccaactcatcacaaataacttttctttttggttgctcatcttatctttggtgatagccatcttattatattttaaaactaggaccataccgaacaagttcaactctgatataatctttacagtagcatttttattgtctttggcctgtctttctaaagctgtccacataattgtagtcacgttaacgcattggataaatgtgtttaatatatctgaaacaatattaggtttaaccatttttacatggggtaattctattggtgatttagtgagtaatattacattcgtcaaaataggtgttttagaaatcgcgataggagcttgttttggcagtccacttttatatttcttatttggcgtcggatttgatggaattatgataatgcttggcgacaaaactggaaaaatagtgagtggcagagatagtaatattttaatgcatcatattgattttaaagtggataaaaacttaatcaatactggagtcggaattttgatcgcgtttttgatatttacggttttgataccattaaacgactggaaaattgacaagaagattagtattgcacttcttacgttgtatatagttgtcacatgtattagtgtttttttagaagttcaccaagtgtga

SEQ ID NO: 1419 - DNA, 984 bp, Saccharomyces cerevisiae
atgggccctgaaactctacatattggtgggagaaaatcgaaattggcggtaatacaatccaaccatgttttaaaactgatcgaagaaaagtatccggactacgactgcaaggttttcactttgcaaactcttggtgaccagattcaattcaaacctttgtactcatttggcggtaaagctttatggacaaaggagttggaagaccatctttaccatgacgatccctcaaagaagcttgacttgatcgttcattctctgaaggacatgcccactttactaccagagggtttcgagctggggggtatcactaagcgggtcgatccaacagattgtcttgtcatgcccttttactctgcttataagtctctggatgaccttccagacggggggattgtgggaacctcatccgtgagaagatctgctcagctaaaaagaaaatacccacatttgaaatttgaaagtgtcagaggaaatatacaaactagattacaaaaactagacgacccaaaatctccgtaccaatgcatcatcttggcgtctgctgggttgatgcgtatggggttggaaaacagaattacgcagcgattccattcggatacaatgtaccatgcagttggacaaggcgccctgggtatagaaattagaaagggtgacaccaagatgatgaagattcttgacgaaatttgcgatctaaatgcaactatatgttgcctttcggagcgtgctttgatgagaactttagaggggggttgttccgttcctattggtgtggaatctaaatacaatgaagagactaaaaaattactattaaaggccattgtagttgacgttgaaggcacagaagcagtagaagacgaaattgaaatgctaatagaaaatgttaaagaagattccatggcgtgtggtaagatactagctgaaagaatgattgccgatggcgcaaagaaaattctggatgaaattaatttagacagaatcaaatga

SEQ ID NO: 1420 - DNA, 984 bp, Artificial Sequence
  Description of Artificial Sequence: Synthetic polynucleotide
atgggccctgaaactttacatattggtgggagaaaatctaaattggcggtaatacaatccaaccatgttttaaaattaatcgaagaaaagtatccggactacgactgcaaggttttcactttgcaaactcttggtgaccagattcaattcaaacctttgtactcttttggcggtaaagctttatggacaaaggagttggaagaccatctttaccatgacgatccctccaagaagcttgacttgatcgttcattctttgaaggacatgcccactttattaccagagggtttcgagttagggggtatcactaagcgtgtcgatccaacagattgtcttgtcatgcccttttactctgcttataagtctttagatgaccttccagacggggggattgtgggaacctcttccgtgagaagatctgctcagttgaaaagaaaatacccacatttgaaatttgaaagtgtcagaggaaatatacaaactagattacaaaaattagacgacccaaaatctccgtaccaatgcatcatcttggcgtctgctgggttgatgcgtatggggttggaaaacagaattacgcagagattccattctgatacaatgtaccatgcagttggacaaggcgcccttggtatagaaattagaaagggtgacaccaagatgatgaagattcttgacgaaatttgcgatttgaatgcaactatatgttgcctttctgagcgtgctttgatgagaactttagaggggggttgttccgttcctattggtgtggaatctaaatacaatgaagagactaaaaaattattattaaaggccattgtagttgacgttgaaggcacagaagcagtagaagacgaaattgaaatgttgatagaaaatgttaaagaagattccatggcgtgtggtaagatattggctgaaagaatgattgccgatggcgcaaagaaaattttagatgaaattaatttagacagaatcaaatga

SEQ ID NO: 1421 - DNA, 1182 bp, Saccharomyces cerevisiae
atgaataggaatacgactaccaataagaacgcgaatttgaataacagtagaaatgctaacgctcccggtgaagcaggtcatcagaacaagacgggattgatatactggactaaccctagcaagtcgggtgcgagctttgctgcgactctggtgagtttgctgatcctcagaaatgtcaatgttatttctgttttacttaagatcggatacatggtgttgttcacgagttttgcggtggagctttctacaaaggtgctatttgataaaggagtagtgtctaggtttggcatgcaagagtctccggaccttgttggcgtcttaaagcctcatatcgaccgcgaattggatcgtctgcctgcgttagaggacagaatcagaaagttagtgtttgcacacagaacaagaaacaattttaccattggtgtttccctctatttcttgcacggcctatttgctatattctctatgaacactgttttgataatgaccaccatctttttgtacactgtgcctttaatctacgatagaaagcaggctagaattgaccgtgctatcgacaggatgaaggatctagttattcataggtttcacaaaaattacaacaaggtggttgaaaagactgaaccatacattgacaagattatcccaccccaaaccgatgaaggcagctactcaacctctatcagtaacgaaaacaaatcttctacttctcaacgtaacaagagcggcctttcctcttctgagtttgacaacatgaacgacacgtcagcctccaaaagtggcaaagacagctattctacctctcaatataaccgagccgaatatccagtttctcagaatgagaatattggcaccttaaaatctgggaagcaggaaataccaacagagaaggatttcaacaacaggcatgaaaacttcagtaaaccagatgtcaagacatatgatccaagaacagttgatattgaagaagaattagcagctcatcagcgtgaactggagcaaaacctaaaagatggtgattacaatctggtaggaagcaaggaaatcccagatccaatcaccgttccagctccaactagacacaccactaaacccgccgaaagccaatcgattcccatcaagaataatgaaaccttacacaaaaccacgcacggcctaaagcaaaaattgcaacacgcataa

SEQ ID NO: 1422 - DNA, 1182 bp, Artificial Sequence
  Description of Artificial Sequence: Synthetic polynucleotide
atgaataggaatacgactaccaataagaacgcgaatttgaataacagtagaaatgctaacgctcccggtgaagcaggtcatcagaacaagacgggattgatatactggactaaccctagcaagtctggtgcgagctttgctgcgactttggtgagtttgttgatcctcagaaatgtcaatgttatttctgttttacttaagatcggatacatggtgttgttcacgagttttgcggtggagctttctacaaaggtgctttttgataaaggagtagtgtctaggtttggcatgcaagagtctccggaccttgttggcgtcttaaagcctcatatcgaccgcgaattggatcgtttacctgcgttagaggacagaatcagaaagttagtgtttgcacacagaacaagaaacaattttaccattggtgtttccctctatttcttgcacggcttatttgctatattctctatgaacactgttttgataatgaccaccatctttttgtacactgtgcctttaatctacgatagaaagcaggctagaattgaccgtgctatcgacaggatgaaggatttggttattcataggtttcacaaaaattacaacaaggtggttgaaaagactgaaccatacattgacaagattatcccaccccaaaccgatgaaggcagctactctacctctatcagtaacgaaaacaaatcttctacttctcaacgtaacaagagcggcctttcctcttctgagtttgacaacatgaacgacacgagtgcctccaaaagtggcaaagacagctattctacctctcaatataacagagccgaatatccagtttctcagaatgagaatattggcaccttaaaatctgggaagcaggaaataccaacagagaaggatttcaacaacaggcatgaaaacttcagtaaaccagatgtcaagacatatgatccaagaacagttgatattgaagaagaattagcagctcatcagcgtgaattagagcaaaacttgaaagatggtgattacaatttggtaggaagcaaggaaatcccagatccaatcaccgttccagctccaactagacacaccactaaacccgccgaaagccaatctattcccatcaagaataatgaaaccttacacaaaaccacgcacggcttgaagcaaaaattgcaacacgcatga

SEQ ID NO: 1423 - DNA, 1872 bp, Saccharomyces cerevisiae
atggttaatcagggccaaccgcaacctaacctctatgacaaacacattaacatgtttccaccagcaagggcgcgggagtcctcgcataaattgggaaatgccaattcggataggcatggtttgccagctcaaaatatagtgcctgcaccctatccagtggatgactctatcgttgaactcacaccagctattccttttacatccccttcatcttcctcatcattatcgctgcctttgagtgcgctgaatttcacagacgggaatgctgatggtggtcaattaggcactccagtaaccataaatagtaataacggcatggacatttttaattccaagccaacaggtgaaataggatatgccaataatggcaccaacagtactggtagtaggtatgaacttcctttcaattttagttctacaaaagagagtttgggttcaccagctgtacaagatgcatcaataagcagtggaaatcgaatatcagagtctgtaagggacaactcagcgccaccaccctatgaggaatctgaatctaggatactgcaggaaaaagtttacagaaccgaggaaaaagctccaatacgacctttgaataataatcctgttccaccacaaaaaatcaaccaaccacccactgggagcgcgaagacagacgataatgggtcctcaggtggtgaggacaaactgtcttcctattcaccagaggcattggctttctatcaagtgtacaagaagacaattactgactcttcaaaattcacccccgagatacaaatgcaatggtgtgaaacattacttacatatgcctttaatgaggatttcatatcgcaatataacataaacgcggagaagctcaaaagaagcttaaagcctgaggaaatgctcaaaaaccagaaagtcattttggaacattcattcaaggtgctcacaaaattgataactttaaaatggccacctgccatgtatttaatggggacgctgtattcacaccaaccctatttacctataaagaacaaaaacatcgttattaaaaatgatgaaaaggcgctggaatattattgtaaagctgcgaaattgaacaattcagatgcatgctaccgtgcaggtgtatgctttgaataccaaaggggcacctcttctttggatccatcaccaaccaaagaacaatgcataaaaaaggccttccaatactaccagcatggcgcagaagtttgttcaaattctgcgtgtatgtataaattagggatgagccatttatacggtctgaacatgcaaaagactgatgtattgctagctattaaatggtttgataaagctgcccaaaagggtgactctccacaaacattatatgagttaggtaaaatatatgaattcagtgttttgccgccagaaatccagaacctattatttgcgaacggcatacgaaaagactctcaactggcaataaaatactaccaacaatgtgccaaagattttgagtaccctttagcgcaatggaaattaggaaattgttatgagtttggagacctagggttgccagtggtggccaaaaaatccatatattggtattccaaagctgctgctgctcagccgaaggggaatccgatggcaatgttatccttaagtggatggtacttaacgggagcaccaaatattttgaaaccaaacaataaagaggcattcaactgggccttgaagagcagcaagtgttcagacggtaaattagcccgcactgaatttgccttaggattttattacgaaaaaggtgtcggttgtgaagttgatttggatctggccaaacaatattatcagagggctgcaagaatgggattcaggaaggcagttgatgctcttcgaagtttgacaaattaa

SEQ ID NO: 1424 - DNA, 1872 bp, Artificial Sequence
  Description of Artificial Sequence: Synthetic polynucleotide
atggttaatcagggccaaccgcaacctaacctctatgacaaacacattaacatgtttccaccagcaagggcgagagagtcctctcataaattgggaaatgccaattctgataggcatggtttgccagctcaaaatatagtgcctgcaccctatccagtggatgactctatcgttgaactcacaccagctattccttttacatccccttcttcttcctcttctttatctttgcctttgagtgcgttgaatttcacagacgggaatgctgatggtggtcaattaggcactccagtaaccataaatagtaataacggcatggacatttttaattccaagccaacaggtgaaataggatatgccaataatggcaccaacagtactggtagtaggtatgaacttcctttcaattttagttctacaaaagagagtttgggttctccagctgtacaagatgcatctataagcagtggaaatagaatatctgagtctgtaagggacaactctgcgccaccaccctatgaggaatctgaatctaggatattacaggaaaaagtttacagaaccgaggaaaaagctccaataaggcctttgaataataatcctgttccaccacaaaaaatcaaccaaccacccactgggagcgcgaagacagacgataatgggtccagtggtggtgaggacaaattatcttcctattctccagaggcattggctttctatcaagtgtacaagaagacaattactgactcttctaaattcacccccgagatacaaatgcaatggtgtgaaacattacttacatatgcctttaatgaggatttcatatctcaatataacataaacgcggagaagctcaaaagaagcttaaagcctgaggaaatgctcaaaaaccagaaagtcattttggaacattctttcaaggtgctcacaaaattgataactttaaaatggccacctgccatgtatttaatggggacgctttattctcaccaaccctatttacctataaagaacaaaaacatcgttattaaaaatgatgaaaaggcgttagaatattattgtaaagctgcgaaattgaacaattctgatgcatgctaccgtgcaggtgtatgctttgaataccaaaggggcacctcttctttggatccatctccaaccaaagaacaatgcataaaaaaggccttccaatactaccagcatggcgcagaagtttgttctaattctgcgtgtatgtataaattagggatgagccatttatacggtttgaacatgcaaaagactgatgtattgttggctattaaatggtttgataaagctgcccaaaagggtgactctccacaaacattatatgagttaggtaaaatatatgaattcagtgttttgccgccagaaatccagaacttattatttgcgaacggcataagaaaagactctcaattggcaataaaatactaccaacaatgtgccaaagattttgagtaccctttagcgcaatggaaattaggaaattgttatgagtttggagacttggggttgccagtggtggccaaaaaatccatatattggtattccaaagctgctgctgctcagccgaaggggaatccgatggcaatgttatccttaagtggatggtacttaacgggagcaccaaatattttgaaaccaaacaataaagaggcattcaactgggccttgaagagcagcaagtgttctgacggtaaattagcccgcactgaatttgccttaggattttattacgaaaaaggtgtcggttgtgaagttgatttggatttggccaaacaatattatcagagggctgcaagaatgggattcaggaaggcagttgatgctcttaggagtttgacaaattga

SEQ ID NO: 1425 - DNA, 750 bp, Saccharomyces cerevisiae
atgttgcagctaaggtttatgcctggatgggtccccagaaatggtttttttggtttgaaggagacaattggtacagtacataagagattttatgctctggcttctgaacaaccctcaagaaagacagtaaagccgctggactcgaggaagacgtttctcatcgatacatacaagcatttaatggagaacagttctatgattttttttgtccattacaataatctttccaaaacagaagatcaccatttcagattcaagattaaacagacaggagggaaactcacaaaagtaagaaacaacctgttcgaagtctacttgagaaattcgcatctgcccgacccatgtggattcgtgaagcgtaaagagcaaaactggaaacatccactcttgccactactgaagggtcctacggccacaattacatacgaagacaccaaccctcaacaagtagccaagctattgaaggttctgcagtcagcacaagacaagctgatggtgattggtgcaaaagtagaaaacgaagttttgaatgtggaaaaaataaacacttttaagactctccccacaaagccggaaatgcagtcgcagttagtcagcgttttgcaaatgctaagtgggttgggtttggttcgtacgttggaaaacagttcaaatgcattgtatttaacactaaaatctcacaatgacaaccaaaaacctaaagaggatgtggagtcaactacagatgcagaatcgaagggatcaaagtaa

SEQ ID NO: 1426 - DNA, 750 bp, Artificial Sequence
  Description of Artificial Sequence: Synthetic polynucleotide
atgttgcagttgaggtttatgcctggatgggtccccagaaatggtttttttggtttgaaggagacaattggtacagtacataagagattttatgctttggcttctgaacaacccagtagaaagacagtaaagccgttagacagcaggaagacgtttctcatcgatacatacaagcatttaatggagaacagttctatgattttttttgtccattacaataatctttccaaaacagaagatcaccatttcagattcaagattaaacagacaggagggaaactcacaaaagtaagaaacaacttgttcgaagtctacttgagaaattctcatctccccgacccatgtggattcgtgaagcgtaaagagcaaaactggaaacatccactcttgccattattgaagggtcctacggccacaattacatacgaagacaccaaccctcaacaagtagccaagttgttgaaggttttacagtctgcacaagacaagttgatggtgattggtgcaaaagtagaaaacgaagttttgaatgtggaaaaaataaacacttttaagactctccccacaaagccggaaatgcagtctcagttagtcagcgttttgcaaatgttaagtgggttgggtttggttcgtacgttggaaaacagtagtaatgcattgtatttaacattaaaatctcacaatgacaaccaaaaacctaaagaggatgtggagtctactacagatgcagaatccaagggatccaagtga

SEQ ID NO: 1427 - DNA, 861 bp, Saccharomyces cerevisiae
atgaaagccaagccactaagccaagatccaggctccaagcgttacgcataccgtataaataaggaagaaaatcgtaaggagttgaagcatgtaaagatcaatgaaagttctttggtgcaagaaggccaaaagatcgacttgccaaagaagagatattatcgtcaaagggcgcattccaacccattttcagatcaccagttagagtacccagtatctccccaggatatggattggtccaaattgtacccttactacaaaaacgcggaaaatggacaaatgacaaagaaggtgacgattgctgatattggctgtggattcggtgggttgatgatagatttatcaccagccttccctgaagatcttatcttagggatggaaattcgtgtgcaggttacaaattacgtggaggatagaattattgccttaaggaacaatacagcttcaaaacatggatttcaaaacattaatgtcttgagaggtaacgctatgaaattcttgcccaacttttttgaaaagggccagctttctaaaatgtttttttgtttccccgatcctcatttcaaacaaagaaagcataaggcaagaattatcactaacaccttgctgagtgagtacgcatatgttttgaaagagggcggtgtcgtgtacacaattacagacgtcaaagacctgcatgagtggatggtaaaacatttagaagagcatcctttatttgaacggttgagcaaagaatgggaagaaaacgatgaatgtgtgaaaataatgagaaatgccacagaagaaggtaaaaaagtggaaagaaagaagggtgacaagttcgtcgcttgtttcacaagattaccaacgccagccatattgtaa

SEQ ID NO: 1428 - DNA, 861 bp, Artificial Sequence
  Description of Artificial Sequence: Synthetic polynucleotide
atgaaagccaagccattaagccaagatccaggctccaagcgttacgcataccgtataaataaggaagaaaatcgtaaggagttgaagcatgtaaagatcaatgaaagttctttggtgcaagaaggccaaaagatcgacttgccaaagaagagatattatcgtcaaagggcgcattccaacccattttctgatcaccagttagagtacccagtatctccccaggatatggattggtccaaattgtacccttactacaaaaacgcggaaaatggacaaatgacaaagaaggtgacgattgctgatattggctgtggattcggtgggttgatgatagatttatctccagccttccctgaagatcttatcttagggatggaaattcgtgtgcaggttacaaattacgtggaggatagaattattgccttaaggaacaatacagcttccaaacatggatttcaaaacattaatgtcttgagaggtaacgctatgaaattcttgcccaacttttttgaaaagggccagctttctaaaatgtttttttgtttccccgatcctcatttcaaacaaagaaagcataaggcaagaattatcactaacaccttgttaagtgagtacgcatatgttttgaaagagggcggtgtcgtgtacacaattacagacgtcaaagacttgcatgagtggatggtaaaacatttagaagagcatcctttatttgaaagattgagcaaagaatgggaagaaaacgatgaatgtgtgaaaataatgagaaatgccacagaagaaggtaaaaaagtggaaagaaagaagggtgacaagttcgtcgcttgtttcacaagattaccaacgccagccatattgtga

SEQ ID NO: 1429 - DNA, 567 bp, Saccharomyces cerevisiae
atgaaggaactgctttactatacattcattgaaactgaagtgactggtgcatttttggtgtttagggaaaagactcaaaaccttgtttttgcctcgttaggtaatgataagctttttttattgggaaaggtggaaggcttcttgaagaaacatgagaaacaggatacaatgtacgatttacaggaactaaaagaggcagaaacatataagaaatcaatcgaaaattatacaatatgtttagaaaacaaaatgccattaccatcgggcgctattccctttgagttcctgtttggaacagattttcaacgtaaagtttggaatgagcttttaaacgtggaacacggccacgtcgtaacatatggtgatattgcaaagagaatagggaagccaactgccgcaagatctgtcggaagagcttgcggctcaaataacctggcattgttagtaccttgccatagaatcgttggtagcaatagaaaattaaccggatataaatggagctgtaaactgaaagaacagttattaaataatgaaaaggaaaatagcttaagccttagtagattgtag

SEQ ID NO: 1430 - DNA, 567 bp, Artificial Sequence
  Description of Artificial Sequence: Synthetic polynucleotide
atgaaggaattgctttactatacattcattgaaactgaagtgactggtgcatttttggtgtttagggaaaagactcaaaaccttgtttttgcctctttaggtaatgataagctttttttattgggaaaggtggaaggcttcttgaagaaacatgagaaacaggatacaatgtacgatttacaggaattgaaagaggcagaaacatataagaaatctatcgaaaattatacaatatgtttagaaaacaaaatgccattaccaagtggcgctattccctttgagttcttatttggaacagattttcaacgtaaagtttggaatgagcttttaaacgtggaacacggccacgtcgtaacatatggtgatattgcaaagagaatagggaagccaactgccgcaagatctgtcggaagagcttgcggcagtaataacttggcattgttagtaccttgccatagaatcgttggtagcaatagaaaattaaccggatataaatggagctgtaaattgaaagaacagttattaaataatgaaaaggaaaatagcttaagccttagtagattgtga

SEQ ID NO: 1431 - DNA, 2064 bp, Saccharomyces cerevisiae
atgaaacctccgttaaacatgtcacgttcaaataaaccacttactcaggaagctaatagttcggcgcatattgatagggcacatcagctagcacaggattttaacagtaaacaggatgataccgcactaacttcactgccccacaagaaccccgacatattcagatttgagaacaacatcacagctcatagctcgcgtcgtggttctctatatagagacagcgatgctactgtggttttgccgctttctgaacatacccctagattatcaatggatgatccataccgccaattactacaacaggctgaaatctcacaactacgaagtaagaaaaaaaggcattccagtcgagttttgcgtacttcgtttatatcttttgtggtgctagtttcctcgctgtcagggttggaccaaggcctcatatctggtaacgttatgactttgtcgttccagaagtattttcattacccacttacttctccgctgggcaatatagtgagcattgttaatctgggtgcgttcatggcgtcgttatttgtctattctggcatcctggagccttgtagcaggaaaaaaatgctccaaataagcacaatgatatactctttgggtgccattgttcaggtcttggctctaaaccaatggtgtttactactgggtagattcttactcggagtaggtatgggctttgccttttctatggtaataatttatcaattcgagtttccccttccctgtataagaaaacggacattaatttccattcaatgcgtctctagtgtcattgcgtattcattcggaatatggattaattgtgctttcagatatttgggctttgcatggagataccctttgtcaacacatgtggcacttggaataatactaaacctaatgtcgttctatcttattttagagtccccttcgtggctgttgaagcaaaagaacgacgtagaggcattggttttaatatcgaatgttttcgatgatggaaatttcgaagaaaaccaaactcagttgaaatttagggtcctgaaacgagacatattattaaagtcacaccttcaaaaaaactcctatccatatgcgtatatcttaaaggatttttcttcaataataaaattgttgataggtttccaacttctcacacgaacaaatggagtggatgctttcttgtattactcaccgttaatattacaacaaatggggagaggagaaagaaaatctatctatttaacggggcttaatgctttaatttacagcatcgtaatattagcatatgttcccttggtgttacggaaacgtaaagagaaaacgaatgtactcttaggttcgattgtgatgtgtgcattgctatttaccatatcttttacagactggtttcccaagagcacaacgaggtatatatcaatactatttgctgtttttctttttacgcacttcatcagttgggattctataggatgggttatgaccattgagcttctacctcacttgtcacaggccccagtgatactactagtctcaaacttttattggatttttaagtggttcgtcagcttaataacccctatacttattgaccgtctgtcttggaagttttatcttattccatctttatcttcctttatttccattatatttgtgctgaagatttttcctatagaaacccgtgacgaaaggttagattctgatgatgattctaccggaaacggtagcggtaaccatgatgatgtttttgacgataccggttctgaattctcctcctcaccatctttttccgcgtatcagataaacactctaggaagtagtatcaaacaaaataatcaagcctattcatctattcaaaatgagcagattctacccaaaaacggaaacttatcgaaccagacacacggttctgcacaaaatgtttatttcattacatctgattcaggaccatcaaggactggagaatttttcagttttcataacagaaccgatccaaatatcagcgacaacattgctgcgaataaacccagttcaggtggaggccagaattcgcctggagacatggcagttgcctag

SEQ ID NO: 1432 - DNA, 2064 bp, Artificial Sequence
  Description of Artificial Sequence: Synthetic polynucleotide
atgaaacctccgttaaacatgtcccgttccaataaaccacttactcaggaagctaatagttctgcgcatattgatagggcacatcagttagcacaggattttaacagtaaacaggatgataccgcattgacttctttaccccacaagaaccccgacatattcagatttgagaacaacatcacagctcatagcagccgtcgtggttctttgtatagagacagcgatgctactgtggttttgccgctttctgaacatacccctagattatctatggatgatccataccgccaattattacaacaggctgaaatctctcaattaagaagtaagaaaaaaaggcattccagtagagttttgcgtacttcttttatatcttttgtggtgcttgtttcctctttaagtgggttggaccaaggcctcatatctggtaacgttatgactttgagtttccagaagtattttcattacccacttacttctccgttgggcaatatagtgagcattgttaatttgggtgcgttcatggcgtctttatttgtctattctggcatcttggagccttgtagcaggaaaaaaatgctccaaataagcacaatgatatactctttgggtgccattgttcaggtcttggctttgaaccaatggtgtttattattgggtagattcttactcggagtaggtatgggctttgccttttctatggtaataatttatcaattcgagtttccccttccctgtataagaaaaagaacattaatttccattcaatgcgtctctagtgtcattgcgtattctttcggaatatggattaattgtgctttcagatatttgggctttgcatggagataccctttgagtacacatgtggcacttggaataatattaaacttgatgagtttctatcttattttagagtccccttcctggttattgaagcaaaagaacgacgtagaggcattggttttaatatccaatgttttcgatgatggaaatttcgaagaaaaccaaactcagttgaaatttagggtcttgaaaagagacatattattaaagtctcaccttcaaaaaaactcctatccatatgcgtatatcttaaaggatttttcttctataataaaattgttgataggtttccaacttctcacaagaacaaatggagtggatgctttcttgtattactctccgttaatattacaacaaatggggagaggagaaagaaaatctatctatttaacggggcttaatgctttaatttacagcatcgtaatattagcatatgttcccttggtgttaagaaaacgtaaagagaaaacgaatgtactcttaggttccattgtgatgtgtgcattgttatttaccatatcttttacagactggtttcccaagagcacaacgaggtatatatccatattgtttgctgtttttctttttacgcacttcatcagttgggattctataggatgggttatgaccattgagcttttacctcacttgtctcaggccccagtgatattattggtctccaacttttattggatttttaagtggttcgtcagcttaataacccctatacttattgaccgtttatcttggaagttttatcttattccatctttatcttcctttatttccattatatttgtgttgaagatttttcctatagaaacccgtgacgaaaggttagattctgatgatgattctaccggaaacggtagcggtaaccatgatgatgtttttgacgataccggttctgaattctcctcctctccatctttttccgcgtatcagataaacactttgggaagtagtatcaaacaaaataatcaagcctattcttctattcaaaatgagcagattttgcccaaaaacggaaacttatctaaccagacacacggttctgcacaaaatgtttatttcattacatctgattctggaccatctaggactggagaatttttcagttttcataacagaaccgatccaaatatcagcgacaacattgctgcgaataaacccagttctggtggaggccagaattctcctggagacatggcagttgcctga

SEQ ID NO: 1433 - DNA, 903 bp, Saccharomyces cerevisiae
atgcctcataccgataagaaacaatcaggattagctcgtcttttggggtccgcctctgcaggcataatggaaattgccgtcttccatcctgtggacaccatttccaaaagactgatgtccaaccacaccaaaataacctctggccaggaattgaatcgtgttatttttcgtgatcatttcagcgaacctttgggcaaacgtttgtttaccttgttcccgggtctcggttacgctgcatcatacaaagttcttcaaagagtgtataaatatggtggtcagccttttgctaacgagtttttgaataagcactacaaaaaggattttgataatcttttcggtgaaaagactggtaaggcaatgagatccgccgctgctggatctttgattggtattggtgaaattgttcttttgccgctggacgtgttgaagattaagagacagaccaatcccgaatcgtttaaaggtagaggtttcatcaagattttgagagacgaaggcctgttcaacttatataggggttgggggtggacggctgccagaaatgctcccggttcattcgccctttttggtggtaatgcattcgccaaggagtatatcttgggtttgaaagattattctcaagctacttggtcccaaaacttcatctcctccatcgtcggtgcttgctcctctctgatcgtttctgctccattagatgtcatcaagacaagaattcaaaataggaattttgataatcctgaaagcgggttgagaatcgtcaaaaacactctgaaaaatgaaggtgtaactgcgtttttcaagggcttaacacctaaattactaacaacgggtccaaaactggttttctcatttgcgttagctcaatctttgatacctagattcgataacctgttgagcaaatga

SEQ ID NO: 1434 - DNA, 903 bp, Artificial Sequence
  Description of Artificial Sequence: Synthetic polynucleotide
atgcctcataccgataagaaacaaagtggattagctcgtcttttggggtccgcctctgcaggcataatggaaattgccgtcttccatcctgtggacaccatttccaaaagattaatgtccaaccacaccaaaataacctctggccaggaattgaatcgtgttatttttcgtgatcatttcagcgaacctttgggcaaacgtttgtttaccttgttcccgggtctcggttacgctgcaagctacaaagttcttcaaagagtgtataaatatggtggtcagccttttgctaacgagtttttgaataagcactacaaaaaggattttgataatcttttcggtgaaaagactggtaaggcaatgagatccgccgctgctggatctttgattggtattggtgaaattgttcttttgccgttagacgtgttgaagattaagagacagaccaatcccgaaagttttaaaggtagaggtttcatcaagattttgagagacgaaggccttttcaacttatataggggttgggggtggacggctgccagaaatgctcccggttctttcgccctttttggtggtaatgcattcgccaaggagtatatcttgggtttgaaagattattctcaagctacttggtcccaaaacttcatctcctccatcgtcggtgcttgctcctctttgatcgtttctgctccattagatgtcatcaagacaagaattcaaaataggaattttgataatcctgaaagcgggttgagaatcgtcaaaaacactttgaaaaatgaaggtgtaactgcgtttttcaagggcttaacacctaaattattaacaacgggtccaaaattggttttctcctttgcgttagctcaatctttgatacctagattcgataaccttttgagcaaatga

SEQ ID NO: 1435 - DNA, 1578 bp, Saccharomyces cerevisiae
atgccaaaaaatcgtggtgtcttggatgccatcactcgcagtgtgatagatggtagtgatcaggagtcgagctcatctttcaactcggacaaggaatatgcggctgtgacgaagggcctcagcagctcaagagtacaaaagaagtcatctttaaggcagatgaaaagcaaagtcaaggagcttcaatctttagtgaatcattaccgagaaaatgaagccgctttagtgtctagcgccaagttattgtccggcgagatcataggctatgaaattaagatggctagtttacatggaaaaatgaaaagtatcctggatgagaacaacgcgttaaaggaaacgcacaagagctctgctgaaaagagaatcgaacttgttcgacttccctctagcaaagaagaacgcaactacgatgaatacactttgcttgttaatctcaagaaggaaatctgcgccaagttacaggactacaaaaacgtccagaacacggtgaacaccaagttagatgagattcacacgttccatgaaaaatactacgaaggactagaactaagtttagacagcaaggtgtttgatgcagaaagctcaaaagagctggccaaagtgaggcgagaactgaataacgtgagaaaaaattccgaaatcaaagtgaataacttgaaaatgcaactgctacaagcaaccaaatcactggagcacttgaagaagcaggctaaagcaaaggatgactatcttaaatgtattcctgagctggtcgacaaagccaatctcacgatgttatcctacaagaaaagcatcgctaaccagagggagactatcgaagcattacaagcagaactatcgcaacaatcagaaacaaaggggcaaatagaaacagaaacacaaaatcaagtacaaatccccaccaatgtgactttggtggacccctttgaggaaaacaatccagaggatttgttcgctatccaggaacaggaattgcaagatctaaggttgcataagaaaatggccgatgagaggagccgaactacccacttgcatttagaaagaaaaaataataccatcaagctactgcagagttacgtgcaatcattaattcaacggctaccaccagcccagcgcaaacaccatttgggcatattccaaaaacttggtagcgaaaaatcgtgtccactcgcccccgctgtggcaagtacatatgcgcctcttctactcttatcccagcattcgaaccatcaagaaattgacaacacccctcaacggcttctattagcggctccagacgggcagtcatattccgaaaagagcacaacactaaaccttgattactcatcaaggaaatcctacttatcaagactacaaccaccacatatagccaacctgaagtctttgactctgaaaactctgccaagggtgcccacggacagtcctcaacttccttcaaaagacaaatctcaagagactgcaaagaaagacgatcggccaaaattggtggcaaatgaaccagtcacactagacacatcaactcctcctgtggcacaaagcttggcggattcaaagcattgttcaggactacataaataa

SEQ ID NO: 1436 - DNA, 1578 bp, Artificial Sequence
  Description of Artificial Sequence: Synthetic polynucleotide
atgccaaaaaatcgtggtgtcttggatgccatcactcgcagtgtgatagatggtagtgatcaggagagcagctcttctttcaacagcgacaaggaatatgcggctgtgacgaagggcctcagcagcagcagagtacaaaagaagtcttctttaaggcagatgaaaagcaaagtcaaggagcttcaatctttagtgaatcattacagagaaaatgaagccgctttagtgtctagcgccaagttattgtccggcgagatcataggctatgaaattaagatggctagtttacatggaaaaatgaaaagtatcttagatgagaacaacgcgttaaaggaaacgcacaagagctctgctgaaaagagaatcgaacttgttcgtcttccctctagcaaagaagaacgcaactacgatgaatacactttgcttgttaatctcaagaaggaaatctgcgccaagttacaggactacaaaaacgtccagaacacggtgaacaccaagttagatgagattcacacgttccatgaaaaatactacgaaggattagaattaagtttagacagcaaggtgtttgatgcagaaagcagtaaagagttggccaaagtgaggagagaattgaataacgtgagaaaaaattccgaaatcaaagtgaataacttgaaaatgcaattattacaagcaaccaaatctttggagcacttgaagaagcaggctaaagcaaaggatgactatcttaaatgtattcctgagttggtcgacaaagccaatctcacgatgttatcctacaagaaaagcatcgctaaccagagggagactatcgaagcattacaagcagaattatctcaacaaagtgaaacaaaggggcaaatagaaacagaaacacaaaatcaagtacaaatccccaccaatgtgactttggtggacccctttgaggaaaacaatccagaggatttgttcgctatccaggaacaggaattgcaagatttaaggttgcataagaaaatggccgatgagaggagcaggactacccacttgcatttagaaagaaaaaataataccatcaagttattgcagagttacgtgcaatctttaattcaaagattaccaccagcccagcgcaaacaccatttgggcatattccaaaaacttggtagcgaaaaaagttgtccactcgcccccgctgtggcaagtacatatgcgcctcttttactcttatcccagcattccaaccatcaagaaattgacaacacccctcaaaggcttttattagcggctccagacgggcagagttattccgaaaagagcacaacattgaaccttgattactcttccaggaaatcctacttatctagattacaaccaccacatatagccaacttgaagtctttgactttgaaaactttaccaagggtgcccacggacagtcctcaacttccttccaaagacaaatctcaagagactgcaaagaaagacgatagaccaaaattggtggcaaatgaaccagtcacattagacacatctactcctcctgtggcacaaagcttggcggattctaagcattgttctggattgcataaatga

SEQ ID NO: 1437 - DNA, 3822 bp, Saccharomyces cerevisiae
atggtcaaacttgctgagttttctcgaacagccacgtttgcgtggtcacatgataaaattccattattggtctctggtaccgtatctggtacggtggatgctaatttctccactgattcatctctagaattgtggtcattgttggctgctgattcggagaagcctattgcttccttgcaagtggattccaaattcaatgatttggattggtctcataataacaagattattgctggtgctctggataacggtagtttggaattgtactccaccaatgaagcaaacaacgctatcaactccatggccagatttagcaaccattcttcctctgtgaagacggtaaagtttaacgcaaagcaagacaacgttcttgcttcgggtggtaacaacggtgaaatttttatttgggacatgaataaatgcactgaatcgccctccaattatactccattgacaccgggtcaatcgatgtcgtccgttgacgaggtcatttccctagcatggaaccaatctttggcccatgtttttgcatctgccgggtcgtctaatttcgcatctatttgggatttgaaggctaagaaggaagtcattcatctaagttacacttcacctaattcaggtatcaagcaacagctgtccgttgttgaatggcacccaaaaaactccacaagagtggcaacggctactggtagcgataatgatccatctatcctgatctgggatttaagaaacgccaacacaccattgcagactttaaatcaaggccatcaaaagggtattttgtcattagattggtgtcatcaggacgaacatctattattgtccagtggtagagataataccgttcttctatggaaccctgagtcagccgaacaactgtcccaattcccagctcgtggaaactggtgttttaagaccaaatttgcaccagaggctccagacctatttgcttgtgcctcctttgataacaaaattgaggtacagactttgcaaaatctcacaaacactttggatgagcaagaaaccgaaactaagcagcaagaatctgaaacagatttttggaataatgtttcccgagaggaatcaaaagagaagccaactgttttccatttacaagccccaacttggtatggggaaccatctcccgcagctcattgggctttcggtggtaaattggttcaaattactccagatggtaaaggtgtatctataacaaacccaaaaatttcaggcttagaatcaaacactactttgagtgaagcgttgaaaactaaggatttcaaaccattaataaatcaaagactggtcaaagttattgatgacgttaatgaagaagattggaatttattggaaaagttatcaatggacggtactgaggagttcttgaaagaggctcttgcattcgacaacgatgaatcagatgcacaagacgatgccaacaatgagaaagaagacgatggggaagaattctttcaacaaattgaaaccaatttccaacccgagggcgatttctccttgtctggtaatatcgaacaaactatttccaagaacttggtttctggcaacattaagagcgctgtgaaaaattctctagagaatgacttactaatggaggccatggtgatcgcattagattcaaataacgaaagattaaaggaaagtgtcaagaatgcctattttgcgaagtatggatctaaatcatcgctctcgaggatactatactccatttctaagagggaagtagatgatttggttgaaaatttggatgtctctcagtggaagtttatctctaaagcaattcaaaacttatatccaaatgatatcgcccagaggaatgaaatgttgattaaattgggagacaggttaaaggaaaatggtcatagacaagattctttgactttgtacttggctgccggatcattagataaggtggcttcaatttggttatcagaatttccagatttggaggataaattgaagaaagataataagacaatttatgaagctcattccgaatgtctaactgagttcattgaaagattcaccgtattttccaacttcattaatggaagctctaccattaataatgagcaattaattgccaaatttttggaatttatcaacttaactacttccacaggaaatttcgaactagccactgaattcttaaatagtttaccaagtgacaatgaagaggttaaaacagaaaaggcacgtgtcttgattgcttccggcaaatcattaccggcacaaaatcctgcgacagcgacgaccagcaaagccaagtatacaaacgccaagacaaataagaacgttcctgtactaccaactcctggaatgccttctactacttctattcctagtatgcaggcaccattttatggtatgacaccaggcgcctctgcaaatgctctacctccaaagccgtacgttccagcaaccaccactagtgctcctgttcatacagaaggtaaatatgcgccaccaagccaaccttcgatggcgtcaccttttgttaacaaaacaaatagctcgaccagattgaattcttttgctcctccgcctaacccatatgccactgcaacagttcctgcaacgaacgtatctacaacgtcgattccgcaaaacacttttgctcctatacaacctggtatgcctattatgggcgactataatgctcaatctagctctattccttcacaacctccaattaatgctgtatcgggtcaaacgccacatctcaaccgtaaagccaatgatggttggaatgatttgcctttgaaggtcaaagaaaaaccatctcgtgccaaggctgtatctgttgcccctccaaatatcctatcgacaccaactccattaaatggtatccctgcaaatgctgctagtaccatgcctccgccacctctttccagagctccctcttctgtgtcaatggtatcaccacctcctctacacaaaaattctagagtcccatccttggttgcaacttctgagtcaccaagggcatccatatcaaatccatacgctcctcctcaatcatcacaacaattcccaataggtactatttctacagcaaaccaaacgtcaaacaccgctcaggtagcttcatcgaacccctatgctccaccaccacaacaaagagtagcaaccccattatctggaggcgtgcctccagctccgttgccaaaggcctctaatccatatgctccaactgcaaccactcaacccaacggttcctcctatcctccaaccggtccgtatactaataaccataccatgacctctcctcctcccgtttttaacaaacctcccactggcccccctccgattagcatgaagaagagaagcaacaagttagctagtatagaacaaaacccatctcaaggtgctacttatcctccaaccctttccagctcggcctctccattgcagccttctcaaccgccaactttggcttctcaggttaatacctccgctgagaatgtcagtcatgaaattccagctgatcaacaacccattgtcgacttcttgaaagaagaactggctcgcgtaacaccattgaccccaaaggagtactccaaacaattaaaggattgtgataaacgattaaagattcttttctaccatttggaaaagcaggatttattaacccaaccaacaatcgattgtttacatgacctcgtcgcattaatgaaggaaaagaaatacaaagaagctatggtcatccatgctaatatcgctacaaaccatgctcaagagggtggtaactggctgacaggagtgaagaggttgattggcatagctgaagcgactttgaattaa

SEQ ID NO: 1438 - DNA, 3822 bp, Artificial Sequence
  Description of Artificial Sequence: Synthetic polynucleotide
atggtcaaacttgctgagttttctcgcacagccacgtttgcgtggtctcatgataaaattccattattggtctctggtaccgtatctggtacggtggatgctaatttctccactgattcttctttggaattgtggtctttgttggctgctgattctgagaagcctattgcttccttgcaagtggattccaaattcaatgatttggattggtctcataataacaagattattgctggtgctttagataacggtagtttggaattgtactccaccaatgaagcaaacaacgctatcaactccatggccagatttagcaaccattcttcctctgtgaagacggtaaagtttaacgcaaagcaagacaacgttcttgcttctggtggtaacaacggtgaaatttttatttgggacatgaataaatgcactgaaagtccctccaattatactccattgacaccgggtcaatctatgtcttccgttgacgaggtcatttccttggcatggaaccaatctttggcccatgtttttgcatctgccgggagttctaatttcgcatctatttgggatttgaaggctaagaaggaagtcattcatttgagttacacttctcctaattctggtatcaagcaacagttgtccgttgttgaatggcacccaaaaaactccacaagagtggcaacggctactggtagcgataatgatccatctatcttaatctgggatttaagaaacgccaacacaccattgcagactttaaatcaaggccatcaaaagggtattttgtctttagattggtgtcatcaggacgaacatcttttattgtccagtggtagagataataccgttcttttatggaaccctgagtctgccgaacaattatcccaattcccagctcgtggaaactggtgttttaagaccaaatttgcaccagaggctccagacttatttgcttgtgcctcctttgataacaaaattgaggtacagactttgcaaaatctcacaaacactttggatgagcaagaaaccgaaactaagcagcaagaatctgaaacagatttttggaataatgtttccagagaggaaagtaaagagaagccaactgttttccatttacaagccccaacttggtatggggaaccatctcccgcagctcattgggctttcggtggtaaattggttcaaattactccagatggtaaaggtgtatctataacaaacccaaaaatttctggcttagaatctaacactactttgagtgaagcgttgaaaactaaggatttcaaaccattaataaatcaaagattggtcaaagttattgatgacgttaatgaagaagattggaatttattggaaaagttatctatggacggtactgaggagttcttgaaagaggctcttgcattcgacaacgatgaaagtgatgcacaagacgatgccaacaatgagaaagaagacgatggggaagaattctttcaacaaattgaaaccaatttccaacccgagggcgatttctccttgtctggtaatatcgaacaaactatttccaagaacttggtttctggcaacattaagagcgctgtgaaaaattctttggagaatgacttattgatggaggccatggtgatcgcattagattctaataacgaaagattaaaggaaagtgtcaagaatgcctattttgcgaagtatggatctaaaagctctctctccaggatattatactccatttctaagagggaagtagatgatttggttgaaaatttggatgtctctcagtggaagtttatctctaaagcaattcaaaacttatatccaaatgatatcgcccagaggaatgaaatgttgattaaattgggagacaggttaaaggaaaatggtcatagacaagattctttgactttgtacttggctgccggatctttagataaggtggcttccatttggttatctgaatttccagatttggaggataaattgaagaaagataataagacaatttatgaagctcattccgaatgtttaactgagttcattgaaagattcaccgtattttccaacttcattaatggaagctctaccattaataatgagcaattaattgccaaatttttggaatttatcaacttaactacttccacaggaaatttcgaattggccactgaattcttaaatagtttaccaagtgacaatgaagaggttaaaacagaaaaggcacgtgtcttgattgcttccggcaaatctttaccggcacaaaatcctgcgacagcgacgaccagcaaagccaagtatacaaacgccaagacaaataagaacgttcctgtattgccaactcctggaatgccttctactacttctattcctagtatgcaggcaccattttatggtatgacaccaggcgcctctgcaaatgctttacctccaaagccgtacgttccagcaaccaccactagtgctcctgttcatacagaaggtaaatatgcgccaccaagccaaccttctatggcgtccccttttgttaacaaaacaaatagctctaccagattgaattcttttgctcctccgcctaacccatatgccactgcaacagttcctgcaacgaacgtatctacaacgtccattccgcaaaacacttttgctcctatacaacctggtatgcctattatgggcgactataatgctcaatctagctctattccttctcaacctccaattaatgctgtatctggtcaaacgccacatctcaaccgtaaagccaatgatggttggaatgatttgcctttgaaggtcaaagaaaaaccatctcgtgccaaggctgtatctgttgcccctccaaatatcttatctacaccaactccattaaatggtatccctgcaaatgctgctagtaccatgcctccgccacctctttccagagctccctcttctgtgtccatggtatctccacctcctttacacaaaaattctagagtcccatccttggttgcaacttctgagtctccaagggcatccatatccaatccatacgctcctcctcaatcttctcaacaattcccaataggtactatttctacagcaaaccaaacgtccaacaccgctcaggtagcttcttccaacccctatgctccaccaccacaacaaagagtagcaaccccattatctggaggcgtgcctccagctccgttgccaaaggcctctaatccatatgctccaactgcaaccactcaacccaacggttcctcctatcctccaaccggtccgtatactaataaccataccatgacctctcctcctcccgtttttaacaaacctcccactggcccccctccgattagcatgaagaagagaagcaacaagttagctagtatagaacaaaacccatctcaaggtgctacttatcctccaaccctttccagcagtgcctctccattgcagccttctcaaccgccaactttggcttctcaggttaatacctccgctgagaatgtcagtcatgaaattccagctgatcaacaacccattgtcgacttcttgaaagaagaattggctcgcgtaacaccattgaccccaaaggagtactccaaacaattaaaggattgtgataaaagattaaagattcttttctaccatttggaaaagcaggatttattaacccaaccaacaatcgattgtttacatgacctcgtcgcattaatgaaggaaaagaaatacaaagaagctatggtcatccatgctaatatcgctacaaaccatgctcaagagggtggtaactggttgacaggagtgaagaggttgattggcatagctgaagcgactttgaattga

SEQ ID NO: 1439 - DNA, 2655 bp, Saccharomyces cerevisiae
atggatcctaatagtaacagttctagcgaaacattacgccaagagaaacagggtttcctagacaaagctcttcagagggtgaagggcatagcactgcgacgaaacaatagtaacaaagatcatacaacagatgatacgacaggtagcatacgaacccctacgagcttgcagcggcaaaattctgacaggcaatctaatatgacatccgtgtttacggatgacatttctaccatagacgacaactcaattttattttcagagcctcctcagaaacaatctatgatgatgtctatatgcgtaggtgtttttgttgcagttggcggatttttatttggttatgatacaggtctgatcaacagtattacatctatgaactatgtgaagtcacacgtagcacctaatcacgattcatttaccgcccaacaaatgtccattttggtgtcatttttgtcattgggaactttttttggggctttaactgcaccatttatatctgattcgtatggcaggaagcctactatcattttcagtacaattttcatcttctctatcggaaattctttacaggtaggtgctggaggaatcacattattgattgtgggaagggtcatttcaggtatcggtataggcgcaatttcagcggttgttccattataccaagcagaagctacacataaatcattaagaggtgctattatttctacttaccaatgggccattacctggggcttgctcgtgtcaagtgcagtgtcgcaagggacacacgcaagaaacgacgcatcttcgtatcggattcccatagggttgcaatatgtctggtcgtcatttctcgctatcgggatgttctttctccctgagagtccacgctattacgttttgaaagacaagctagatgaagcagctaaatctttatcgtttttaagaggtgtaccagtccatgattctgggttactggaagaactagttgaaataaaggcaacatatgattacgaggcatcttttggttcttcgaacttcattgattgttttatttcaagtaaaagtagaccaaagcaaactctaaggatgtttacgggaattgcccttcaagcatttcaacaattttcaggtatcaactttatattttactacggtgtcaatttcttcaataagacaggagtcagtaatagttatctggtttcatttataacctatgctgttaatgttgtctttaatgttcctggtttgttttttgtggaattttttggtagacgtaaggtgctggttgttgggggtgttatcatgactatagccaactttattgtggccattgttgggtgttccttaaagactgtagcggccgcaaaagttatgatagcatttatatgtctattcatagctgccttttctgctacatggggtggtgttgtttgggttatttcagcagaactgtacccattgggtgtgagatctaaatgtacggctatatgcgctgctgctaactggcttgtaaactttatttgtgctttaattaccccttatattgtagatactgggtcgcatacatcatcattaggtgcaaaaatattcttcatttggggctccttaaatgcgatgggggtgatagttgtttacttgaccgtttatgaaacgaagggtttgacattagaagagattgatgaattatatattaagtcatccactggtgtcgtgtcaccaaaatttaataaagatattagggaacgcgcacttaaattccaatacgatcctttgcaaagattagaagacggaaagaacacttttgttgctaaaagaaataattttgacgatgaaacaccaagaaatgattttcgaaatacgatatcgggcgaaatagatcatagtcccaatcaaaaagaagttcattctatcccagaacgtgttgatattcctactagtacagaaattcttgaaagcccgaacaaaagtagtggtatgacagtccctgtgtcaccttctctgcaagacgttccaatcccgcaaacaacagagcctgctgaaattcgaaccaaatatgtggacctaggaaatgggcttggtcttaatacgtataatagagggcctccctcactctcaagcgactcaagcgaagattacacagaagatgaaataggcgggccctcatctcaaggcgaccaaagtaatagaagtactatgaatgatattaatgattatatggcacgtctcattcacagtacttctactgcaagtaacacgacagataagttctccggtaaccaaagtacccttcgttaccacacggcttcctcacattcggatacaactgaagaggacagcaatttgatggacctgggaaacgggcttgccttgaatgcttataacagaggtccaccttcaattttaatgaattccagtgatgaagaggcaaatggtggtgagacgtctgataatttgaacacagctcaagacttggctggtatgaaggaacgaatggcgcagtttgcgcagagctatattgacaagagaggcggtctggaacctgaaactcaatctaatattttgagcacttctctctccgtgatggctgacactaatgaacataataatgaaatcctccactcaagcgaagaaaacgccactaatcaacctgtaaatgaaaataatgatttgaaataa

SEQ ID NO: 1440 - DNA, 2655 bp, Artificial Sequence
  Description of Artificial Sequence: Synthetic polynucleotide
atggatcctaatagtaacagttctagcgaaacattacgccaagagaaacagggtttcttggacaaagctcttcagagggtgaagggcatagcattaaggagaaacaatagtaacaaagatcatacaacagatgatacgacaggtagcataagaacccctacgagcttgcagagacaaaattctgacaggcaatctaatatgacatccgtgtttacggatgacatttctaccatagacgacaactctattttattttctgagcctcctcagaaacaatctatgatgatgtctatatgcgtaggtgtttttgttgcagttggcggatttttatttggttatgatacaggtttgatcaacagtattacatctatgaactatgtgaagtctcacgtagcacctaatcacgattcttttaccgcccaacaaatgtccattttggtgtcctttttgtctttgggaactttttttggggctttaactgcaccatttatatctgattcttatggcaggaagcctactatcattttcagtacaattttcatcttctctatcggaaattctttacaggtaggtgctggaggaatcacattattgattgtgggaagggtcatttctggtatcggtataggcgcaattagtgcggttgttccattataccaagcagaagctacacataaatctttaagaggtgctattatttctacttaccaatgggccattacctggggcttgctcgtgtccagtgcagtgagtcaagggacacacgcaagaaacgacgcatcttcttatagaattcccatagggttgcaatatgtctggtcttcttttctcgctatcgggatgttctttctccctgagagtccacgctattacgttttgaaagacaagttggatgaagcagctaaatctttatcttttttaagaggtgtaccagtccatgattctgggttattggaagaattggttgaaataaaggcaacatatgattacgaggcatcttttggttcttccaacttcattgattgttttatttccagtaaaagtagaccaaagcaaactttgaggatgtttacgggaattgcccttcaagcatttcaacaattttctggtatcaactttatattttactacggtgtcaatttcttcaataagacaggagtcagtaatagttatttggtttcttttataacctatgctgttaatgttgtctttaatgttcctggtttgttttttgtggaattttttggtagacgtaaggtgcttgttgttgggggtgttatcatgactatagccaactttattgtggccattgttgggtgttccttaaagactgtagcggccgcaaaagttatgatagcatttatatgtttgttcatagctgccttttctgctacatggggtggtgttgtttgggttatttctgcagaattatacccattgggtgtgagatctaaatgtacggctatatgcgctgctgctaactggcttgtaaactttatttgtgctttaattaccccttatattgtagatactgggtctcatacatcttctttaggtgcaaaaatattcttcatttggggctccttaaatgcgatgggggtgatagttgtttacttgaccgtttatgaaacgaagggtttgacattagaagagattgatgaattatatattaagtcttccactggtgtcgtgtctccaaaatttaataaagatattagggaacgcgcacttaaattccaatacgatcctttgcaaagattagaagacggaaagaacacttttgttgctaaaagaaataattttgacgatgaaacaccaagaaatgattttagaaatacgatatctggcgaaatagatcatagtcccaatcaaaaagaagttcattctatcccagaacgtgttgatattcctactagtacagaaattcttgaaagcccgaacaaaagtagtggtatgacagtccctgtgtctccttctttacaagacgttccaatcccgcaaacaacagagcctgctgaaattagaaccaaatatgtggacttgggaaatgggcttggtcttaatacgtataatagagggcctccctctctctctagcgactccagcgaagattacacagaagatgaaataggcgggccctcttctcaaggcgaccaaagtaatagaagtactatgaatgatattaatgattatatggcacgtctcattcacagtacttctactgcaagtaacacgacagataagttctccggtaaccaaagtacccttcgttaccacacggcttcctctcattctgatacaactgaagaggacagcaatttgatggacttgggaaacgggcttgccttgaatgcttataacagaggtccaccttctattttaatgaattccagtgatgaagaggcaaatggtggtgagacgtctgataatttgaacacagctcaagacttggctggtatgaaggaaagaatggcgcagtttgcgcagagctatattgacaagagaggcggtttggaacctgaaactcaatctaatattttgagcacttctctctccgtgatggctgacactaatgaacataataatgaaatcctccacagtagcgaagaaaacgccactaatcaacctgtaaatgaaaataatgatttgaaatga

SEQ ID NO: 1441 - DNA, 1128 bp, Saccharomyces cerevisiae
atgcccacgatgatcaaaaaggatgataaagcaatggagccccctaatgaaaaaccgcatagaaagatcgaaagagatgatgttccagaatcttccaatcacatcccacctccagaatctggtgttttaaagggcggtaaagttaattcaaaaaccagagctttaaaggccgttacaagtatcattgcagacgccgatgagaaccctcagaagaaagtgaacaatgagacgaatggagtccaaaagcaaaagacagaagatttgagtaaaagaataggtaaatttgaataccttttttacaagtttttacttgtgttgttatacatctgcttcgggttgtttcggtacggtcaataccaatataataaaatgaaactaagaatattcagtatcatctacaaccatgcatatacaccacagttgattagacaggacgttattcctctgaaaaaaattcctaaaaggttggccgctatcttggaagtcaagccagttggcgacgttggcggcggtgtgacaggtttattaaatgacgcgagtgaaattgtttgctggactgtttcagctggtataaaacatttgatgttgtacgattacgatggaatattacaaagaaatgttccagagctgagaatggaaattcattccaacctggctaaatattttgggccagctcatgttccaaactacgctgttaaaatacctcattctaacaagatattctacaatctagacggaattgaaaccgagactgatgtaggcaatgagatagaagctaaccaagaaaaggacaaaattgctattgaaatttctttattgtctaacagagatggtagagaaacgattgtcgatctgaccaaaactatggctgagttatgtgcggttaacgaattgagcgtttctgacatcacaatggatttagttgattcagaactgaaacaactagttggacccgaaccagatttactgttatacttcgggccttcgttggatttacaagggttcccaccttggcatattagattaaccgaattttattgggaaaaagataacaacgaagtcatatattcggttttcatccgcggcctaagacagtacgcaggatgtaaagtgaatgttggtaaatga

SEQ ID NO: 1442 - DNA, 1128 bp, Artificial Sequence
  Description of Artificial Sequence: Synthetic polynucleotide
atgcccacgatgatcaaaaaggatgataaagcaatggagccccctaatgaaaaaccgcatagaaagatcgaaagagatgatgttccagaatcttccaatcacatcccacctccagaatctggtgttttaaagggcggtaaagttaattctaaaaccagagctttaaaggccgttacaagtatcattgcagacgccgatgagaaccctcagaagaaagtgaacaatgagacgaatggagtccaaaagcaaaagacagaagatttgagtaaaagaataggtaaatttgaataccttttttacaagtttttacttgtgttgttatacatctgcttcgggttgtttagatacggtcaataccaatataataaaatgaaattgagaatattcagtatcatctacaaccatgcatatacaccacagttgattagacaggacgttattcctttgaaaaaaattcctaaaaggttggccgctatcttggaagtcaagccagttggcgacgttggcggcggtgtgacaggtttattaaatgacgcgagtgaaattgtttgctggactgtttctgctggtataaaacatttgatgttgtacgattacgatggaatattacaaagaaatgttccagagttaagaatggaaattcattccaacttggctaaatattttgggccagctcatgttccaaactacgctgttaaaatacctcattctaacaagatattctacaatttggacggaattgaaaccgagactgatgtaggcaatgagatagaagctaaccaagaaaaggacaaaattgctattgaaatttctttattgtctaacagagatggtagagaaacgattgtcgatttgaccaaaactatggctgagttatgtgcggttaacgaattgagcgtttctgacatcacaatggatttagttgattctgaattgaaacaattggttggacccgaaccagatttattattatacttcgggccttctttggatttacaagggttcccaccttggcatattagattaaccgaattttattgggaaaaagataacaacgaagtcatatattctgttttcatccgcggcttaagacagtacgcaggatgtaaagtgaatgttggtaaatga

SEQ ID NO: 1443 - DNA, 546 bp, Saccharomyces cerevisiae
atgggtttgtttgcctctaagttgttcagtaacctttttggtaacaaagaaatgcgtattcttatggttggtcttgatggtgctggtaagaccaccgttttgtacaagttgaaattgggtgaagttatcactaccattccaacaattggtttcaacgttgaaactgtccaatataagaacatttcattcactgtctgggatgtcggtggacaagacagaattagatctctatggagacactactacagaaacactgaaggtgttatctttgttgtcgattctaacgatagatcgcgtattggtgaagctagagaagttatgcaaagaatgttgaacgaagatgaattgagaaacgccgcttggttggtgttcgctaacaagcaagatttgccagaagccatgtctgctgctgaaatcactgaaaaactaggtttacattctattagaaaccgtccatggtttatccaagccacgtgtgctacctccggtgaaggtttgtatgaaggtttggaatggttaagtaacagtttgaaaaactcaacttaa

SEQ ID NO: 1444 - DNA, 546 bp, Artificial Sequence
  Description of Artificial Sequence: Synthetic polynucleotide
atgggtttgtttgcctctaagttgttcagtaacctttttggtaacaaagaaatgcgtattcttatggttggtcttgatggtgctggtaagaccaccgttttgtacaagttgaaattgggtgaagttatcactaccattccaacaattggtttcaacgttgaaactgtccaatataagaacatttctttcactgtctgggatgtcggtggacaagacagaattagatctctttggagacactactacagaaacactgaaggtgttatctttgttgtcgattctaacgatagatctcgtattggtgaagctagagaagttatgcaaagaatgttgaacgaagatgaattgagaaacgccgcttggttggtgttcgctaacaagcaagatttgccagaagccatgtctgctgctgaaatcactgaaaaattgggtttacattctattagaaaccgtccatggtttatccaagccacgtgtgctacctccggtgaaggtttgtatgaaggtttggaatggttaagtaacagtttgaaaaactctacttga

SEQ ID NO: 1445 - DNA, 363 bp, Saccharomyces cerevisiae
atggccggtgttaaagcttacgaactaagaaccaaatccaaggaacaattggcttctcaattggttgacttgaaaaaggagttggctgaattgaaggtccaaaagttgtccagaccatctttgccaaagatcaagaccgtcagaaagagtatcgcctgtgtcttgaccgtcatcaacgaacaacaaagagaagctgttagacaattatacaagggtaagaagtaccaaccaaaggacttgagagccaagaagaccagagctttgagaagagctttgaccaaattcgaagcttcccaagttaccgaaaagcaaagaaagaagcaaatcgctttcccacaaagaaagtacgctattaaggcttaa

SEQ ID NO: 1446 - DNA, 363 bp, Artificial Sequence
  Description of Artificial Sequence: Synthetic polynucleotide
atggccggtgttaaagcttacgaattgagaaccaaatccaaggaacaattggcttctcaattggttgacttgaaaaaggagttggctgaattgaaggtccaaaagttgtccagaccatctttgccaaagatcaagaccgtcagaaagagtatcgcctgtgtcttgaccgtcatcaacgaacaacaaagagaagctgttagacaattatacaagggtaagaagtaccaaccaaaggacttgagagccaagaagaccagagctttgagaagagctttgaccaaattcgaagcttcccaagttaccgaaaagcaaagaaagaagcaaatcgctttcccacaaagaaagtacgctattaaggcttga

SEQ ID NO: 1447 - DNA, 2886 bp, Saccharomyces cerevisiae
atgaccgccatagaagatattttacaaatcaccaccgatccttccgatacccgtggctactctctattgaagtccgaggaagtgcctcaaggctcaactcttggagttgattttattgatacgctactattatatcaactcaccgagaatgagaagttggataaaccgtttgaatatttgaacgattgctttcgccgtaatcagcaacaaaaaagaatcaccaaaaacaagccaaatgctgagtcattacattccactttccaagagattgatcgtcttgtcattggctatggtgtcgttgccttacaaatagaaaacttttgcatgaatggtgctttcatcaattatatcactggaattgtttctaacgttaactcatatactgatttcctttcccaaatcattcaaagagccatattagaaggtaccgctttggatttacttaacgctgttttcccgacattattagaatactgtaataaacatgtcagccattttgatttgaacgaatctgtaatttacaataacgttcttaccatttttgagttatttgttacatttaaacctattgcagaaatattcactaaaatagatggtttttttgcagactatagctgtaaaccacaggattttgaaaggaaaacgatattggggcctattttatctctttctcccatagaagctgctgtggcaatccggaactacggcgataaccttttgcgttccaaacaacagacagccatgatccatgaatctctacaagctgagcataaagttgtcatagatagactcttttttattgtcgataagcttgttcgtggctccttaaactcaaggactgatatgattagttattttgcccatatcgctaataaaaaccatttacgtagagccgatcatccaccattcaaagaactatcctctaacggatttatgtccaatatcactttgttattggttagattttctcaaccatttctagatatttcatataagaaaatcgacaagatcgacgcaaattacttcaacaacccaagtttatttattgatttatcaggggaaacacgattaaattctgattttaaagaggcagatgcattttatgacaagaacagaaaaacagcagattctaagccaaacttcatctctgattgctttttcttgacattaacctatttgcattatggtctgggaggtacattatcatttgaagagaagatgggatctgaaatcaaagcgttaaaggaagaaattgaaaaagtaaagaaaatagctgcgaaccacgatgtctttgccagattcattacagcacaattatccaagatggagaaggcgttgaaaacaacagaatctttgcgatttgctcttcaagggttcttcgctcatagatctcttcaactagaggttttcgactttatttgtggtgcatctacgttcttgattcgtgttgtggatcctgaacacgaatttccgtttaaacaaattaaattgccattaattccggaccaaataggtgttgaaaacgtggacaacgctgattttttgagagcgcatgctccagtgccttttaaatactatccagaatttgttgtagaaggtccagttaactattctctatacatttcgaagtaccagacctctccaatcttcagaaatccacgtctgggatcgtttgttgagtttacaacaatggtcctccgttgtcctgaattggtttccaacccacatttaaaaggtaaattagtgcagttattaagcgttggtgctatgcctctaacagacaattcccccggattcatgatggatatattcgaacacgacgaattagttaacaagaatctgttatatgctctactagacttttatgttattgttgaaaaaacaggctcttcttcacaattttacgataaattcaacagcagatatagcatatcaataattttggaggagctttattacaagataccatcttataaaaaccaattgatctggcagtctcaaaacaatgctgacttttttgtgaggttcgttgctcgtatgttgaatgacttgactttcctgttggatgaaggcctaagtaatttggctgaggtgcataatatccaaaatgagctggataatcgtgcaaggggcgcgccaccaacaagagaggaagaggacaaagaactacaaacaagattggcgtctgcttccaggcaagctaagtcctcgtgtggattggccgataaatcgatgaaactgttcgaaatctattcgaaggatataccggctgcatttgtcacaccagaaatcgtatatagactggcaagtatgctaaactataacttagagtcacttgtcggtcccaaatgcggggaactaaaagtgaaagacccacaaagttattcattcaacccaaaagatttgttgaaagccttaacaactgtttatatcaatctttccgagcaatcagagttcatcagtgctgtcgctaaagatgaaagatcatttaatagaaatctctttgttcgcgcagttgatattcttggtagaaaaactggtttagcatctccagagttcatcgaaaaactattgaactttgccaataaagccgaagagcaaagaaaggctgatgaagaggaagatcttgagtatggtgatgttcctgacgagttcttagatcctttgatgtacacaattatgaaggatcctgtcattttaccagcatccaagatgaatattgatagaagcacgatcaaagcacatctgcttagtgactctactgacccgtttaatagaatgcctttaaaactagaggatgtaacacctaatgaagagttaaggcaaaagattctttgtttcaaaaaacaaaaaaaggaagaagcaaaacataaagcaagcgagtga

SEQ ID NO: 1448 - DNA, 2886 bp, Artificial Sequence
  Description of Artificial Sequence: Synthetic polynucleotide
atgaccgccatagaagatattttacaaatcaccaccgatccttccgatacccgtggctactctttgttgaagtccgaggaagtgcctcaaggctccactcttggagttgattttattgatacgttattattatatcaactcaccgagaatgagaagttggataaaccgtttgaatatttgaacgattgctttcgccgtaatcagcaacaaaaaagaatcaccaaaaacaagccaaatgctgagtctttacattccactttccaagagattgatcgtcttgtcattggctatggtgtcgttgccttacaaatagaaaacttttgcatgaatggtgctttcatcaattatatcactggaattgtttctaacgttaacagttatactgatttcctttcccaaatcattcaaagagccatattagaaggtaccgctttggatttacttaacgctgttttcccgacattattagaatactgtaataaacatgtcagccattttgatttgaacgaatctgtaatttacaataacgttcttaccatttttgagttatttgttacatttaaacctattgcagaaatattcactaaaatagatggtttttttgcagactatagctgtaaaccacaggattttgaaaggaaaacgatattggggcctattttatctctttctcccatagaagctgctgtggcaatcagaaactacggcgataaccttttgcgttccaaacaacagacagccatgatccatgaatctttacaagctgagcataaagttgtcatagatagactcttttttattgtcgataagcttgttcgtggctccttaaacagcaggactgatatgattagttattttgcccatatcgctaataaaaaccatttacgtagagccgatcatccaccattcaaagaattatcctctaacggatttatgtccaatatcactttgttattggttagattttctcaaccatttttggatatttcttataagaaaatcgacaagatcgacgcaaattacttcaacaacccaagtttatttattgatttaagtggggaaacaagattaaattctgattttaaagaggcagatgcattttatgacaagaacagaaaaacagcagattctaagccaaacttcatctctgattgctttttcttgacattaacctatttgcattatggtttgggaggtacattatcttttgaagagaagatgggatctgaaatcaaagcgttaaaggaagaaattgaaaaagtaaagaaaatagctgcgaaccacgatgtctttgccagattcattacagcacaattatccaagatggagaaggcgttgaaaacaacagaatctttgagatttgctcttcaagggttcttcgctcatagatctcttcaattggaggttttcgactttatttgtggtgcatctacgttcttgattcgtgttgtggatcctgaacacgaatttccgtttaaacaaattaaattgccattaattccggaccaaataggtgttgaaaacgtggacaacgctgattttttgagagcgcatgctccagtgccttttaaatactatccagaatttgttgtagaaggtccagttaactattctttgtacatttccaagtaccagacctctccaatcttcagaaatccacgtttaggaagttttgttgagtttacaacaatggtcctccgttgtcctgaattggtttccaacccacatttaaaaggtaaattagtgcagttattaagcgttggtgctatgcctttaacagacaattcccccggattcatgatggatatattcgaacacgacgaattagttaacaagaatttattatatgctttgttggacttttatgttattgttgaaaaaacaggctcttcttctcaattttacgataaattcaacagcagatatagcatatccataattttggaggagctttattacaagataccatcttataaaaaccaattgatctggcagtctcaaaacaatgctgacttttttgtgaggttcgttgctcgtatgttgaatgacttgactttcttgttggatgaaggcttaagtaatttggctgaggtgcataatatccaaaatgagttagataatcgtgcaaggggcgcgccaccaacaagagaggaagaggacaaagaattacaaacaagattggcgtctgcttccaggcaagctaagtcctcttgtggattggccgataaatctatgaaattattcgaaatctattccaaggatataccggctgcatttgtcacaccagaaatcgtatatagattagcaagtatgttgaactataacttagagtctcttgtcggtcccaaatgcggggaattgaaagtgaaagacccacaaagttattctttcaacccaaaagatttgttgaaagccttaacaactgtttatatcaatctttccgagcaaagtgagttcatcagtgctgtcgctaaagatgaaagatcttttaatagaaatctctttgttcgcgcagttgatattcttggtagaaaaactggtttagcatctccagagttcatcgaaaaacttttgaactttgccaataaagccgaagagcaaagaaaggctgatgaagaggaagatcttgagtatggtgatgttcctgacgagttcttagatcctttgatgtacacaattatgaaggatcctgtcattttaccagcatccaagatgaatattgatagaagcacgatcaaagcacatttgcttagtgactctactgacccgtttaatagaatgcctttaaaattagaggatgtaacacctaatgaagagttaaggcaaaagattctttgtttcaaaaaacaaaaaaaggaagaagcaaaacataaagcaagcgagtga

SEQ ID NO: 1449 - DNA, 1374 bp, Saccharomyces cerevisiae
atgacagcactagattctcgaaactggggattgacacccgctatggaaacgggcttgttccagaaaccacaggaccgtatctttataatagagctggaaaattccatagtgtcattcataaactcaaacacagaatcatttcagctaagaccgatgaattcatattataggcttctatcgcaccaaatagctgagtaccacaacttgaaccatgttttggcaagaactcaagatagttgtgtgattcttttcaaaggtgagaatttccaaaagattgaaggaaagccactcttacaagagttgcagctgaacaaaaaaccggaagagtgtgcttcctcaagtgagagtattgaaaaatcgaacaataacagaatatttcgaatcttaaagcggaaagaggtaggtaacgagtgcgattataaaatcgatggcaatacacgtacaccaaatagcaatttgacagccaattcaaataaggaccaaaaaatcgaaatcgatgataaatctagtactgatttggaacaagaaagaattgagaaggaaagactttatgaacaacgtaaacaagaaatttttgataagctcaacaagagtgaagacgatgtaaagtcaaccaacagtagcggtagtagtgatagtgacaatgaatggagtgattggttgaacggagatgactctaacacacaaactagtaacggttcagttagctcttcatcaccattcaattcatctgtgacgacgatacaagtaaacaaacctcaacaacaattttatgatagtcgaagaggaagaggaggaagaagaagaggaacaaacaattacaaagatgcctatagaggccaaagtcgtcggaataaagaaaacggcggttaccaatcgggatattcttcgccatatcttgtgtatcctcctccccaaatgggtggcaatagtctgccaacctaccctctaatgtataaccccgctggtcctgcccccggtcctgcaccttcacccatggtaatgggcaataacacagtcttcatgaacccttacatgtacaatatgaatccccaagggtcctgttcgtttggcaccccaatccctatgtatcccccataccaatatcaatatcaataccaatataacactcagtatcacagcgggccatatagcaatacaccaagctataattctaacaattacacaagatcctcagcaaataagtaccaccattttcaaggaaaaaattcatattctggtgcgattccgaaacgtagtgatgacagtaacagtaataagaatgagggaattcgtagggctagtgttgagggttcgccgtcatctagggatactgattcggtagagatgaaatttgataaattaaacatttag

SEQ ID NO: 1450 - DNA, 1374 bp, Artificial Sequence
  Description of Artificial Sequence: Synthetic polynucleotide
atgacagcattggattctagaaactggggattgacacccgctatggaaacgggcttgttccagaaaccacaggaccgtatctttataatagagttagaaaattccatagtgtctttcataaactccaacacagaaagttttcagttaagaccgatgaattcttattataggcttttatcccaccaaatagctgagtaccacaacttgaaccatgttttggcaagaactcaagatagttgtgtgattcttttcaaaggtgagaatttccaaaagattgaaggaaagccactcttacaagagttgcagttgaacaaaaaaccggaagagtgtgcttcctccagtgagagtattgaaaaaagtaacaataacagaatatttagaatcttaaagagaaaagaggtaggtaacgagtgcgattataaaatcgatggcaatacacgtacaccaaatagcaatttgacagccaatagtaataaggaccaaaaaatcgaaatcgatgataaatctagtactgatttggaacaagaaagaattgagaaggaaagactttatgaacaacgtaaacaagaaatttttgataagctcaacaagagtgaagacgatgtaaagtctaccaacagtagcggtagtagtgatagtgacaatgaatggagtgattggttgaacggagatgactctaacacacaaactagtaacggttctgttagctcttcttctccattcaattcttctgtgacgacgatacaagtaaacaaacctcaacaacaattttatgatagtagaagaggaagaggaggaagaagaagaggaacaaacaattacaaagatgcctatagaggccaaagtcgtagaaataaagaaaacggcggttaccaaagtggatattcttctccatatcttgtgtatcctcctccccaaatgggtggcaatagtttaccaacctaccctttgatgtataaccccgctggtcctgcccccggtcctgcaccttctcccatggtaatgggcaataacacagtcttcatgaacccttacatgtacaatatgaatccccaagggtcctgttcctttggcaccccaatccctatgtatcccccataccaatatcaatatcaataccaatataacactcagtatcacagcgggccatatagcaatacaccaagctataattctaacaattacacaagatcctctgcaaataagtaccaccattttcaaggaaaaaattcttattctggtgcgattccgaaacgtagtgatgacagtaacagtaataagaatgagggaattcgtagggctagtgttgagggttctccgtcttctagggatactgattctgtagagatgaaatttgataaattaaacatttga

SEQ ID NO: 1451 - DNA, 1134 bp, Saccharomyces cerevisiae
atggatatggaaattgatgaccctatgcatggttcagatgaagatcaattatcaccgactctcgacgaagacatgaatagtgatgacggcaaaaataatacgaaggcgcgttctaatgacgaagacacagatgaagagttggaagattttaattttaaaccggggtcctcgggtatagcagatcataaatcctccaaaccactaaaactgaccaatacaaatataaatcagcttgaccaatggattgagcatttgagtaaatgcgagccactatcagaagacgatgtagcacgactatgtaaaatggcggtggacgtgttgcagttcgaggagaatgttaaaccaattaacgtgcctgttaccatttgtggtgacgtacacggtcaattccatgacttgttagaacttttcaagattggtggtccttgtcctgacaccaattaccttttcatgggtgattacgtggatagaggatattattctgttgagaccgtatcttacctagttgccatgaaagtcagatatccacatagaattactatacttaggggcaatcacgagtctaggcagattacccaagtatatgggttttatgacgaatgtttgagaaagtacggcagtgcgaacgtgtggaaaatgtttaccgatctattcgattatttccccgttactgccttggtggataataaaatcttctgtttgcatggaggtctctcacccatgatagagacaatagatcaagttagagatttaaatagaatacaggaagtgcctcacgaaggtccaatgtgtgaccttctatggtccgatcctgatgatagaggcggatggggaatcagtccgagaggtgcaggcttcacttttggtcaagacatcagtgagcaattcaatcacactaatgacctatcactaatagcaagagctcaccaattggtaatggaaggatattcttggtctcaccagcaaaatgttgtcaccattttcagtgctccaaattattgttatagatgtggtaaccaggccgctattatggaggtggatgaaaaccataataggcaattcttacaatacgatccatctgtgagacccggtgaaccaaccgtcaccaggaagacaccggattatttcttataa

SEQ ID NO: 1452 - DNA, 1134 bp, Artificial Sequence
  Description of Artificial Sequence: Synthetic polynucleotide
atggatatggaaattgatgaccctatgcatggttctgatgaagatcaattatctccgactctcgacgaagacatgaatagtgatgacggcaaaaataatacgaaggcgcgttctaatgacgaagacacagatgaagagttggaagattttaattttaaaccggggtccagtggtatagcagatcataaatcctccaaaccattgaaattgaccaatacaaatataaatcagcttgaccaatggattgagcatttgagtaaatgcgagccattatctgaagacgatgtagcaagattatgtaaaatggcggtggacgtgttgcagttcgaggagaatgttaaaccaattaacgtgcctgttaccatttgtggtgacgtacacggtcaattccatgacttgttagaacttttcaagattggtggtccttgtcctgacaccaattaccttttcatgggtgattacgtggatagaggatattattctgttgagaccgtatcttacttggttgccatgaaagtcagatatccacatagaattactatacttaggggcaatcacgagtctaggcagattacccaagtatatgggttttatgacgaatgtttgagaaagtacggcagtgcgaacgtgtggaaaatgtttaccgatcttttcgattatttccccgttactgccttggtggataataaaatcttctgtttgcatggaggtctctctcccatgatagagacaatagatcaagttagagatttaaatagaatacaggaagtgcctcacgaaggtccaatgtgtgaccttttatggtccgatcctgatgatagaggcggatggggaatcagtccgagaggtgcaggcttcacttttggtcaagacatcagtgagcaattcaatcacactaatgacttaagtttgatagcaagagctcaccaattggtaatggaaggatattcttggtctcaccagcaaaatgttgtcaccattttcagtgctccaaattattgttatagatgtggtaaccaggccgctattatggaggtggatgaaaaccataataggcaattcttacaatacgatccatctgtgagacccggtgaaccaaccgtcaccaggaagacaccggattatttcttatga

SEQ ID NO: 1453 - DNA, 834 bp, Saccharomyces cerevisiae
atgcagtgtaacacaagtatagaagatggtttagatgggggcgacataactttcccatcctacagccctgaagcggaggctcaaaacagattcttaccaagaagtgagttcccctctgtgaggcaactcgtgatttcgaaacaaaaaagcagaagaagaagagaagaaaatgtatttgtgggaaaaatggaggacgtacttgtaaaatggaggccacctgcatcttcacatcgtggcgcaattgaagctattaatggcacgcatccatatcagcttagcacagcacaattcaactcgagaagatcggatccatttggttcaacaaagagagatgaatccgtgcgttccattgtagaatcgtttaccgattggtggaaacgcaattccaaaatgttttttcgtgacgaggaagaaggtgtacgaaccgaacacagtgcgagtcaagatgaccaagagttgcagcttttcgaagaagatctcttctcatttcacctaagcccaaatgatatgtcaaccaggaacagcgaacatcaagtgcaaacaccggtgcttttcccgtacgaagctcctactcgaacaaaacaaaacccagcagaaagaaaagtcattgaaattggggacggcgaagaactctctatctatcgagatgtttattccaatcctattcctgtcagctacctagataccttaaacttgaaccactccatgtctgtacggcaaacacaacagcaacaacaacagcggcaacagcagcagtatgtagactcttcatcggcatttcaatgctgtacagactccaattgggcgagaatatttttttgccaccacgattag

SEQ ID NO: 1454 - DNA, 834 bp, Artificial Sequence
  Description of Artificial Sequence: Synthetic polynucleotide
atgcagtgtaacacaagtatagaagatggtttagatgggggcgacataactttcccatcctacagccctgaagcggaggctcaaaacagattcttaccaagaagtgagttcccctctgtgaggcaactcgtgatttccaaacaaaaaagcagaagaagaagagaagaaaatgtatttgtgggaaaaatggaggacgtacttgtaaaatggaggccacctgcatcttctcatcgtggcgcaattgaagctattaatggcacgcatccatatcagcttagcacagcacaattcaactctagaagaagtgatccatttggttctacaaagagagatgaatccgtgcgttccattgtagaaagttttaccgattggtggaaacgcaattccaaaatgttttttcgtgacgaggaagaaggtgtaagaaccgaacacagtgcgagtcaagatgaccaagagttgcagcttttcgaagaagatctcttctcctttcacttgagcccaaatgatatgtctaccaggaacagcgaacatcaagtgcaaacaccggtgcttttcccgtacgaagctcctactagaacaaaacaaaacccagcagaaagaaaagtcattgaaattggggacggcgaagaactctctatctatagagatgtttattccaatcctattcctgtcagctacttggataccttaaacttgaaccactccatgtctgtaaggcaaacacaacagcaacaacaacagagacaacagcagcagtatgtagactcttcttctgcatttcaatgctgtacagactccaattgggcgagaatatttttttgccaccacgattga

SEQ ID NO: 1455 - DNA, 3216 bp, Saccharomyces cerevisiae
atggctggtgcaattgaaaacgctcgtaaggaaataaaaagaatctcattagaagaccatgctgaatctgaatatggtgccatctattctgtctctggtccggtcgtcattgctgaaaatatgattggttgtgccatgtacgaattggtcaaggtcggtcacgataacctggtgggtgaagtcattagaattgacggtgacaaggccaccatccaagtttacgaagaaactgcaggccttacggtcggtgaccctgttttgagaacaggtaagcctctgtcggtagaattgggtcctggtctgatggaaaccatttacgatggtattcaaagacctttgaaagccattaaggaagaatcgcaatcgatttatatcccaagaggtattgacactccagctttggataggactatcaagtggcaatttactccgggaaagtttcaagtcggcgatcatatttccggtggtgatatttacggttccgtttttgagaattcgctaatttcaagccataagattcttttgccaccaagatcaagaggtacaatcacttggattgctccagctggtgagtacactttggatgagaagattttggaagttgaatttgatggcaagaagtctgatttcactctttaccatacttggcctgttcgtgttccaagaccagttactgaaaagttatctgctgactatcctttgttaacaggtcaaagagttttggatgctttgtttccttgtgttcaaggtggtacgacatgtattccaggtgcttttggttgtggtaagaccgttatctctcaatctttgtccaagtactccaattctgacgccattatctatgtcgggtgctttgccaagggtaccaatgttttaatggcggatgggtctattgaatgtattgaaaacattgaggttggtaataaggtcatgggtaaagatggcagacctcgtgaggtaattaaattgcccagaggaagagaaactatgtacagcgtcgtgcagaaaagtcagcacagagcccacaaaagtgactcaagtcgtgaagtgccagaattactcaagtttacgtgtaatgcgacccatgagttggttgttagaacacctcgtagtgtccgccgtttgtctcgtaccattaagggtgtcgaatattttgaagttattacttttgagatgggccaaaagaaagcccccgacggtagaattgttgagcttgtcaaggaagtttcaaagagctacccaatatctgaggggcctgagagagccaacgaattagtagaatcctatagaaaggcttcaaataaagcttattttgagtggactattgaggccagagatctttctctgttgggttcccatgttcgtaaagctacctaccagacttacgctccaattctttatgagaatgaccactttttcgactacatgcaaaaaagtaagtttcatctcaccattgaaggtccaaaagtacttgcttatttacttggtttatggattggtgatggattgtctgacagggcaactttttcggttgattccagagatacttctttgatggaacgtgttactgaatatgctgaaaagttgaatttgtgcgccgagtataaggacagaaaagaaccacaagttgccaaaactgttaatttgtactctaaagttgtcagaggtaatggtattcgcaataatcttaatactgagaatccattatgggacgctattgttggcttaggattcttgaaggacggtgtcaaaaatattccttctttcttgtctacggacaatatcggtactcgtgaaacatttcttgctggtctaattgattctgatggctatgttactgatgagcatggtattaaagcaacaataaagacaattcatacttctgtcagagatggtttggtttcccttgctcgttctttaggcttagtagtctcggttaacgcagaacctgctaaggttgacatgaatggcaccaaacataaaattagttatgctatttatatgtctggtggagatgttttgcttaacgttctttcgaagtgtgccggctctaaaaaattcaggcctgctcccgccgctgcttttgcacgtgagtgccgcggattttatttcgagttacaagaattgaaggaagacgattattatgggattactttatctgatgattctgatcatcagtttttgcttgccaaccaggttgtcgtccataattgcggagaaagaggtaatgaaatggcagaagtcttgatggaattcccagagttatatactgaaatgagcggtactaaagaaccaattatgaagcgtactactttggtcgctaatacatctaacatgccggttgcagccagagaagcttctatttacactggtatcactcttgcagaatacttcagagatcaaggtaaaaatgtttctatgattgcagactcttcttcaagatgggctgaagctttgagagaaatttctggtcgtttgggtgagatgcctgctgatcaaggtttcccagcttatttgggtgctaagttggcctccttttacgaaagagccggtaaagctgttgctttaggttccccagatcgtactggttccgtttccatcgttgctgccgtttcgccagccggtggtgatttctcagatcctgttactactgctacattgggtatcactcaagtcttttggggtttagacaagaaattggctcaaagaaagcatttcccatctatcaacacatctgtttcttactccaaatacactaatgtcttgaacaagttttatgattccaattaccctgaatttcctgttttaagagatcgtatgaaggaaattctatcaaacgctgaagaattagaacaagttgttcaattagttggtaaatcggccttgtctgatagtgataagattactttggatgttgccactttaatcaaggaagatttcttgcaacaaaatggttactccacttatgatgctttctgtccaatttggaagacatttgatatgatgagagccttcatctcgtatcatgacgaagctcaaaaagctgttgctaatggtgccaactggtcaaaactagctgactctactggtgacgttaagcatgccgtttcttcatctaaattttttgaaccaagcaggggtgaaaaggaagtccatggcgaattcgaaaaattgttgagcactatgcaagaaagatttgctgaatctaccgattaa

SEQ ID NO: 1456 - DNA, 3216 bp, Artificial Sequence
  Description of Artificial Sequence: Synthetic polynucleotide
atggctggtgcaattgaaaacgctcgtaaggaaataaaaagaatctctttagaagaccatgctgaatctgaatatggtgccatctattctgtctctggtccggtcgtcattgctgaaaatatgattggttgtgccatgtacgaattggtcaaggtcggtcacgataacttggtgggtgaagtcattagaattgacggtgacaaggccaccatccaagtttacgaagaaactgcaggccttacggtcggtgaccctgttttgagaacaggtaagcctttaagtgtagaattgggtcctggtttgatggaaaccatttacgatggtattcaaagacctttgaaagccattaaggaagaatctcaatctatttatatcccaagaggtattgacactccagctttggataggactatcaagtggcaatttactccgggaaagtttcaagtcggcgatcatatttccggtggtgatatttacggttccgtttttgagaattctttgatttctagccataagattcttttgccaccaagatctagaggtacaatcacttggattgctccagctggtgagtacactttggatgagaagattttggaagttgaatttgatggcaagaagtctgatttcactctttaccatacttggcctgttcgtgttccaagaccagttactgaaaagttatctgctgactatcctttgttaacaggtcaaagagttttggatgctttgtttccttgtgttcaaggtggtacgacatgtattccaggtgcttttggttgtggtaagaccgttatctctcaatctttgtccaagtactccaattctgacgccattatctatgtcgggtgctttgccaagggtaccaatgttttaatggcggatgggtctattgaatgtattgaaaacattgaggttggtaataaggtcatgggtaaagatggcagacctcgtgaggtaattaaattgcccagaggaagagaaactatgtacagcgtcgtgcagaaaagtcagcacagagcccacaaaagtgacagcagtcgtgaagtgccagaattactcaagtttacgtgtaatgcgacccatgagttggttgttagaacacctcgtagtgtccgccgtttgtctcgtaccattaagggtgtcgaatattttgaagttattacttttgagatgggccaaaagaaagcccccgacggtagaattgttgagcttgtcaaggaagtttccaagagctacccaatatctgaggggcctgagagagccaacgaattagtagaatcctatagaaaggcttctaataaagcttattttgagtggactattgaggccagagatctttctttgttgggttcccatgttcgtaaagctacctaccagacttacgctccaattctttatgagaatgaccactttttcgactacatgcaaaaaagtaagtttcatctcaccattgaaggtccaaaagtacttgcttatttacttggtttatggattggtgatggattgtctgacagggcaactttttctgttgattccagagatacttctttgatggaacgtgttactgaatatgctgaaaagttgaatttgtgcgccgagtataaggacagaaaagaaccacaagttgccaaaactgttaatttgtactctaaagttgtcagaggtaatggtattcgcaataatcttaatactgagaatccattatgggacgctattgttggcttaggattcttgaaggacggtgtcaaaaatattccttctttcttgtctacggacaatatcggtactcgtgaaacatttcttgctggtttgattgattctgatggctatgttactgatgagcatggtattaaagcaacaataaagacaattcatacttctgtcagagatggtttggtttcccttgctcgttctttaggcttagtagtctctgttaacgcagaacctgctaaggttgacatgaatggcaccaaacataaaattagttatgctatttatatgtctggtggagatgttttgcttaacgttctttccaagtgtgccggctctaaaaaattcaggcctgctcccgccgctgcttttgcacgtgagtgccgcggattttatttcgagttacaagaattgaaggaagacgattattatgggattactttatctgatgattctgatcatcagtttttgcttgccaaccaggttgtcgtccataattgcggagaaagaggtaatgaaatggcagaagtcttgatggaattcccagagttatatactgaaatgagcggtactaaagaaccaattatgaagcgtactactttggtcgctaatacatctaacatgccggttgcagccagagaagcttctatttacactggtatcactcttgcagaatacttcagagatcaaggtaaaaatgtttctatgattgcagactcttcttctagatgggctgaagctttgagagaaatttctggtcgtttgggtgagatgcctgctgatcaaggtttcccagcttatttgggtgctaagttggcctccttttacgaaagagccggtaaagctgttgctttaggttccccagatcgtactggttccgtttccatcgttgctgccgtttctccagccggtggtgatttcagtgatcctgttactactgctacattgggtatcactcaagtcttttggggtttagacaagaaattggctcaaagaaagcatttcccatctatcaacacatctgtttcttactccaaatacactaatgtcttgaacaagttttatgattccaattaccctgaatttcctgttttaagagatcgtatgaaggaaattttatctaacgctgaagaattagaacaagttgttcaattagttggtaaaagtgccttgtctgatagtgataagattactttggatgttgccactttaatcaaggaagatttcttgcaacaaaatggttactccacttatgatgctttctgtccaatttggaagacatttgatatgatgagagccttcatcagttatcatgacgaagctcaaaaagctgttgctaatggtgccaactggtccaaattggctgactctactggtgacgttaagcatgccgtttcttcttctaaattttttgaaccaagcaggggtgaaaaggaagtccatggcgaattcgaaaaattgttgagcactatgcaagaaagatttgctgaatctaccgattga

SEQ ID NO: 1457 - DNA, 78 bp, Saccharomyces cerevisiae
atgagagccaagtggagaaagaagagaactagaagacttaagagaaagagacggaaggtgagagccagatccaaataa

SEQ ID NO: 1458 - DNA, 78 bp, Artificial Sequence
  Description of Artificial Sequence: Synthetic oligonucleotide
atgagagccaagtggagaaagaagagaactagaagacttaagagaaagagaagaaaggtgagagccagatccaaatga

SEQ ID NO: 1459 - DNA, 963 bp, Saccharomyces cerevisiae
atgatacgttcaatatttataccgccaactagtataactgccacttctcgactgttctacggaatgagggcgtattcaacaaaacttgaaaaggcttcactccaaaaatatctgcatgatcctgttaaagtgactgtgataccaataacggacaaagaatcattcatttactataagcataccgataatctctttaatagtcagtctagaatattaaaagcagaaaagtggatcgttgagaaatcagcaaagctttggagaaaactgaaaaagtcccctaaatcgtataataaaaaaatagtgtccatggtgcagtctctgttaaatagcacaccctggtcagaaaatagtctgttaaccataccaagtgaaagctatatattgaagagaattaagggagagaaagataagacccaagagattcgactcacattgaaagattataccgtaaaggcagaacaggtcgatactcaacccttacacgtgtattatccccctggaatttctagccctgatgagtgcttgagacaaatgaaaaagctctaccaagaaggcttaatttatcacaaaaaatggactttatattgccttttaggtctcccgctgacaattcctctaattttaataccgcttataccaaatgttccagggttctacctatcttatagagcttatgttaatatcaaagcttaccttggtgctaagcacttgaagagtctactggaaagttcaaaacaaaatttagaattcagggaactgttgggatatacggaagtatataaacgtgggaccagcagccgtacgcagggcaatcaaaaggaatcaaaaggtgcaccagaattactacttaacaagaaaacccttccgttgatcttagatttcttagaggttcatgaactagaaagcgacttgaacaaagtcatccttcaagaatcgaaatctcaagagaaaaacaaaatttaa

SEQ ID NO: 1460 - DNA, 963 bp, Artificial Sequence
  Description of Artificial Sequence: Synthetic polynucleotide
atgatacgttctatatttataccgccaactagtataactgccacttctaggttgttctacggaatgagggcgtattctacaaaacttgaaaaggcttctctccaaaaatatttgcatgatcctgttaaagtgactgtgataccaataacggacaaagaatctttcatttactataagcataccgataatctctttaatagtcagtctagaatattaaaagcagaaaagtggatcgttgagaaatctgcaaagctttggagaaaattgaaaaagtcccctaaaagttataataaaaaaatagtgtccatggtgcagtctttattaaatagcacaccctggtctgaaaatagtttgttaaccataccaagtgaaagctatatattgaagagaattaagggagagaaagataagacccaagagattagactcacattgaaagattataccgtaaaggcagaacaggtcgatactcaacccttacacgtgtattatccccctggaatttctagccctgatgagtgcttgagacaaatgaaaaagctctaccaagaaggcttaatttatcacaaaaaatggactttatattgccttttaggtctcccgttaacaattcctttgattttaataccgcttataccaaatgttccagggttctacttgtcttatagagcttatgttaatatcaaagcttaccttggtgctaagcacttgaagagtttattggaaagttctaaacaaaatttagaattcagggaattattgggatatacggaagtatataaacgtgggaccagcagccgtacgcagggcaatcaaaaggaaagtaaaggtgcaccagaattattacttaacaagaaaacccttccgttgatcttagatttcttagaggttcatgaattggaaagcgacttgaacaaagtcatccttcaagaaagtaaatctcaagagaaaaacaaaatttga

SEQ ID NO: 1461 - DNA, 1287 bp, Saccharomyces cerevisiae
atgactgctgctaaaccaaatccatatgctgccaaaccgggcgactatctttctaatgtaaataatttccagttaatcgattcgacgctgagagaaggtgaacaatttgccaacgcattcttcgatactgaaaaaaagatcgaaattgctagagccttggacgatttcggtgtggactacatcgagttaacctcaccagtagcatctgaacaatcaagaaaggactgtgaagctatatgtaaactaggtttaaaggccaagatccttacacacattcgttgtcatatggatgacgccaaagtcgccgtagagactggtgtcgacggtgtcgatgtcgttatcggcacctccaaatttttaagacaatattcccacggtaaggatatgaactacatcgccaagagtgctgttgaagtcattgaatttgtcaaatccaaaggtattgaaatcagattttcctctgaagattccttcagaagtgatctcgttgatcttttgaacatttataaaaccgttgacaagatcggtgtaaatagagtcggtattgccgacacagttggatgtgccaacccaagacaagtatatgaactgatcagaactttgaagagtgttgtttcatgtgacatcgaatgccatttccacaacgatactggttgtgccattgcaaacgcctacactgctttggaaggtggtgccagattgattgacgtcagtgtactgggtattggtgaaagaaacggtatcactcctctaggtgggctcatggcaagaatgattgttgccgcaccagactatgtcaagtccaaatacaagttgcacaagatcagagacattgaaaacctggtcgctgatgctgtggaagttaacattccattcaacaaccctatcaccgggttctgtgcattcacacataaagcaggtatccatgccaaggccattttggctaacccatctacctacgaaatcttggaccctcacgatttcggtatgaagaggtatatccacttcgccaacagactaactggctggaacgccatcaaagccagagtcgaccagttgaacttgaacttgacggatgaccaaatcaaggaagttactgctaagattaagaagctgggtgatgtcagatcgctgaatatcgatgatgttgactctatcatcaagaacttccacgcagaggtcagcactcctcaagtactatctgcaaaaaagaacaagaagaatgacagcgatgtaccggaactggccaccatccccgccgccaagcggactaagccatccgcctaa

SEQ ID NO: 1462 - DNA, 1287 bp, Artificial Sequence
  Description of Artificial Sequence: Synthetic polynucleotide
atgactgctgctaaaccaaatccatatgctgccaaaccgggcgactatctttctaatgtaaataatttccagttaatcgattctacgttgagagaaggtgaacaatttgccaacgcattcttcgatactgaaaaaaagatcgaaattgctagagccttggacgatttcggtgtggactacatcgagttaacctctccagtagcatctgaacaatctagaaaggactgtgaagctatatgtaaattgggtttaaaggccaagatccttacacacattcgttgtcatatggatgacgccaaagtcgccgtagagactggtgtcgacggtgtcgatgtcgttatcggcacctccaaatttttaagacaatattcccacggtaaggatatgaactacatcgccaagagtgctgttgaagtcattgaatttgtcaaatccaaaggtattgaaatcagattttcctctgaagattccttcagaagtgatctcgttgatcttttgaacatttataaaaccgttgacaagatcggtgtaaatagagtcggtattgccgacacagttggatgtgccaacccaagacaagtatatgaattgatcagaactttgaagagtgttgtttcttgtgacatcgaatgccatttccacaacgatactggttgtgccattgcaaacgcctacactgctttggaaggtggtgccagattgattgacgtcagtgtattgggtattggtgaaagaaacggtatcactcctttaggtgggctcatggcaagaatgattgttgccgcaccagactatgtcaagtccaaatacaagttgcacaagatcagagacattgaaaacttggtcgctgatgctgtggaagttaacattccattcaacaaccctatcaccgggttctgtgcattcacacataaagcaggtatccatgccaaggccattttggctaacccatctacctacgaaatcttggaccctcacgatttcggtatgaagaggtatatccacttcgccaacagattaactggctggaacgccatcaaagccagagtcgaccagttgaacttgaacttgacggatgaccaaatcaaggaagttactgctaagattaagaagttgggtgatgtcagatctttgaatatcgatgatgttgactctatcatcaagaacttccacgcagaggtcagcactcctcaagtattatctgcaaaaaagaacaagaagaatgacagcgatgtaccggaattggccaccatccccgccgccaagagaactaagccatccgcctga

SEQ ID NO: 1463 - DNA, 258 bp, Saccharomyces cerevisiae
atgttaccacgttcagcattagcacgctcattgcaattacagcgcggtgtggccgcaaggttctactctgaaggttctaccggcaccccaagagggtcaggctcagaggattcgtttgttaaaagggaaagggccacggaagacttcttcgttaggcagcgtgagaaggagcaactacgccatttgaaagaacaactggaaaaacaacgaaagaagattgattctttggaaaataaaattgactcgatgaccaaataa

SEQ ID NO: 1464 - DNA, 258 bp, Artificial Sequence
  Description of Artificial Sequence: Synthetic polynucleotide
atgttaccacgttctgcattagcacgctctttgcaattacagcgcggtgtggccgcaaggttctactctgaaggttctaccggcaccccaagagggtctggcagtgaggattcttttgttaaaagggaaagggccacggaagacttcttcgttaggcagcgtgagaaggagcaattgcgccatttgaaagaacaattggaaaaacaaagaaagaagattgattctttggaaaataaaattgactccatgaccaaatga

SEQ ID NO: 1465 - DNA, 1644 bp, Saccharomyces cerevisiae
atggtccgattaaatcatgcagcatcatattttatgcctattttctgctccacaaggcctcacatagtgatactttctgcgctgtttagtatttcactgttttcactattctatgcgtcgtccgaattactgctacaccagtatgatgatccattgatgttcaaaccaaattcgcaggactatttcaggacctttcttttggggcttttttcaccatttctttattatttcctgaagacctttctattcaatataaatcaaaggtttttaatattgaacctgatagtggattttcctatcaacgacgtctttatgcttttgatactgattggtttagcgtaccctcaggtgcaagatcacgaaggcggtacgatcaagcataaggaatgttcttggcacatcattccaagacaagcctatatctttggtatatcatgggccctgggtgaattcaccatatgcataatagggaatttgtttaactaccaagaaatcgccgatccaaacattaatagtggcttcacacaccaggaaagcgccaacacttactgtaacaataatgatatgagccataacgatgactgcggttgtagtacagaatatcgccccaacgtcgtagacagaagtgatattacgttgtccaaatgtattgaagtaagaaatgactcatcttccatatcgaataacgtatactcgtctgagtaccatccaatcaaacctctacgttcatcgtcatcaacttatggcagcatacgacagcaacctcatgaaaataagaagcagctgcatgtaccagataattcgcaggacgatacaattatcatgatgaaccccatcgacaattcattaaagttgacaactctagatacgggtgatttgagtttccccatagacgaagaacagcccattttgaagaaatcttttggttatacatgggcagttcctaatgaaaatacacaaaatactactaaaagcttcacaccgataaagagatttattgcatttagcacggcataccagttggtcaccggtttattgttaatgatattggtagttggtagtaatatcatgttgacaattggggaatcattgattctgtcgatgtatttcgtctatgttcgcggccatgaaggattatttactcccgtggtgaactacttcggctcaagaaccatttcaaatttcatcttatgcgtaataattcctttcatatctctaaacttcctcatcaacacttcgatatatttaagaagagagctagacgattggtttaataattcacagggggagtttgaggacgacgacgaaaatactatcagtaagagagtagctacaaatcaagagtaccaacatccactgagtgctaattacatttcgatggatagtcctgatgtaataaatagcagcccgggtcacttcgggatgaattcaggccagttgttaggtaatacgacgttatattatggtagtttaaatggggatgatgatgatatgaccaacgactccgctttactaagattctgcaagaagctagtcaaaaattggagggctttggcaagaaatgattcttttgtacttggagtaatggtttcttggagtcttcttgtttttgtaacgggaatactttcaacagtttatatatag

SEQ ID NO: 1466 - DNA, 1644 bp, Artificial Sequence
  Description of Artificial Sequence: Synthetic polynucleotide
atggtcagattaaatcatgcagcaagttattttatgcctattttctgctccacaaggcctcacatagtgatactttctgcgttatttagtatttctttattttctttattctatgcgtcttccgaattattattacaccagtatgatgatccattgatgttcaaaccaaattctcaggactatttcaggacctttcttttggggcttttttctccatttctttattatttcttgaagacctttcttttcaatataaatcaaaggtttttaatattgaacttgatagtggattttcctatcaacgacgtctttatgcttttgatattgattggtttagcgtaccctcaggtgcaagatcacgaaggcggtacgatcaagcataaggaatgttcttggcacatcattccaagacaagcctatatctttggtatatcttgggcccttggtgaattcaccatatgcataatagggaatttgtttaactaccaagaaatcgccgatccaaacattaatagtggcttcacacaccaggaaagcgccaacacttactgtaacaataatgatatgagccataacgatgactgcggttgtagtacagaatatcgccccaacgtcgtagacagaagtgatattacgttgtccaaatgtattgaagtaagaaatgactcttcttccatatccaataacgtatactcttctgagtaccatccaatcaaacctttacgttcttcttcttctacttatggcagcataagacagcaacctcatgaaaataagaagcagttacatgtaccagataattctcaggacgatacaattatcatgatgaaccccatcgacaattctttaaagttgacaactttagatacgggtgatttgagtttccccatagacgaagaacagcccattttgaagaaatcttttggttatacatgggcagttcctaatgaaaatacacaaaatactactaaaagcttcacaccgataaagagatttattgcatttagcacggcataccagttggtcaccggtttattgttaatgatattggtagttggtagtaatatcatgttgacaattggggaatctttgattttatctatgtatttcgtctatgttcgcggccatgaaggattatttactcccgtggtgaactacttcggctccagaaccatttctaatttcatcttatgcgtaataattcctttcatatctttgaacttcctcatcaacacttccatatatttaagaagagagttggacgattggtttaataattctcagggggagtttgaggacgacgacgaaaatactatcagtaagagagtagctacaaatcaagagtaccaacatccattaagtgctaattacatttccatggatagtcctgatgtaataaatagcagcccgggtcacttcgggatgaatagtggccagttgttaggtaatacgacgttatattatggtagtttaaatggggatgatgatgatatgaccaacgactccgctttattaagattctgcaagaagttggtcaaaaattggagggctttggcaagaaatgattcttttgtacttggagtaatggtttcttggagtcttcttgtttttgtaacgggaatactttctacagtttatatatga

SEQ ID NO: 1467 - DNA, 915 bp, Saccharomyces cerevisiae
atgatttctgactacgatgctcttttgcaattcaacaaaaaacctgtttcgcaagaaatgattcagttcttagccacttctactgcttccataattaaaatcagggaaaataataatccaatccaaggatgtcgcccaccagacttatctatcttcattaaaaacgtggtaattcagtcaaatgttcaaacaccaactttaatggccacatcagtttatttaaacaaactgaaaagcgtaataccaaaaaatgtgtacggtattaacaccacaagacatcggatatttctcggatgcttgatattagctgccaaaactctgaacgattcttctccctggaacaaacactggaccacgtacacagaaggtttactcagaatacgtgaggtgaataccatcgaacgagaactattagaatatttaaattgggatgtgaggataactacaccggatttgattgattctctttcttacttcctcgggcctatcaaggaacaactatttttacaaaggagacaagaaatgctgttgttcaatgcaccaagtcccggccaactgaaagaatatataaatcatagaagaccggtttcgcattctagaacttcttctgctatatcggttccttcactgacatccatggcaacagtttcgacaacagactcaaggtcttctctactggcaaaataccaaccgtccctaccgttggtggaatctgacaacttcaacaaaaaaaatcatgtgccgttaaggaataataacgatatctgtaataatttcagggcagaggaaaacatacactcagtaaaccatattgatgtaacaatgggaagttcaccagtaatgtcgcataagcccacaattcaccaacggttaaattttacaaggaggggctggtcatcgtttttcaagcaataa

SEQ ID NO: 1468 - DNA, 915 bp, Artificial Sequence
  Description of Artificial Sequence: Synthetic polynucleotide
atgatttctgactacgatgctcttttgcaattcaacaaaaaacctgtttctcaagaaatgattcagttcttagccacttctactgcttccataattaaaatcagggaaaataataatccaatccaaggatgtcgcccaccagacttatctatcttcattaaaaacgtggtaattcagtctaatgttcaaacaccaactttaatggccacatctgtttatttaaacaaattgaaaagcgtaataccaaaaaatgtgtacggtattaacaccacaagacatagaatatttctcggatgcttgatattagctgccaaaactttgaacgattcttctccctggaacaaacactggaccacgtacacagaaggtttactcagaatacgtgaggtgaataccatcgaaagagaattattagaatatttaaattgggatgtgaggataactacaccggatttgattgattctctttcttacttcctcgggcctatcaaggaacaattatttttacaaaggagacaagaaatgcttttgttcaatgcaccaagtcccggccaattgaaagaatatataaatcatagaagaccggtttctcattctagaacttcttctgctatatctgttccttctttaacatccatggcaacagtttctacaacagacagcaggtcttctttattggcaaaataccaaccgtccttaccgttggtggaatctgacaacttcaacaaaaaaaatcatgtgccgttaaggaataataacgatatctgtaataatttcagggcagaggaaaacatacactctgtaaaccatattgatgtaacaatgggaagttctccagtaatgtcccataagcccacaattcaccaaagattaaattttacaaggaggggctggtcctcttttttcaagcaatga

SEQ ID NO: 1469 - DNA, 1593 bp, Saccharomyces cerevisiae
atgctaagaaacattttggtgagaagtactggcagcaatttcaaatttgctggcagatatatgaaatcatcagctcttttaggatactatagaagagttaactattattcgaccaagatacaaaccagactgactagcgaaaactatccagacgtgcatcgagaccctagattcaaaaaattaacgtccgatgatctaaattattttaaatctattttatcggaacaagaaatattaagagccagcgaatcagaggatctttcattttataatgaagattggatgagaaagtacaaaggacagtccaagttagtattgagacctaagtcagtggaaaaagtttctttaatcttaaattattgtaatgatgaaaaaattgccgttgtcccacaaggcggtaacacggggttggtaggtggttctgtgcccatttttgatgaattaattctatctttagcaaatttaaacaaaataagagattttgaccctgtatcaggtatcttgaagtgtgatgctggtgtaatcttggaaaatgctaacaattacgtaatggaacaaaattatatgtttccgttggatctgggagctaaaggttcctgccatgttggtggcgtggttgcaaccaacgctggaggactaaggttattgcgttatggctcactacatggaagcgttttaggcttagaggtggtaatgcccaatggtcaaattgttaatagcatgcattccatgagaaaagacaacaccggttatgatctgaaacagctgttcattggctcagaaggtactatcggtatcatcactggtgtttcaatcttgactgttcctaagccaaaagcgtttaatgtatcttacttgtctgttgaaagttttgaagacgttcaaaaagtcttcgtcagagccaggcaagaattatctgagattttatccgcttttgaatttatggatgctaaatctcaagtattggccaagagccaattgaaggatgctgccttccctttggaggatgagcatccattttatattcttatcgaaacgtcagggtcaaacaaagatcacgatgattccaaacttgaaacatttttagaaaacgtcatggaagagggcatagtaacggatggtgtagtggcacaagatgaaaccgaactccaaaacttgtggaagtggagagaaatgattccagaggcaagtcaagctaatggtggtgtttacaaatacgatgtttctttaccactaaaggacctatattctttggttgaagccactaatgcaagactttctgaagctgaattagtgggtgattcgcccaaaccagtggtgggcgccattggatacggtcacgtgggtgatggtaatctacacttaaatgttgcagttagagagtacaacaagaacattgaaaagactttggaaccatttgtctacgagtttgtttcctcaaaacatggttccgttagtgccgaacatgggctaggtttccaaaagaaaaattacattggctattctaagagcccggaagaggtcaagatgatgaaggatttgaaggttcattatgatcctaatggaattttaaacccttacaaatacatttga

SEQ ID NO: 1470 - DNA, 1593 bp, Artificial Sequence
  Description of Artificial Sequence: Synthetic polynucleotide
atgttgagaaacattttggtgagaagtactggcagcaatttcaaatttgctggcagatatatgaaatcttctgctcttttaggatactatagaagagttaactattattctaccaagatacaaaccagattaactagcgaaaactatccagacgtgcatagagaccctagattcaaaaaattaacgtccgatgatttgaattattttaaatctattttatctgaacaagaaatattaagagccagcgaaagtgaggatctttctttttataatgaagattggatgagaaagtacaaaggacagtccaagttagtattgagacctaagtctgtggaaaaagtttctttaatcttaaattattgtaatgatgaaaaaattgccgttgtcccacaaggcggtaacacggggttggtaggtggttctgtgcccatttttgatgaattaattttatctttagcaaatttaaacaaaataagagattttgaccctgtatctggtatcttgaagtgtgatgctggtgtaatcttggaaaatgctaacaattacgtaatggaacaaaattatatgtttccgttggatttgggagctaaaggttcctgccatgttggtggcgtggttgcaaccaacgctggaggattgaggttattgcgttatggctccttgcatggaagcgttttaggcttagaggtggtaatgcccaatggtcaaattgttaatagcatgcattccatgagaaaagacaacaccggttatgatttgaaacagttattcattggctctgaaggtactatcggtatcatcactggtgtttccatcttgactgttcctaagccaaaagcgtttaatgtatcttacttgtctgttgaaagttttgaagacgttcaaaaagtcttcgtcagagccaggcaagaattatctgagattttatccgcttttgaatttatggatgctaaatctcaagtattggccaagagccaattgaaggatgctgccttccctttggaggatgagcatccattttatattcttatcgaaacgtctgggtctaacaaagatcacgatgattccaaacttgaaacatttttagaaaacgtcatggaagagggcatagtaacggatggtgtagtggcacaagatgaaaccgaactccaaaacttgtggaagtggagagaaatgattccagaggcaagtcaagctaatggtggtgtttacaaatacgatgtttctttaccattgaaggacctttattctttggttgaagccactaatgcaagactttctgaagctgaattagtgggtgattctcccaaaccagtggtgggcgccattggatacggtcacgtgggtgatggtaatttacacttaaatgttgcagttagagagtacaacaagaacattgaaaagactttggaaccatttgtctacgagtttgtttcctctaaacatggttccgttagtgccgaacatgggttaggtttccaaaagaaaaattacattggctattctaagagcccggaagaggtcaagatgatgaaggatttgaaggttcattatgatcctaatggaattttaaacccttacaaatacatttga

SEQ ID NO: 1471 - DNA, 513 bp, Saccharomyces cerevisiae
atgagtaagaatgttggtaagctagtgaaaatatggaatgaatcagaagttttagttgatagaaaatcgaaatttcaagcaagatgttgcccattacaaaatcaaaaggatataccctccatactccaagaactaacgcaaaacaacaaaagcgtctccaaggcatcccacatgcacatgtatgcctggagaacggccgaggtatcaaataatttgcacttacaacaagagcagaaaaagaagggcaataaagcaaataagagtaataatagtcatgttaacaagtcaaggaacataacggtgcagccaaagaacattgagcaaggatgtgctgactgtggcgaagctggtgctggacagcgtttattgaccttacttgaaagagcaaacatattcaacgtcttggtaatagtgaccagatggtatggtggcacgcctttgggctcatcaagattcagacacatttcaacatgtgcagtggaaaccttaaagaagggtggatttcttccttaa

SEQ ID NO: 1472 - DNA, 513 bp, Artificial Sequence
  Description of Artificial Sequence: Synthetic polynucleotide
atgagtaagaatgttggtaagttagtgaaaatatggaatgaaagtgaagttttagttgatagaaaatctaaatttcaagcaagatgttgcccattacaaaatcaaaaggatataccctccatactccaagaattgacgcaaaacaacaaaagcgtctccaaggcatcccacatgcacatgtatgcctggagaacggccgaggtatctaataatttgcacttacaacaagagcagaaaaagaagggcaataaagcaaataagagtaataatagtcatgttaacaagtccaggaacataacggtgcagccaaagaacattgagcaaggatgtgctgactgtggcgaagctggtgctggacagcgtttattgaccttacttgaaagagcaaacatattcaacgtcttggtaatagtgaccagatggtatggtggcacgcctttgggctcttctagattcagacacatttctacatgtgcagtggaaaccttaaagaagggtggatttcttccttga

SEQ ID NO: 1473 - DNA, 2127 bp, Saccharomyces cerevisiae
atggctactggcaggattcaatttgctgtttctactccctgcaatactaagggtaaaccgtctggttataggttatttgaatttaaaaacgatcgattagcactggtcccatcagaaagaggttgtacaaaagtagatgtgaatgcaaatatacaagcgttttgttatttaaggcctaatggtagagacacgtcaatatctccagacgcaacgcatattttggactcatgtgattacatggtgctggctaaatccaacggattcattgaaatcataagcaactatcaatacaagataaaaaatggcctgcgattagcgccctcttatatccttagatgtactccggaagatttcgaatccaatttttttagtgactatatgatcgctggtcttgaatatagtcaaggtttattatattgttgtatgtgctccggtcgaatatatgtctttgtaatgaaccttcccactgattacattcagtataagaacatgtacaaccccatgtttccagattgctttttcaaagtacatcacgataataatacaacacattcttcagaagaagaaaaattatttgaaggtagtacgcggtacactggaaggtcatgctctaagcatatctgctacttccttttgcctatagaaccatcccatttaagatcgtcacccgtggtatcttcgttttgcaatatgtatcaaggcctgcccatatataggccttcgatgtatttacatatagaacgaggtatttccacattccatataaatccattagaccggttttgtttcatgacagtatcgccacgatcaccactatttataaggaaaataattttaccattgacttatgttacatttttaagcacctttatcagcctaaagaacagtatacagggagatacatgcggtgagatactttcgtgggacaacgtagcgcaacaaaatggatttggttctttgttcagctggattagtaacaagtttacattcgatacggatattataaattcaaccatttgggatgatattgtaaaatattctggaacaggaatgctggattcaggaatcgtctggaaacagcgtcaaggtcacgctaaagatgacatatatgagttattccacactcaagatatgctgggaagtagtcgccgaaattcttcattcagtactgctagcagcgaaccgagaccgctgagtcgaagaaggagagaatcttttcaagccttaactagagacgcttttagagaaagaatggatgtaccctgttcaacgaagtgggaattagattcttttatccgaggattaagaaggaatacatttatggtagattttgaaattgttgaaaagatttctcatagaaatggaaatgatggggtgaatgaagatgataacactacagatgaaagtgatgaaacaatgacttcttttctaacagataattacaaaaagatggacattgtgtgcatcgatcatttcgtcacgttgagtgcattccgacctcggtactatgatgaaccaataattaaaatcgattcattatcgaacaaaaatggctctgaaaatggaactaatgaagaagagtgggcagaaagtcaaatgaaggtggatggccaagtgatagatgatgagacagctcaattcaagcaggcattgggaaatttatgttcattcaagaaattatttatgctggatgattctttatgctttatattggacacacatggagttttgttgataaatagatttgaaataaaaaataccaaaaatttgttaaggaattccaaggatactattcggataataccccatgatttcggattgattaatgatacaattgttataattaatgatatagacgtaggcacagacaatgtttgcgcccttacgtttcacttggtggtaacatcaatggcaggagagataactgttcttaaaggcgaatttttcaaaaactgcaggttaggaagaataaaactgtgcgattcactaaagctaaatagaaaagatcggtttgtcgacaaacttgctctaatcgattatgacggtttaaatgcacaaaaaagaaggttagattacgatgaaaaggacctttatacattcattgtgaaaaaggtaaaaagagactaa

SEQ ID NO: 1474 - DNA, 2127 bp, Artificial Sequence
  Description of Artificial Sequence: Synthetic polynucleotide
atggctactggcaggattcaatttgctgtttctactccctgcaatactaagggtaaaccgtctggttataggttatttgaatttaaaaacgatagattagcattggtcccatctgaaagaggttgtacaaaagtagatgtgaatgcaaatatacaagcgttttgttatttaaggcctaatggtagagacacgtctatatctccagacgcaacgcatattttggactcttgtgattacatggtgttggctaaatccaacggattcattgaaatcataagcaactatcaatacaagataaaaaatggccttcgtttagcgccctcttatatccttagatgtactccggaagatttcgaatccaatttttttagtgactatatgatcgctggtcttgaatatagtcaaggtttattatattgttgtatgtgctccggtagaatatatgtctttgtaatgaaccttcccactgattacattcagtataagaacatgtacaaccccatgtttccagattgctttttcaaagtacatcacgataataatacaacacattcttctgaagaagaaaaattatttgaaggtagtacgagatacactggaaggagttgctctaagcatatctgctacttccttttgcctatagaaccatcccatttaagaagttctcccgtggtatcttctttttgcaatatgtatcaaggcttgcccatatataggccttctatgtatttacatatagaaagaggtatttccacattccatataaatccattagacagattttgtttcatgacagtatctccaagatctccattatttataaggaaaataattttaccattgacttatgttacatttttaagcacctttatcagcttgaagaacagtatacagggagatacatgcggtgagatactttcttgggacaacgtagcgcaacaaaatggatttggttctttgttcagctggattagtaacaagtttacattcgatacggatattataaattctaccatttgggatgatattgtaaaatattctggaacaggaatgcttgattctggaatcgtctggaaacagcgtcaaggtcacgctaaagatgacatatatgagttattccacactcaagatatgcttggaagtagtcgcagaaattcttctttcagtactgctagcagcgaaccgagaccgttaagtagaagaaggagagaatcttttcaagccttaactagagacgcttttagagaaagaatggatgtaccctgttccacgaagtgggaattagattcttttatcagaggattaagaaggaatacatttatggtagattttgaaattgttgaaaagatttctcatagaaatggaaatgatggggtgaatgaagatgataacactacagatgaaagtgatgaaacaatgacttcttttttaacagataattacaaaaagatggacattgtgtgcatcgatcatttcgtcacgttgagtgcattcaggcctcgttactatgatgaaccaataattaaaatcgattctttatctaacaaaaatggctctgaaaatggaactaatgaagaagagtgggcagaaagtcaaatgaaggtggatggccaagtgatagatgatgagacagctcaattcaagcaggcattgggaaatttatgttctttcaagaaattatttatgcttgatgattctttatgctttatattggacacacatggagttttgttgataaatagatttgaaataaaaaataccaaaaatttgttaaggaattccaaggatactattagaataataccccatgatttcggattgattaatgatacaattgttataattaatgatatagacgtaggcacagacaatgtttgcgcccttacgtttcacttggtggtaacatctatggcaggagagataactgttcttaaaggcgaatttttcaaaaactgcaggttaggaagaataaaattatgcgattctttgaagttgaatagaaaagatagatttgtcgacaaacttgctttgatcgattatgacggtttaaatgcacaaaaaagaaggttagattacgatgaaaaggacctttatacattcattgtgaaaaaggtaaaaagagactga

SEQ ID NO: 1475 - DNA, 1035 bp, Saccharomyces cerevisiae
atggaaaaaaatacggcaccatttgtcgtcgatacggcacccacaactcctccagataaacttgtagcaccttctatagaggaagtaaatagtaatcccaacgaattaagagctcttagagggcagggtagatattttggcgtaagcgatgatgacaaggatgccattaaagaggcagcacctaaatgtaataattgctctcaaagaggtcatttgaagaaggattgtccccatataatatgttcgtactgtggggcgacggatgatcattattctcgacattgtccgaaggctatccagtgttcaaagtgtgatgaggtgggtcattacaggtcacaatgtccacataaatggaaaaaagttcagtgcactctttgtaagagtaagaaacactcaaaagaaagatgtcctagtatatggagagcatatattttagtagatgataatgaaaaggctaagcccaaggtccttccctttcatactatatactgttataactgcggtggaaaggggcactttggtgatgattgcaaggaaaaacgatcatctagagtacctaacgaggatggaagtgcgttcactggttctaatttgtcagttgagctaaaacaggaatattaccgtcacatgaacagaaattcggacgaaaatgaagactatcaatttagtgagtccatatacgatgaggatccactaccgagaccttcccataaaagacattcccaaaacgatcactctcatagtggcagaaataaacgtagagcatcgaacttccatcctcctccttatcaaaagtctaatgtcattcaaccaactataaggggcgagacgctgtcactcaataataatattagtaaaaattcacggtatcaaaatacaaaagtaaacgtctcgtcgatatcggagaatatgtatggctccagatataacccttctacttatgttgataataacagcatttccaactcttccaattacagaaactacaattcttatcaaccatataggagtggtaccttggggaaaagaagataa

SEQ ID NO: 1476 - DNA, 1035 bp, Artificial Sequence
  Description of Artificial Sequence: Synthetic polynucleotide
atggaaaaaaatacggcaccatttgtcgtcgatacggcacccacaactcctccagataaacttgtagcaccttctatagaggaagtaaatagtaatcccaacgaattaagagctcttagagggcagggtagatattttggcgtaagcgatgatgacaaggatgccattaaagaggcagcacctaaatgtaataattgctctcaaagaggtcatttgaagaaggattgtccccatataatatgttcttactgtggggcgacggatgatcattattctagacattgtccgaaggctatccagtgttccaagtgtgatgaggtgggtcattacaggtctcaatgtccacataaatggaaaaaagttcagtgcactctttgtaagagtaagaaacactctaaagaaagatgtcctagtatatggagagcatatattttagtagatgataatgaaaaggctaagcccaaggtccttccctttcatactatatactgttataactgcggtggaaaggggcactttggtgatgattgcaaggaaaaaagatcttctagagtacctaacgaggatggaagtgcgttcactggttctaatttgagtgttgagttgaaacaggaatattaccgtcacatgaacagaaatagtgacgaaaatgaagactatcaatttagtgagtccatatacgatgaggatccattaccgagaccttcccataaaagacattcccaaaacgatcactctcatagtggcagaaataaacgtagagcatctaacttccatcctcctccttatcaaaagtctaatgtcattcaaccaactataaggggcgagacgttatctctcaataataatattagtaaaaattccagatatcaaaatacaaaagtaaacgtctcttctatatctgagaatatgtatggctccagatataacccttctacttatgttgataataacagcatttccaactcttccaattacagaaactacaattcttatcaaccatataggagtggtaccttggggaaaagaagatga

SEQ ID NO: 1477 - DNA, 1764 bp, Saccharomyces cerevisiae
atgttgtggaagcgtacttgcacaaggctaataaagcctattgcacaacctagaggaaggctggtgagaagatcatgctacagatacgcctcaacaggcacaggcagcaccgacagcagcagccagtggttaaaatactctgtcatcgcctcttcagctactctattcggttatttgttcgctaagaacctctattctagggagactaaggaagatttgatagagaagctggaaatggtcaaaaagatcgacccagtaaattctacgttaaagctgtcctcattggactcaccagactatttgcacgacccggttaagatcgataaggttgttgaggacctgaagcaggtgctgggaaacaagcctgaaaactactctgatgcgaaatccgatttggacgcccattcagatacctacttcaacacgcatcacccctctcccgagcaaagacctaggattatattattccctcatactaccgaagaagtttccaaaattttgaaaatatgtcacgataacaacatgccagttgtacccttctcgggcggaacgtccttggaggggcacttcctgcctacaagaattggagataccataaccgtagacctgtccaagtttatgaataacgtcgtaaaatttgacaagctggacctggacatcaccgtgcaggccggtctaccctgggaggatttgaatgactatttgagcgaccacggtttgatgtttggctgtgaccctggtccaggtgcacagattggtggttgcattgctaattcttgttcaggaaccaacgcctaccgttacggtaccatgaaggagaatattataaacatgactatagtgttgccggacgggaccattgtcaagacgaagaaaagacccagaaagtcgagcgctggctataacttaaatggtttatttgtgggaagtgaaggtaccttaggtattgttactgaagctactgtcaagtgtcatgtcaagcccaaagctgaaactgttgcggtggtatcctttgatactatcaaggatgcggccgcatgtgcttctaatctgactcagagtggtattcatttgaacgccatggagttactggatgaaaatatgatgaagttgatcaacgcatctgaatccacggacagatgtgattgggtagagaaaccaactatgtttttcaagattggtgggagatctcccaacattgtcaatgctcttgtggatgaagttaaggctgtcgcccagttaaatcactgcaacagttttcagtttgctaaagatgatgacgaaaaattggaattatgggaagctagaaaggtcgcgctatggtctgtgctagacgctgataagagcaaagacaaatcagctaaaatttggacaactgatgtagctgttcctgtgtcgcagttcgacaaggttattcacgaaactaaaaaggacatgcaagctagtaagctgatcaacgccattgttggtcatgcaggtgatggtaacttccatgcattcatcgtctacagaacccctgaagaacacgaaacctgtagccaacttgttgacagaatggtcaagagagcactgaacgcagaaggcacttgcacgggtgaacacggtgttggtattggtaaaagagagtacttgctcgaagaattaggtgaagcacccgtcgatttgatgagaaagattaagctagctattgacccaaagagaatcatgaacccggacaaaatctttaaaactgatccaaacgagcccgctaatgattacaggtga

SEQ ID NO: 1478 - DNA, 1764 bp, Artificial Sequence
  Description of Artificial Sequence: Synthetic polynucleotide
atgttgtggaagcgtacttgcacaaggttgataaagcctattgcacaacctagaggaaggttggtgagaagatcttgctacagatacgcctctacaggcacaggcagcaccgacagcagcagccagtggttaaaatactctgtcatcgcctcttctgctactttattcggttatttgttcgctaagaacctctattctagggagactaaggaagatttgatagagaagttggaaatggtcaaaaagatcgacccagtaaattctacgttaaagttatcctctttggactctccagactatttgcacgacccggttaagatcgataaggttgttgaggacttgaagcaggtgttgggaaacaagcctgaaaactactctgatgcgaaatccgatttggacgcccattctgatacctacttcaacacgcatcacccctctcccgagcaaagacctaggattatattattccctcatactaccgaagaagtttccaaaattttgaaaatatgtcacgataacaacatgccagttgtacccttcagtggcggaacgtccttggaggggcacttcttacctacaagaattggagataccataaccgtagacttatccaagtttatgaataacgtcgtaaaatttgacaagttggacttggacatcaccgtgcaggccggtttgccctgggaggatttgaatgactatttgagcgaccacggtttgatgtttggctgtgaccctggtccaggtgcacagattggtggttgcattgctaattcttgttctggaaccaacgcctaccgttacggtaccatgaaggagaatattataaacatgactatagtgttgccggacgggaccattgtcaagacgaagaaaagacccagaaagagcagcgctggctataacttaaatggtttatttgtgggaagtgaaggtaccttaggtattgttactgaagctactgtcaagtgtcatgtcaagcccaaagctgaaactgttgcggtggtatcctttgatactatcaaggatgcggccgcatgtgcttctaatttaactcagagtggtattcatttgaacgccatggagttattagatgaaaatatgatgaagttgatcaacgcatctgaatccacggacagatgtgattgggtagagaaaccaactatgtttttcaagattggtgggagatctcccaacattgtcaatgctcttgtggatgaagttaaggctgtcgcccagttaaatcactgcaacagttttcagtttgctaaagatgatgacgaaaaattggaattatgggaagctagaaaggtcgcgctttggtctgtgcttgacgctgataagagcaaagacaaatctgctaaaatttggacaactgatgtagctgttcctgtgtcccagttcgacaaggttattcacgaaactaaaaaggacatgcaagctagtaagttaatcaacgccattgttggtcatgcaggtgatggtaacttccatgcattcatcgtctacagaacccctgaagaacacgaaacctgtagccaacttgttgacagaatggtcaagagagcattgaacgcagaaggcacttgcacgggtgaacacggtgttggtattggtaaaagagagtacttgctcgaagaattaggtgaagcacccgtcgatttgatgagaaagattaagttggctattgacccaaagagaatcatgaacccggacaaaatctttaaaactgatccaaacgagcccgctaatgattacaggtga

SEQ ID NO: 1479 - DNA, 888 bp, Saccharomyces cerevisiae
atggctacgttcaacccacaaaacgagatggagaaccaggcacgtgtacaagagtacaaggtctccactggcagaggcggagctggcaacatccataaatctatgtccaagccgtctcccgtacttcttccattgaaatccaattcaaagacagtagcaaacaacaataataacggtagcaaccaggaaaaggttcctcgttttgcaattggtagaggtggtgccggtaatatctttcatgatccgcacctgacgagatccgcccaacaactggactctaacgacaatatcaactataacgacgtgatcaatgacatcgacgattatatttcccctataacttcggatatggtggatgaaggtgggtcaaacccggtgaccaacaccaggtctcgtatcagcgctacaaggagccatcagtctttgcatgccaccacttcgtctccgaacaacaacgccccaattgtcgttggtagaggtggggcaggaaacattttcttcaacaaaaaaaaggtggccagcaatggtggaaatgaagaggatgagatacgaggcggcaatatcgaggatgaggatactatcaatgcaaacgaggacaacctgtttgtggtgacttccaatggcaatgctttggcggcaatcaagtccacgtccaagaagcctaaaaataagctcaagggcaaaagcgcaccggaaaaatttgctattggaagaggtggcgctggaaacataatttctccaaagtcaagcaggaacactatcaaccataacttaaacgatgatgatgaagataagtttaatttgaaagatgacaatggtaaagagaagaagaagaagaagaagaagaaatcagggtttttcagttctttgaaaactatgtttaattga

SEQ ID NO: 1480 - DNA, 888 bp, Artificial Sequence
  Description of Artificial Sequence: Synthetic polynucleotide
atggctacgttcaacccacaaaacgagatggagaaccaggcacgtgtacaagagtacaaggtctccactggcagaggcggagctggcaacatccataaatctatgtccaagccgtctcccgtacttcttccattgaaatccaattctaagacagtagcaaacaacaataataacggtagcaaccaggaaaaggttcctcgttttgcaattggtagaggtggtgccggtaatatctttcatgatccgcacttaacgagatccgcccaacaattggactctaacgacaatatcaactataacgacgtgatcaatgacatcgacgattatatttcccctataacttctgatatggtggatgaaggtgggtctaacccggtgaccaacaccaggtctcgtatcagcgctacaaggagccatcagtctttgcatgccaccacttcttctccgaacaacaacgccccaattgtcgttggtagaggtggggcaggaaacattttcttcaacaaaaaaaaggtggccagcaatggtggaaatgaagaggatgagataagaggcggcaatatcgaggatgaggatactatcaatgcaaacgaggacaacttgtttgtggtgacttccaatggcaatgctttggcggcaatcaagtccacgtccaagaagcctaaaaataagctcaagggcaaaagcgcaccggaaaaatttgctattggaagaggtggcgctggaaacataatttctccaaagagcagcaggaacactatcaaccataacttaaacgatgatgatgaagataagtttaatttgaaagatgacaatggtaaagagaagaagaagaagaagaagaagaaaagtgggtttttcagttctttgaaaactatgtttaattga

SEQ ID NO: 1481 - DNA, 6438 bp, Saccharomyces cerevisiae
atgccagtgttgaaatcagacaatttcgatccattggaagaagcttacgaaggtgggacaattcaaaactataacgatgaacaccatcttcataaatcttgggcaaatgtgattccggacaaacgaggactttacgaccctgattatgaacatgacgcttgtggtgtcggtttcgtagcaaataagcatggtgaacagtctcacaagattgttactgacgctagatatcttttagtgaatatgacacatcgtggtgccgtctcatctgatgggaacggtgacggtgccggtattctgctaggtattcctcacgaatttatgaaaagagaattcaagttagatcttgatctagacatacctgagatgggcaaatacgccgtaggtaacgtcttcttcaagaagaacgaaaaaaataacaagaaaaatttaattaagtgtcagaagattttcgaggatttagctgcatccttcaacttatccgtattaggttggagaaacgtccccgtagattctactattttaggagacgttgcattatctcgtgaacctactattctacagccattattggttccattgtatgatgaaaaacaaccggagtttaatgaaactaaatttagaactcaattgtatcttttaaggaaggaggcctctcttcaaataggactggaaaactggttctatgtttgttccctaaacaataccaccattgtttacaagggtcaattgacgccagctcaagtgtataactactatcccgacttgactaatgcgcatttcaaatcccacatggcgttggtccattcaagattttccactaatactttcccctcttgggatagagctcaacctttacgttggctagctcataatggtgaaattaacaccttaagaggtaacaagaattggatgcgctccagagaaggtgtgatgaattcagcaactttcaaagatgagttagacaaactatacccaattatcgaagaaggtggttctgattcagctgcattggataacgttttagaactattgactattaatggcacattatctctacctgaagctgttatgatgatggttcctgaagcgtatcataaggatatggattctgacctaaaagcatggtacgactgggctgcatgtctgatggaaccttgggatggtccagctttgttaactttcactgatggacgttactgtggtgctatattggatagaaatggtttaagaccttgtcgttattacatcactagtgatgacagagttatctgtgcttcagaggtaggtgtcattcctatcgaaaattcattggttgttcaaaaaggtaaactgaagccaggtgatttattcctagtggatactcaattgggtgaaatggtcgatactaaaaagttaaaatctcaaatctcaaaaagacaagattttaagtcttggttatccaaagtcatcaagttagacgacttgttatcaaaaaccgctaatttggttcctaaagaatttatatcacaggattcattgtctttgaaagttcaaagtgacccacgtctattggccaatggttataccttcgaacaagtcacatttctgttaactccaatggctttaacaggtaaagaagctttaggttcgatgggtaacgatgcgccactggcttgtttaaatgaaaatcctgtcttactttatgattatttcagacaattgtttgctcaagtgaccaatcctccaattgacccaattcgtgaagcaaatgttatgtcgttagaatgttatgtcggacctcaaggcaaccttttggaaatgcattcatctcaatgtgatcgtttattattgaaatctcctattttgcattggaatgagttccaagctttgaaaaacattgaagctgcttacccatcatggtctgtagcagaaattgatatcacattcgacaagagtgagggtctattgggctataccgacacaattgataaaatcactaagttagcgagcgaagcaattgatgatggtaaaaagatcttaataattactgacaggaaaatgggtgccaaccgtgtttccatctcctctttgattgcaatttcatgtattcatcatcacctaatcagaaacaagcagcgttcccaagttgctttgattttggaaacaggtgaagccagagaaattcaccatttctgtgtcctactaggttatggttgtgatggtgtttatccatacttagccatggaaactttggtcagaatgaatagagaaggtctacttcgtaatgtcaacaatgacaatgatacacttgaggaagggcaaatactagaaaattacaagcacgctattgatgcaggtatcttgaaggttatgtctaaaatgggtatctccactctagcatcctacaaaggtgctcaaatttttgaagccctaggtttagataactctattgttgatttgtgtttcacaggtacttcttccagaattagaggtgtaactttcgagtatttggctcaagatgccttttctttacatgagcgtggttatccatccagacaaaccattagtaaatctgttaacttaccagaaagtggtgaataccactttagggatggtggttacaaacacgtcaacgaaccaaccgcaattgcttcgttacaagatactgtcagaaacaaaaatgatgtctcttggcaattatatgtaaagaaggaaatggaagcaattagagactgtacactaagaggactgttagaattagattttgaaaattctgtcagtatccctctagaacaagttgaaccatggactgaaattgccagaagatttgcgtcaggtgcaatgtcttatggttctatttctatggaagctcactctacattggctattgccatgaatcgtttaggggccaaatccaattgtggtgaaggtggtgaagacgcagaacgttctgctgttcaagaaaacggtgatactatgagatctgctatcaaacaagttgcttccgctagattcggtgtaacttcatactacttgtcagatgctgatgaaatccaaattaagattgctcagggtgctaagccgggtgaaggtggtgaactaccagcccacaaagtgtctaaggatatcgcaaaaaccaggcactccacccctaatgttgggttaatctctcctcctcctcatcacgatatttattccattgaagatttgaaacaactgatttatgatttgaaatgtgctaatccaagagcgggaatttctgtaaagttggtttccgaagttggtgttggtattgttgcctctggtgtagctaaggctaaagccgatcatatcttagtttctggtcatgatggtggtacaggtgctgcaagatggacgagtgtcaaatatgcgggtttgccatgggaattaggtctagctgaaactcaccagactttagtcttgaatgatttaagacgtaatgttgttgtccaaaccgatggtcaattgagaactgggtttgatattgctgttgcagttttattaggggcagaatcttttaccttggcaacagttccattaattgctatgggttgtgttatgttaagaagatgtcacttgaactcttgtgctgttggtattgccacacaagatccatatttgagaagtaagtttaagggtcagcccgaacatgttatcaacttcttctattacttgatccaagatttaagacaaatcatggccaagttaggattccgtaccattgacgaaatggtgggtcattctgaaaaattaaagaaaagggacgacgtaaatgccaaagccataaatatcgatttatctcctattttgaccccagcacatgttattcgtccaggtgttccaaccaagttcactaagaaacaagaccacaaactccacacccgtctagataataagttaatcgatgaggctgaagttactttggatcgtggcttaccagtgaatattgacgcctctataatcaatactgatcgtgcactcggttctactttatcttacagagtctcgaagaaatttggtgaagatggtttgccaaaggacaccgttgtcgttaacatagaaggttcagcgggtcaatcttttggtgctttcctagcttctggtatcacttttatcttgaatggtgatgctaatgattatgttggtaaaggtttatccggtggtattattgtcattaaaccaccaaaggattctaaattcaagagtgatgaaaatgtaattgttggtaacacttgtttctatggtgctacttctggtactgcattcatttcaggtagtgccggtgagcgtttcggtgtcagaaactctggtgccaccatcgttgttgagagaattaagggtaacaatgcctttgagtatatgactggtggtcgtgccattgtcttatcacaaatggaatccctaaacgccttctctggtgctactggtggtattgcatactgtttaacttccgattacgacgattttgttggaaagattaacaaagatactgttgagttagaatcattatgtgacccggtcgagattgcgtttgttaagaatttgatccaggagcattggaactacacacaatctgatctagcagccaggattctcggtaatttcaaccattatttgaaagatttcgttaaagtcattccaactgattataagaaagttttgttgaaggagaaagcagaagctgccaaggcaaaggctaaggcaacttcagaatacttaaagaagtttagatcgaaccaagaagttgatgacgaagtcaatactctattgattgctaatcaaaaagctaaagagcaagaaaaaaagaagagtattactatttcaaataaggccactttgaaggagcctaaggttgttgatttagaagatgcagttccagattccaaacagctagagaagaatagcgaaaggattgaaaaaacacgtggttttatgatccacaaacgtcgtcatgagacacacagagatccaagaaccagagttaatgactggaaagaatttactaaccctattaccaagaaggatgccaaatatcaaactgcgagatgtatggattgtggtacaccattctgtttatctgataccggttgtcccctatctaacattatccccaagtttaatgaattgttattcaagaaccaatggaagttggcactggacaaattgctagagacaaacaatttcccagaattcactggaagagtatgtccagcaccctgtgagggagcttgtacactaggtattattgaagacccagtcggcataaaatcggttgaaagaattatcattgacaatgctttcaaggaaggatggattaagccttgtccaccaagtacacgcactggctttacagtgggtgtcattggttctggtccagcaggtttagcgtgtgctgatatgttgaaccgtgccggacatacggtcactgtttatgaaagatccgaccgttgtggtgggttattgatgtatggtattccaaacatgaagttggataaggctatagtgcaacgtcgtattgatctattgagtgccgaaggtattgactttgttaccaacaccgaaattggtaaaaccataagcatggatgagctaaagaacaagcacaatgcagtagtgtatgctatcggttctaccattccacgtgacttacctattaagggtcgtgaattgaagaatattgattttgccatgcagttgttggaatctaacacaaaagctttattgaacaaagatctggaaatcattcgtgaaaagatccaaggtaagaaagtaattgttgtcggtggtggtgacacaggtaacgattgtttaggtacatctgtaagacacggtgcagcatcagttttgaatttcgaattgttgcctgagccaccagtggaacgtgccaaagacaatccatggcctcaatggccgcgtgtcatgagagtggactacggtcatgctgaagtgaaagagcattatggtagagaccctcgtgaatactgcatcttgtccaaggaatttatcggtaacgatgagggtgaagtcactgccatcagaactgtgcgcgtagaatggaagaagtcacaaagtggcgtatggcaaatggtagaaattcccaacagtgaagagatctttgaagccgatatcattttgttgtctatgggtttcgtgggtcctgaattgatcaatggcaacgataacgaagttaagaagacaagacgtggtacgattgccacactcgacgactcctcatactctattgatggaggaaagacttttgcatgtggtgactgtagaagagggcaatctttgattgtctgggccatccaagaaggtagaaaatgtgctgcctctgtcgataagttcctaatggacggcactacgtatctaccaagtaatggtggtatcgttcaacgtgattacaaactattgaaagaattagctagtcaagtctaa

SEQ ID NO: 1482 - DNA, 6438 bp, Artificial Sequence
  Description of Artificial Sequence: Synthetic polynucleotide
atgccagtgttgaaaagtgacaatttcgatccattggaagaagcttacgaaggtgggacaattcaaaactataacgatgaacaccatcttcataaatcttgggcaaatgtgattccggacaaaagaggactttacgaccctgattatgaacatgacgcttgtggtgtcggtttcgtagcaaataagcatggtgaacagtctcacaagattgttactgacgctagatatcttttagtgaatatgacacatcgtggtgccgtcagctctgatgggaacggtgacggtgccggtattttattgggtattcctcacgaatttatgaaaagagaattcaagttagatcttgatttggacatacctgagatgggcaaatacgccgtaggtaacgtcttcttcaagaagaacgaaaaaaataacaagaaaaatttaattaagtgtcagaagattttcgaggatttagctgcatccttcaacttatccgtattaggttggagaaacgtccccgtagattctactattttaggagacgttgcattatctcgtgaacctactattttacagccattattggttccattgtatgatgaaaaacaaccggagtttaatgaaactaaatttagaactcaattgtatcttttaaggaaggaggcctctcttcaaataggattagaaaactggttctatgtttgttccttgaacaataccaccattgtttacaagggtcaattgacgccagctcaagtgtataactactatcccgacttgactaatgcgcatttcaaatcccacatggcgttggtccattccagattttccactaatactttcccctcttgggatagagctcaacctttacgttggttggctcataatggtgaaattaacaccttaagaggtaacaagaattggatgcgctccagagaaggtgtgatgaattctgcaactttcaaagatgagttagacaaactttacccaattatcgaagaaggtggttctgattctgctgcattggataacgttttagaattattgactattaatggcacattatctttgcctgaagctgttatgatgatggttcctgaagcgtatcataaggatatggattctgacttgaaagcatggtacgactgggctgcatgtttgatggaaccttgggatggtccagctttgttaactttcactgatggacgttactgtggtgctatattggatagaaatggtttaagaccttgtcgttattacatcactagtgatgacagagttatctgtgcttctgaggtaggtgtcattcctatcgaaaattctttggttgttcaaaaaggtaaattgaagccaggtgatttattcttggtggatactcaattgggtgaaatggtcgatactaaaaagttaaaatctcaaatctccaaaagacaagattttaagtcttggttatccaaagtcatcaagttagacgacttgttatccaaaaccgctaatttggttcctaaagaatttatatctcaggattctttgtctttgaaagttcaaagtgacccacgtttattggccaatggttataccttcgaacaagtcacatttttattaactccaatggctttaacaggtaaagaagctttaggttctatgggtaacgatgcgccattggcttgtttaaatgaaaatcctgtcttactttatgattatttcagacaattgtttgctcaagtgaccaatcctccaattgacccaattcgtgaagcaaatgttatgtctttagaatgttatgtcggacctcaaggcaaccttttggaaatgcattcttctcaatgtgatcgtttattattgaaatctcctattttgcattggaatgagttccaagctttgaaaaacattgaagctgcttacccatcttggtctgtagcagaaattgatatcacattcgacaagagtgagggtttattgggctataccgacacaattgataaaatcactaagttagcgagcgaagcaattgatgatggtaaaaagatcttaataattactgacaggaaaatgggtgccaaccgtgtttccatctcctctttgattgcaattagttgtattcatcatcacttaatcagaaacaagcagcgttcccaagttgctttgattttggaaacaggtgaagccagagaaattcaccatttctgtgtcttgttgggttatggttgtgatggtgtttatccatacttagccatggaaactttggtcagaatgaatagagaaggtttacttcgtaatgtcaacaatgacaatgatacacttgaggaagggcaaatattggaaaattacaagcacgctattgatgcaggtatcttgaaggttatgtctaaaatgggtatctccactttggcatcctacaaaggtgctcaaatttttgaagcccttggtttagataactctattgttgatttgtgtttcacaggtacttcttccagaattagaggtgtaactttcgagtatttggctcaagatgccttttctttacatgagcgtggttatccatccagacaaaccattagtaaatctgttaacttaccagaaagtggtgaataccactttagggatggtggttacaaacacgtcaacgaaccaaccgcaattgcttctttacaagatactgtcagaaacaaaaatgatgtctcttggcaattatatgtaaagaaggaaatggaagcaattagagactgtacattaagaggattattagaattagattttgaaaattctgtcagtatccctttggaacaagttgaaccatggactgaaattgccagaagatttgcgtctggtgcaatgtcttatggttctatttctatggaagctcactctacattggctattgccatgaatcgtttaggggccaaatccaattgtggtgaaggtggtgaagacgcagaacgttctgctgttcaagaaaacggtgatactatgagatctgctatcaaacaagttgcttccgctagattcggtgtaacttcttactacttgagtgatgctgatgaaatccaaattaagattgctcagggtgctaagccgggtgaaggtggtgaattaccagcccacaaagtgtctaaggatatcgcaaaaaccaggcactccacccctaatgttgggttaatctctcctcctcctcatcacgatatttattccattgaagatttgaaacaattgatttatgatttgaaatgtgctaatccaagagcgggaatttctgtaaagttggtttccgaagttggtgttggtattgttgcctctggtgtagctaaggctaaagccgatcatatcttagtttctggtcatgatggtggtacaggtgctgcaagatggacgagtgtcaaatatgcgggtttgccatgggaattaggtttagctgaaactcaccagactttagtcttgaatgatttaagacgtaatgttgttgtccaaaccgatggtcaattgagaactgggtttgatattgctgttgcagttttattaggggcagaatcttttaccttggcaacagttccattaattgctatgggttgtgttatgttaagaagatgtcacttgaactcttgtgctgttggtattgccacacaagatccatatttgagaagtaagtttaagggtcagcccgaacatgttatcaacttcttctattacttgatccaagatttaagacaaatcatggccaagttaggattccgtaccattgacgaaatggtgggtcattctgaaaaattaaagaaaagggacgacgtaaatgccaaagccataaatatcgatttatctcctattttgaccccagcacatgttattcgtccaggtgttccaaccaagttcactaagaaacaagaccacaaactccacacccgtttggataataagttaatcgatgaggctgaagttactttggatcgtggcttaccagtgaatattgacgcctctataatcaatactgatcgtgcactcggttctactttatcttacagagtctccaagaaatttggtgaagatggtttgccaaaggacaccgttgtcgttaacatagaaggttctgcgggtcaatcttttggtgctttcttggcttctggtatcacttttatcttgaatggtgatgctaatgattatgttggtaaaggtttatccggtggtattattgtcattaaaccaccaaaggattctaaattcaagagtgatgaaaatgtaattgttggtaacacttgtttctatggtgctacttctggtactgcattcatttctggtagtgccggtgagcgtttcggtgtcagaaactctggtgccaccatcgttgttgagagaattaagggtaacaatgcctttgagtatatgactggtggtcgtgccattgtcttatctcaaatggaatccttgaacgccttctctggtgctactggtggtattgcatactgtttaacttccgattacgacgattttgttggaaagattaacaaagatactgttgagttagaatctttatgtgacccggtcgagattgcgtttgttaagaatttgatccaggagcattggaactacacacaatctgatttggcagccaggattctcggtaatttcaaccattatttgaaagatttcgttaaagtcattccaactgattataagaaagttttgttgaaggagaaagcagaagctgccaaggcaaaggctaaggcaacttctgaatacttaaagaagtttagatctaaccaagaagttgatgacgaagtcaatactttattgattgctaatcaaaaagctaaagagcaagaaaaaaagaagagtattactatttctaataaggccactttgaaggagcctaaggttgttgatttagaagatgcagttccagattccaaacagttggagaagaatagcgaaaggattgaaaaaacacgtggttttatgatccacaaacgtcgtcatgagacacacagagatccaagaaccagagttaatgactggaaagaatttactaaccctattaccaagaaggatgccaaatatcaaactgcgagatgtatggattgtggtacaccattctgtttatctgataccggttgtcccttatctaacattatccccaagtttaatgaattgttattcaagaaccaatggaagttggcattggacaaattgttggagacaaacaatttcccagaattcactggaagagtatgtccagcaccctgtgagggagcttgtacattaggtattattgaagacccagtcggcataaaatctgttgaaagaattatcattgacaatgctttcaaggaaggatggattaagccttgtccaccaagtacacgcactggctttacagtgggtgtcattggttctggtccagcaggtttagcgtgtgctgatatgttgaaccgtgccggacatacggtcactgtttatgaaagatccgaccgttgtggtgggttattgatgtatggtattccaaacatgaagttggataaggctatagtgcaacgtcgtattgatttattgagtgccgaaggtattgactttgttaccaacaccgaaattggtaaaaccataagcatggatgagttgaagaacaagcacaatgcagtagtgtatgctatcggttctaccattccacgtgacttacctattaagggtcgtgaattgaagaatattgattttgccatgcagttgttggaatctaacacaaaagctttattgaacaaagatttggaaatcattcgtgaaaagatccaaggtaagaaagtaattgttgtcggtggtggtgacacaggtaacgattgtttaggtacatctgtaagacacggtgcagcatctgttttgaatttcgaattgttgcctgagccaccagtggaacgtgccaaagacaatccatggcctcaatggccgcgtgtcatgagagtggactacggtcatgctgaagtgaaagagcattatggtagagaccctcgtgaatactgcatcttgtccaaggaatttatcggtaacgatgagggtgaagtcactgccatcagaactgtgcgcgtagaatggaagaagtctcaaagtggcgtatggcaaatggtagaaattcccaacagtgaagagatctttgaagccgatatcattttgttgtctatgggtttcgtgggtcctgaattgatcaatggcaacgataacgaagttaagaagacaagacgtggtacgattgccacactcgacgactcctcttactctattgatggaggaaagacttttgcatgtggtgactgtagaagagggcaatctttgattgtctgggccatccaagaaggtagaaaatgtgctgcctctgtcgataagttcttaatggacggcactacgtatttaccaagtaatggtggtatcgttcaacgtgattacaaacttttgaaagaattagctagtcaagtctga

SEQ ID NO: 1483 - DNA, 1587 bp, Saccharomyces cerevisiae
atgaattatggcgtggagaagctgaaattgaaatattcgaagcatgggtgtattacttgcaagatcagaaagaagagatgctctgaagataaacctgtgtgccgggactgtcgtcgattaagttttccctgtatctatatatcagaatctgttgataagcagtctttgaaaaaaataaaggcagatatacagcaccagttgatcagcaagaaaagaaagcatgctcctgacagtgctcagaaagcggccgtggccacccgtactcgacgggtcggtagcgacgaacaggataaccaggtatatttgtcaaaaccgctggaagattgcatttctcagaagctggactctatgggattgcagctgtacaactactacaggtctcaccttgcaaacataatttccatcgcgcccatgaaccagaactactatctgaacattttcttgccaatggcccacgagaatgatggtatattgtttgctattcttgcttggtcagctaatcatttgtctatatcatcatcaaatgagctgcgaaaggatgaaatatttgtcaacttggcgaacaagtatacatacatgtcgttatcgcatctaaagacaaacgagggctcaagtgcctgtgctaaactggggtttctatattcactagcacaaatcctaatcttatgtggttcagagatatgtcagggtgatgtgaaattttggaagatattattgaatataggaaaaaatttgatcgaaaaccatgtgggcaaggatgtctcacggatactaaccactactacagaagaaccctccctagaggagaggataatcttccccaatttcaattccgttgttaagtactggctgattgtgaattttatatatcatgatattttgaatttcaatacaacgtccttcccgatcgaacaatacgagaaattcttccaaagggatcagaactctttacccagctcagccaactttattgagtcaatagactcgccaattgaggaaatagaccctttaattggcatcaacaagcctattttactactattgggacaagtcacaaatttgacgaggtttttgcagactatggaacaggaagaaatgctagagcatggcgataaaattttgagtttgcaagtcgagatttataaattacaaccttcgcttatggcgctggaacatttggatgatgaaaagaaattttactatttagaactattcgagataatgaaaatttctaccttaatgttctttcaattaactttattaaagattgacaaagattcgctggaactacagatactgagaaacaaattggactcgaagctagacaaggtcatcggaacttttttggaaggatcgttatgcttcccacttttcatttacggtgtatgcattcaggtagaagatatggagaaaaaaatagatttggaagccaaatttgacgacattttaaaacgatataaatgttacaatttccaaaatgctagattattgatacggaaaatttggcaaaacgaggctgatggcatcagtgagcatgacctggtccacatgattgacgaattagattacaatattaattttgcctga

SEQ ID NO: 1484 - DNA, 1587 bp, Artificial Sequence
  Description of Artificial Sequence: Synthetic polynucleotide
atgaattatggcgtggagaagttgaaattgaaatattccaagcatgggtgtattacttgcaagatcagaaagaagagatgctctgaagataaacctgtgtgcagagactgtcgtcgtttaagttttccctgtatctatatatctgaatctgttgataagcagtctttgaaaaaaataaaggcagatatacagcaccagttgatcagcaagaaaagaaagcatgctcctgacagtgctcagaaagcggccgtggccacccgtactaggagagtcggtagcgacgaacaggataaccaggtatatttgagtaaaccgttggaagattgcatttctcagaagttggactctatgggattgcagttatacaactactacaggtctcaccttgcaaacataatttccatcgcgcccatgaaccagaactactatttgaacattttcttgccaatggcccacgagaatgatggtatattgtttgctattcttgcttggagtgctaatcatttgtctatatcttcttccaatgagttaagaaaggatgaaatatttgtcaacttggcgaacaagtatacatacatgtctttatctcatttgaagacaaacgagggctccagtgcctgtgctaaattggggtttttatattctttggcacaaatcttaatcttatgtggttctgagatatgtcagggtgatgtgaaattttggaagatattattgaatataggaaaaaatttgatcgaaaaccatgtgggcaaggatgtctctagaatattgaccactactacagaagaaccctccttggaggagaggataatcttccccaatttcaattccgttgttaagtactggttgattgtgaattttatatatcatgatattttgaatttcaatacaacgtccttcccgatcgaacaatacgagaaattcttccaaagggatcagaactctttacccagcagtgccaactttattgagagtatagactctccaattgaggaaatagaccctttaattggcatcaacaagcctattttattattattgggacaagtcacaaatttgacgaggtttttgcagactatggaacaggaagaaatgttagagcatggcgataaaattttgagtttgcaagtcgagatttataaattacaaccttctcttatggcgttagaacatttggatgatgaaaagaaattttactatttagaattattcgagataatgaaaatttctaccttaatgttctttcaattaactttattaaagattgacaaagattctttggaattacagatattaagaaacaaattggactccaagttggacaaggtcatcggaacttttttggaaggatctttatgcttcccacttttcatttacggtgtatgcattcaggtagaagatatggagaaaaaaatagatttggaagccaaatttgacgacattttaaaaagatataaatgttacaatttccaaaatgctagattattgataagaaaaatttggcaaaacgaggctgatggcatcagtgagcatgacttggtccacatgattgacgaattagattacaatattaattttgcctga

SEQ ID NO: 1485 - DNA, 672 bp, Saccharomyces cerevisiae
atggaggataaggagaaacttattgtatactcaaataccagttcggtatttacatatagtgcagaaataaggccaaattttaaaatatctgtatctcaaagtcaaggttttgcctggaaccaggacttattcgccacacaataccaacaatcatataaggtggtatatgatgcacacgaggacaactttgatgagttaattttgaagatcaagggcaaattaaagacaaaatctaataaaagagctaaaatgaagtctaagactaaattaacaaggactgcaaagcagagaagggaaagccccgtttgtgaaagggacgagagtgacgaggataatgatagtgatcactaccaaagaatacaagtgctagatggccatgaatttccgagagcaaatcggtataaatctgtatgggctcatgacgtccactcgaatgaagatagtacaagcgacggggaaagcaatcatgatatagatatgattggcggcactggcacgtcgtatgcaggagcagccataatggataggccacgcaggaaatctgagagaagcataagctttgtggaggactccaagacaggcgattacaggtatcaaaccgggcaggtggatgttgtagaggtggactcggacacccctgaaaataatcacctaaaatggttaattaaataa

SEQ ID NO: 1486 - DNA, 672 bp, Artificial Sequence
  Description of Artificial Sequence: Synthetic polynucleotide
atggaggataaggagaaacttattgtatactctaataccagttctgtatttacatatagtgcagaaataaggccaaattttaaaatatctgtatctcaaagtcaaggttttgcctggaaccaggacttattcgccacacaataccaacaaagttataaggtggtatatgatgcacacgaggacaactttgatgagttaattttgaagatcaagggcaaattaaagacaaaatctaataaaagagctaaaatgaagtctaagactaaattaacaaggactgcaaagcagagaagggaaagccccgtttgtgaaagggacgagagtgacgaggataatgatagtgatcactaccaaagaatacaagtgttggatggccatgaatttccgagagcaaatagatataaatctgtatgggctcatgacgtccactctaatgaagatagtacaagcgacggggaaagcaatcatgatatagatatgattggcggcactggcacgtcctatgcaggagcagccataatggataggccacgcaggaaatctgagagaagcataagctttgtggaggactccaagacaggcgattacaggtatcaaaccgggcaggtggatgttgtagaggtggacagtgacacccctgaaaataatcacttgaaatggttaattaaatga

SEQ ID NO: 1487 - DNA, 1161 bp, Saccharomyces cerevisiae
atgtccgccgctactgttggtaaacctattaagtgcattgctgctgttgcgtatgatgcgaagaaaccattaagtgttgaagaaatcacggtagacgccccaaaagcgcacgaagtacgtatcaaaattgaatatactgctgtatgccacactgatgcgtacactttatcaggctctgatccagaaggacttttcccttgcgttctgggccacgaaggagccggtatcgtagaatctgtaggcgatgatgtcataacagttaagcctggtgatcatgttattgctttgtacactgctgagtgtggcaaatgtaagttctgtacttccggtaaaaccaacttatgtggtgctgttagagctactcaagggaaaggtgtaatgcctgatgggaccacaagatttcataatgcgaaaggtgaagatatataccatttcatgggttgctctactttttccgaatatactgtggtggcagatgtctctgtggttgccatcgatccaaaagctcccttggatgctgcctgtttactgggttgtggtgttactactggttttggggcggctcttaagacagctaatgtgcaaaaaggcgataccgttgcagtatttggctgcgggactgtaggactctccgttatccaaggtgcaaagttaaggggcgcttccaagatcattgccattgacattaacaataagaaaaaacaatattgttctcaatttggtgccacggattttgttaatcccaaggaagatttggccaaagatcaaactatcgttgaaaagttaattgaaatgactgatgggggtctggattttacttttgactgtactggtaataccaaaattatgagagatgctttggaagcctgtcataaaggttggggtcaatctattatcattggtgtggctgccgctggtgaagaaatttctacaaggccgttccagctggtcactggtagagtgtggaaaggctctgcttttggtggcatcaaaggtagatctgaaatgggcggtttaattaaagactatcaaaaaggtgccttaaaagtcgaagaatttatcactcacaggagaccattcaaagaaatcaatcaagcctttgaagatttgcataacggtgattgcttaagaaccgtcttgaagtctgatgaaataaaatag

SEQ ID NO: 1488 - DNA, 1161 bp, Artificial Sequence
  Description of Artificial Sequence: Synthetic polynucleotide
atgtccgccgctactgttggtaaacctattaagtgcattgctgctgttgcgtatgatgcgaagaaaccattaagtgttgaagaaatcacggtagacgccccaaaagcgcacgaagtacgtatcaaaattgaatatactgctgtatgccacactgatgcgtacactttaagtggctctgatccagaaggacttttcccttgcgttttaggccacgaaggagccggtatcgtagaatctgtaggcgatgatgtcataacagttaagcctggtgatcatgttattgctttgtacactgctgagtgtggcaaatgtaagttctgtacttccggtaaaaccaacttatgtggtgctgttagagctactcaagggaaaggtgtaatgcctgatgggaccacaagatttcataatgcgaaaggtgaagatatataccatttcatgggttgctctactttttccgaatatactgtggtggcagatgtctctgtggttgccatcgatccaaaagctcccttggatgctgcctgtttattgggttgtggtgttactactggttttggggcggctcttaagacagctaatgtgcaaaaaggcgataccgttgcagtatttggctgcgggactgtaggactctccgttatccaaggtgcaaagttaaggggcgcttccaagatcattgccattgacattaacaataagaaaaaacaatattgttctcaatttggtgccacggattttgttaatcccaaggaagatttggccaaagatcaaactatcgttgaaaagttaattgaaatgactgatgggggtttggattttacttttgactgtactggtaataccaaaattatgagagatgctttggaagcctgtcataaaggttggggtcaatctattatcattggtgtggctgccgctggtgaagaaatttctacaaggccgttccagttggtcactggtagagtgtggaaaggctctgcttttggtggcatcaaaggtagatctgaaatgggcggtttaattaaagactatcaaaaaggtgccttaaaagtcgaagaatttatcactcacaggagaccattcaaagaaatcaatcaagcctttgaagatttgcataacggtgattgcttaagaaccgtcttgaagtctgatgaaataaaatga

SEQ ID NO: 1489 - DNA, 2160 bp, Saccharomyces cerevisiae
atgcactatgtggtactagagctgcaagttgcgcatttgccagatacccccaaggatcaatgtcgcattgcgaatatagcatttcaaattgtgaatgctgaaacattagtatgccattatgggaccaattctttaccgagcattgaagtaaacgggacgacaaagagtttggagagtgcaatggtgcaattggacaaggatattcatgacgttattggtaacgacgactttgttcttgtttccctgtattcaacatggcatatccgtgttaccttaccacgtcaagcgagagatgatgggtttattcttacttcttatttacaacatccgaaagtatttgacttatggaaggaattcgatagatggtgtgtcaaccatccggagattttgggacaaaagaaagcaatctccaacaacaattgtaatactaaaagtattagtattaatgcagccaaaaatacgaaggatttggacgaaatagttagaatattggaagtttcaatcccaactgaagaggcaggctctgttccagagatatactctcttttaaaaaggacaacggatatattaatacaattgcacaaaaagtgtacttcccctgaagatatggaatctgtcttaacaaaaccatatgactcacacaccgatattagagcgtttttgcaagagaaatctaagattttgtacatgaacaatttaccgcccgacacaactcaaagtgagttggaatcatggtttacccaatatggtgttagaccagttgggttttggactgtcaaaaacatcgtagaagatacgtctaacgttaataataactggagtctaaataacagtccctatgtggaagatcaagatagtatctcaggatttgttgtcttccaaacacatgaagaagcaactgaagtactagcgttgaatgggagatcaatcctatctaatctggcaaacactaagcaaccaagggtggtggaacatgtccttgagcttcaaccttcttccaccggagtactcgataaggctcaagaaattttatcgcctttccctcaaagtaaaaacaaaccaagaccaggtgactggaattgcccatcttgtggtttttcaaactttcaaagacgtactgcatgttttagatgttcttttccggcaccatcaaatagtcaaatacatactgcgaactcaaacaataatgttaacagtagtagaaataatttaaacaatcgcgtgaactcgggatcttcaagcaatattagtaacactgcagcgaatcacccctatggtgcccctgagttcaacatgattgctaacaacacgccagcagctttaacatacaatagagctcattttcctgcaattacgccattgtcgcgacaaaattcattgaacatggcaccatcgaacagtgggtcgccgataattatagcggatcatttttcgggaaataataatatagccccaaattatcgttataataataatattaacaataacaacaataatattaacaatatgaccaataatagatataacattaataacaacatcaacggtaatgggaatggtaatgggaacaacagtaataacaataacaatcataataacaatcataataacaatcatcataatggtagtatcaatagtaatagtaataccaataataataataataataacaatggtaacaatagtaataattgtaattccaatatcggtatgggaggatgtggctccaacatgccatttagagcaggagattggaagtgttccacgtgcacgtatcataactttgctaaaaacgtagtgtgcttacgctgtggtggtccaaaatcaataagcggcgatgcaagtgaaaccaatcattacatagattcatcaacatttggaccagcgtcgcgtactcccagtaataacaatatttctgttaatactaatggtggtagcaatgctggtcgcaccgatgggaacgataacaaaggtcgtgatattagtttgatggaatttatgtcaccaccgttatcgatggcaacaaagtcaatgaaggagggagatgggaatggtagctcgtttaacgagttcaaaagtgacaaagctaacgttaatttttccaatgttggtgataatagcgctttcggtaatggttttaatagttcaatacgttggtag

SEQ ID NO: 1490 - DNA, 2160 bp, Artificial Sequence
  Description of Artificial Sequence: Synthetic polynucleotide
atgcactatgtggtattggagttacaagttgcgcatttgccagatacccccaaggatcaatgtcgcattgcgaatatagcatttcaaattgtgaatgctgaaacattagtatgccattatgggaccaattctttaccgagcattgaagtaaacgggacgacaaagagtttggagagtgcaatggtgcaattggacaaggatattcatgacgttattggtaacgacgactttgttcttgtttccttatattctacatggcatatccgtgttaccttaccacgtcaagcgagagatgatgggtttattcttacttcttatttacaacatccgaaagtatttgacttatggaaggaattcgatagatggtgtgtcaaccatccggagattttgggacaaaagaaagcaatctccaacaacaattgtaatactaaaagtattagtattaatgcagccaaaaatacgaaggatttggacgaaatagttagaatattggaagtttccatcccaactgaagaggcaggctctgttccagagatatactctcttttaaaaaggacaacggatatattaatacaattgcacaaaaagtgtacttcccctgaagatatggaatctgtcttaacaaaaccatatgactctcacaccgatattagagcgtttttgcaagagaaatctaagattttgtacatgaacaatttaccgcccgacacaactcaaagtgagttggaaagttggtttacccaatatggtgttagaccagttgggttttggactgtcaaaaacatcgtagaagatacgtctaacgttaataataactggagtttgaataacagtccctatgtggaagatcaagatagtatcagtggatttgttgtcttccaaacacatgaagaagcaactgaagtattggcgttgaatgggagatctatcctttctaatttggcaaacactaagcaaccaagggtggtggaacatgtccttgagcttcaaccttcttccaccggagtactcgataaggctcaagaaattttatctcctttccctcaaagtaaaaacaaaccaagaccaggtgactggaattgcccatcttgtggtttttccaactttcaaagacgtactgcatgttttagatgttcttttccggcaccatccaatagtcaaatacatactgcgaactccaacaataatgttaacagtagtagaaataatttaaacaatcgcgtgaactctggatcttctagcaatattagtaacactgcagcgaatcacccctatggtgcccctgagttcaacatgattgctaacaacacgccagcagctttaacatacaatagagctcattttcctgcaattacgccattgagcagacaaaattctttgaacatggcaccatctaacagtgggtctccgataattatagcggatcatttttctggaaataataatatagccccaaattatcgttataataataatattaacaataacaacaataatattaacaatatgaccaataatagatataacattaataacaacatcaacggtaatgggaatggtaatgggaacaacagtaataacaataacaatcataataacaatcataataacaatcatcataatggtagtatcaatagtaatagtaataccaataataataataataataacaatggtaacaatagtaataattgtaattccaatatcggtatgggaggatgtggctccaacatgccatttagagcaggagattggaagtgttccacgtgcacgtatcataactttgctaaaaacgtagtgtgcttacgctgtggtggtccaaaatctataagcggcgatgcaagtgaaaccaatcattacatagattcttctacatttggaccagcgtcccgtactcccagtaataacaatatttctgttaatactaatggtggtagcaatgctggtcgcaccgatgggaacgataacaaaggtcgtgatattagtttgatggaatttatgtctccaccgttatctatggcaacaaagtctatgaaggagggagatgggaatggtagctcctttaacgagttcaaaagtgacaaagctaacgttaatttttccaatgttggtgataatagcgctttcggtaatggttttaatagtagtatacgttggtga

SEQ ID NO: 1491 - DNA, 594 bp, Saccharomyces cerevisiae
atggaagcaagacggtatggaccgaatatcattgttacaggaacaccaggatgtggcaagtcgtctacgtgtgagtttttaaaaaataaactgaaggattacaaatactataacatttcggatttcgccaaagataacgactgtttcgaaggatatgatgagggccgtaaatcgcacattgtcgatgaagacaaactgctggacatgctagagcctcttttgagacagggaaatagtattgtcgattggcatgtcaatgatgtgttcccagagaggctgattgacttggtggtggtgttgagatgcgataactctaacttgtattcaagattgcatgcaagaggctatcatgactctaagatcgaggaaaacctcgatgccgagattatgggtgtcgtcaaacaggatgccgtggaatcatacgaaccgcacattgtggtagagctacaaagcgatacgaaagaagatatggtatctaacgtatcccgtattgttgcttgggaaaagatgtggttagaacaacatccagatggagtcacaaatgaatatcaagggcctcgtagcgatgacgaagacgatgaagacagtgagtag

SEQ ID NO: 1492 - DNA, 594 bp, Artificial Sequence
  Description of Artificial Sequence: Synthetic polynucleotide
atggaagcaagaagatatggaccgaatatcattgttacaggaacaccaggatgtggcaagtcttctacgtgtgagtttttaaaaaataaattgaaggattacaaatactataacatttctgatttcgccaaagataacgactgtttcgaaggatatgatgagggccgtaaatctcacattgtcgatgaagacaaattattagacatgttagagcctcttttgagacagggaaatagtattgtcgattggcatgtcaatgatgtgttcccagagaggttgattgacttggtggtggtgttgagatgcgataactctaacttgtattctagattgcatgcaagaggctatcatgactctaagatcgaggaaaacctcgatgccgagattatgggtgtcgtcaaacaggatgccgtggaatcttacgaaccgcacattgtggtagagttacaaagcgatacgaaagaagatatggtatctaacgtatcccgtattgttgcttgggaaaagatgtggttagaacaacatccagatggagtcacaaatgaatatcaagggcctcgtagcgatgacgaagacgatgaagacagtgagtga

SEQ ID NO: 1493 - DNA, 576 bp, Saccharomyces cerevisiae
atggaaaaatttggtttaaaagcgctagtaccgctccttaagctagaggacaaagaactttcaagtacatatgaccattccatgaccttaggagcggacttatcgtcgatgctatattcgttgggtattccaagagattcacaagatcacagagtcctcgatacttttcaatcaccgtgggcagaaacatccagaagcgaagtggagccccgatttttcacaccagaatcattcaccaatattccgggcgtattacaatccactgtaactccaccatgcttcaattccatccaaaatgaccaacagcgtgttgccctttttcaagatgaaactctatttttcctcttctataaacaccctggtacagtcatccaggaactaacgtatttggaactcaggaaaaggaactggagataccacaagacgttgaaggcctggctcaccaaagatcctatgatggaacctattgtatccgctgatggtttaagtgaaaggggatcatatgtgttttttgacccacaaaggtgggaaaagtgccaaagagatttcttattgttttataatgctattatgtaa

SEQ ID NO: 1494 - DNA, 576 bp, Artificial Sequence
  Description of Artificial Sequence: Synthetic polynucleotide
atggaaaaatttggtttaaaagcgttggtaccgctccttaagttggaggacaaagaactttccagtacatatgaccattccatgaccttaggagcggacttatcttctatgctttattctttgggtattccaagagattctcaagatcacagagtcctcgatacttttcaatctccgtgggcagaaacatccagaagcgaagtggagcccaggtttttcacaccagaatctttcaccaatattccgggcgtattacaatccactgtaactccaccatgcttcaattccatccaaaatgaccaacagcgtgttgccctttttcaagatgaaactttatttttcctcttctataaacaccctggtacagtcatccaggaattgacgtatttggaactcaggaaaaggaactggagataccacaagacgttgaaggcctggctcaccaaagatcctatgatggaacctattgtatccgctgatggtttaagtgaaaggggatcctatgtgttttttgacccacaaaggtgggaaaagtgccaaagagatttcttattgttttataatgctattatgtga

SEQ ID NO: 1495 - DNA, 2268 bp, Saccharomyces cerevisiae
atgcgcagattactgaccggttgccttctttcatctgcacgtcccttgaaatcaagattgccattattgatgtcatcctcattaccttcctctgccggtaagaagcctaaacaagccactttggctagattcttcacttccatgaaaaataagccaacagaaggtactccttctcccaaaaaatcatccaaacatatgctggaagatagaatggataatgttagtggggaagaggaatacgcgaccaagaaattgaaacagacggctgttacacatactgtagcagctccaagctccatgggtagcaatttttcttctataccatcatccgctccctcttccggtgttgctgattcaccgcaacaatctcagaggttggtaggtgaagttgaagacgccttgagctcaaataataatgatcactattcgtctaatatcccctattctgaagtttgtgaggtttttaacaagattgaggccatatcttcccgtttagagattataagaatctgttctgatttctttattaagataatgaagcaatcgtctaagaacttaatacctacaacataccttttcatcaatagattgggccctgactacgaagcaggcttggaattaggccttggagaaaatcttcttatgaaaaccataagcgaaacttgcgggaaatccatgagccaaattaaacttaaatacaaggatattggggatttgggtgaaatagcaatgggtgcgagaaatgtccaacccactatgtttaagcccaaacccttgaccgtgggtgaggtcttcaaaaatcttagagctattgctaagactcagggcaaagattcacaattaaaaaagatgaagctgatcaagagaatgcttactgcttgcaaaggtatagaggctaagtttttgattagatccctagagtcaaaattgagaatcggtcttgctgaaaagactgtcttaatatccctatcgaaggctcttttgctccatgatgaaaatagggaggactctccagacaaagatgtccccatggatgtgttagaaagtgctcaacaaaagataagagacgcattttgtcaagtacccaactatgaaattgttataaactcatgcctggaacacggtattatgaatttagataaatattgtactctaagaccaggaattccattgaaacccatgttagccaagcctaccaaggcaattaatgaagtattggatagatttcaaggcgaaacttttacgtcagaatacaaatacgatggtgaaagggctcaggtgcatttactaaatgatggtacaatgaggatttattccagaaatggcgagaatatgactgagagatatccagaaattaacataacggattttatccaggatttggatactaccaaaaatttaattctagactgtgaggctgttgcttgggacaaagatcaggggaaaattttgcctttccaggtcttaagtacaaggaaacgtaaagacgtggagctgaatgatgttaaagttaaagtctgtctctttgcatttgatatactttgctacaacgatgaaaggctgattaataagtcactaaaggaaagaagagaatacttgacgaaggttacaaaagttgtcccgggagaattccaatacgcgactcagataacaacaaataaccttgatgaacttcaaaaattccttgatgagtccgttaatcactcatgcgaaggtttgatggtcaaaatgttggagggccctgaatcccattatgaaccaagtaaaaggtcaagaaactggttgaaattaaaaaaagattacttggagggggttggagattcattggatctctgcgtgttgggggcatattatggtagaggaaaaagaactggtacgtacggtgggttccttctaggatgttacaaccaagacacaggagaatttgaaacttgttgcaagatagggacaggattttcggacgaaatgttgcagcttttgcacgacaggttgaccccgacgatcattgatggaccaaaagccacgtttgttttcgattcgagtgctgagccagatgtatggttcgaacctacgactttgtttgaagttttgactgcagacctttccctatcgcctatttataaagcaggtagtgcaacttttgataaaggcgtatccttaagatttccaagatttttgcgtataagagaagacaagggcgtagaagatgcaacctcttctgaccagatcgtcgaattgtatgaaaaccaatcccacatgcaaaattag

SEQ ID NO: 1496 - DNA, 2268 bp, Artificial Sequence
  Description of Artificial Sequence: Synthetic polynucleotide
atgcgcagattattaaccggttgccttctttcttctgcacgtcccttgaaatctagattgccattattgatgtcttcctctttaccttcctctgccggtaagaagcctaaacaagccactttggctagattcttcacttccatgaaaaataagccaacagaaggtactccttctcccaaaaaatcttccaaacatatgttggaagatagaatggataatgttagtggggaagaggaatacgcgaccaagaaattgaaacagacggctgttacacatactgtagcagctccaagctccatgggtagcaatttttcttctataccatcttccgctccctcttccggtgttgctgattctccgcaacaatctcagaggttggtaggtgaagttgaagacgccttgagcagtaataataatgatcactattcttctaatatcccctattctgaagtttgtgaggtttttaacaagattgaggccatatcttcccgtttagagattataagaatctgttctgatttctttattaagataatgaagcaatcttctaagaacttaatacctacaacataccttttcatcaatagattgggccctgactacgaagcaggcttggaattaggccttggagaaaatcttcttatgaaaaccataagcgaaacttgcgggaaatccatgagccaaattaaacttaaatacaaggatattggggatttgggtgaaatagcaatgggtgcgagaaatgtccaacccactatgtttaagcccaaacccttgaccgtgggtgaggtcttcaaaaatcttagagctattgctaagactcagggcaaagattctcaattaaaaaagatgaagttaatcaagagaatgcttactgcttgcaaaggtatagaggctaagtttttgattagatccttggagagtaaattgagaatcggtcttgctgaaaagactgtcttaatatccttatccaaggctcttttgctccatgatgaaaatagggaggactctccagacaaagatgtccccatggatgtgttagaaagtgctcaacaaaagataagagacgcattttgtcaagtacccaactatgaaattgttataaactcttgcttagaacacggtattatgaatttagataaatattgtactttgagaccaggaattccattgaaacccatgttagccaagcctaccaaggcaattaatgaagtattggatagatttcaaggcgaaacttttacgagtgaatacaaatacgatggtgaaagggctcaggtgcatttattgaatgatggtacaatgaggatttattccagaaatggcgagaatatgactgagagatatccagaaattaacataacggattttatccaggatttggatactaccaaaaatttaattttggactgtgaggctgttgcttgggacaaagatcaggggaaaattttgcctttccaggtcttaagtacaaggaaacgtaaagacgtggagttgaatgatgttaaagttaaagtctgtctctttgcatttgatatactttgctacaacgatgaaaggttgattaataagtctttgaaggaaagaagagaatacttgacgaaggttacaaaagttgtcccgggagaattccaatacgcgactcagataacaacaaataaccttgatgaacttcaaaaattccttgatgagtccgttaatcactcttgcgaaggtttgatggtcaaaatgttggagggccctgaatcccattatgaaccaagtaaaaggagcagaaactggttgaaattaaaaaaagattacttggagggggttggagattctttggatctctgcgtgttgggggcatattatggtagaggaaaaagaactggtacgtacggtgggttccttttgggatgttacaaccaagacacaggagaatttgaaacttgttgcaagatagggacaggattttctgacgaaatgttgcagcttttgcacgacaggttgaccccgacgatcattgatggaccaaaagccacgtttgttttcgattctagtgctgagccagatgtatggttcgaacctacgactttgtttgaagttttgactgcagacctttccttatctcctatttataaagcaggtagtgcaacttttgataaaggcgtatccttaagatttccaagatttttgcgtataagagaagacaagggcgtagaagatgcaacctcttctgaccagatcgtcgaattgtatgaaaaccaatcccacatgcaaaattga

SEQ ID NO: 1497 - DNA, 1365 bp, Saccharomyces cerevisiae
atgtcgaaacaatttgttagatctgcgaagaatttggtgaaagggtactcttctacccaggtcctggtaagaaatgcaacgtcaaacgacaatcatcaagtgtccaaggactcgttaattgagctggctgaaaaatcatatgatagcgcagatttcttcgaaatcatggatatgctggacaaaagacttaacgacaagggcaaatactggaggcatatcgcaaaggcattgacagtaatagattacttgatcaggtttggtagtgagaattgtgttctttggtgtagagaaaatttatacatcatcaagacattgaaggagttcaggcacgaggacgatgagggcatagatcaaggtcaaatcgttagggtcaaagcaaaagaattgactgcattactatctgatgacgaaagactgaacgaggaaaggaacatgaatatcaagggaagaaacaggaaaggaagaagaagaaggggaactgggcgcagtgatgaaaatgacgatgatttgcaaagagccattagtgctagcaggttgacggcggaagaagacgaaagaagaagaaaacaggacgaggattatgaaacagctttgcagttgagcaaagaagaagaggagctaaaaagattgcaagatttacaaagaatgcaacaacagcaaggccaacaacaattgcaacaacctatgtattatgatatttttggtaacccaatcactcctgaggaatacgcacaatttcaattgcaacaacagcaacaacagcaacaacaacagttgcaacaacaaccaatgtactacgatgtattcgggaatcctataacacccgaagaactagcacagtttcaacaacaacaacaactacaggaacaacagtacttagcttctatgcaacagcagcaacaggcaatgtccaacaatccatttgccaaatcagaacagagctcaagttcaccaaaacggaaccaactagtagcagcttcttctccacagcaactgcaacaacaaaaacaacaagagccattgattcaaaacaggacaggcaatcaatcaatgacagacaagtatagtaaactaaacgagctactagccacaggaacaggtattgatacattcggaaatgtaggggaggctcgtattcctgcccaacatacgaagacaggaacattcatcaattctcaaggaacaggatataggcaagtatcggatgatccaaaccacaatccgtttttgaacagtcagtatacaggtttaccaagcactagcgtcgtaccaacacaaacaggctatggctttggtaaccagtctcaacagcagtctcaaaataatggctcaaataaccggggatatactctaattgatttatga

SEQ ID NO: 1498 - DNA, 1365 bp, Artificial Sequence
  Description of Artificial Sequence: Synthetic polynucleotide
atgtccaaacaatttgttagatctgcgaagaatttggtgaaagggtactcttctacccaggtcttggtaagaaatgcaacgtccaacgacaatcatcaagtgtccaaggactctttaattgagttggctgaaaaaagttatgatagcgcagatttcttcgaaatcatggatatgttggacaaaagacttaacgacaagggcaaatactggaggcatatcgcaaaggcattgacagtaatagattacttgatcaggtttggtagtgagaattgtgttctttggtgtagagaaaatttatacatcatcaagacattgaaggagttcaggcacgaggacgatgagggcatagatcaaggtcaaatcgttagggtcaaagcaaaagaattgactgcattattatctgatgacgaaagattgaacgaggaaaggaacatgaatatcaagggaagaaacaggaaaggaagaagaagaaggggaactgggcgcagtgatgaaaatgacgatgatttgcaaagagccattagtgctagcaggttgacggcggaagaagacgaaagaagaagaaaacaggacgaggattatgaaacagctttgcagttgagcaaagaagaagaggagttgaaaagattgcaagatttacaaagaatgcaacaacagcaaggccaacaacaattgcaacaacctatgtattatgatatttttggtaacccaatcactcctgaggaatacgcacaatttcaattgcaacaacagcaacaacagcaacaacaacagttgcaacaacaaccaatgtactacgatgtattcgggaatcctataacacccgaagaattggcacagtttcaacaacaacaacaattgcaggaacaacagtacttagcttctatgcaacagcagcaacaggcaatgtccaacaatccatttgccaaaagtgaacagagcagtagttctccaaaaagaaaccaattggtagcagcttcttctccacagcaattacaacaacaaaaacaacaagagccattgattcaaaacaggacaggcaatcaatctatgacagacaagtatagtaaattgaacgagttattagccacaggaacaggtattgatacattcggaaatgtaggggaggctcgtattcctgcccaacatacgaagacaggaacattcatcaattctcaaggaacaggatataggcaagtatctgatgatccaaaccacaatccgtttttgaacagtcagtatacaggtttaccaagcactagcgtcgtaccaacacaaacaggctatggctttggtaaccagtctcaacagcagtctcaaaataatggcagtaataacagaggatatactttgattgatttatga

SEQ ID NO: 1499 - DNA, 243 bp, Saccharomyces cerevisiae
atgttatctaaagaagcgttaataaaaatcctcagccaaaatgaaggtggtaatgatatgaaaattgccgatgaagtagtaccaatgatacagaaatatttggatatattcattgatgaggcggtgctgcggtccttgcaatctcacaaggacattaacggagaacgtggcgataaaagtcccttagagttatcgcatcaagatttagagcgtatcgtagggcttcttctgatggatatgtaa

SEQ ID NO: 1500 - DNA, 243 bp, Artificial Sequence
  Description of Artificial Sequence: Synthetic polynucleotide
atgttatctaaagaagcgttaataaaaatcctcagccaaaatgaaggtggtaatgatatgaaaattgccgatgaagtagtaccaatgatacagaaatatttggatatattcattgatgaggcggtgttaagatccttgcaatctcacaaggacattaacggagaacgtggcgataaaagtcccttagagttatctcatcaagatttagagcgtatcgtagggcttcttttgatggatatgtga

SEQ ID NO: 1501 - DNA, 1521 bp, Saccharomyces cerevisiae
atgggttccatcaataataacttcaacactaataataacagtaatacggatctcgatcgggactggaaaactgcattgaatattcccaagaaggataccagaccacagacagatgatgtcttaaatacaaagggtaatacttttgaagatttttatttgaaaagagagctgttaatgggtatttttgaagccggttttgaaaaaccatcccctattcaagaagaggctattccggtagcaataactggtagagacatattggccagagcaaagaatggtacaggtaagacagccgcatttgttattcctacgttagagaaagtcaaaccaaagttgaataaaattcaggctttgatcatggttcccacaagagagttagctctgcaaacttcccaagtcgtccgtacattgggaaaacactgtggtatttcatgtatggtgaccactggtggtaccaatttgagagacgatattctaagattaaatgaaacagtccatattttggttggtactcctggtagagtgttggatttagcttcgagaaaagtagcagatctgtctgattgttcattattcatcatggacgaagccgataaaatgttatctcgtgacttcaagacaataattgaacaaatcttatccttcttacctccaactcaccaatctttattatttagcgctactttcccactaacggttaaggaattcatggttaaacatctgcataagccttatgaaattaatttgatggaagaattgactctaaagggtattactcaatactacgcctttgttgaagaaagacaaaagctacattgtttaaatactttattctctaagcttcaaattaatcaagccattattttttgtaattctactaaccgtgtcgaattactagccaagaaaatcactgatttaggctattcctgttattactctcatgcaagaatgaagcaacaagaaagaaataaagttttccacgaatttcgtcaaggtaaggttcgtacattggtctgctccgatttattgacccgtggtatcgatattcaagccgttaatgtcgttatcaatttcgatttccccaaaacggcagaaacatatttacatcgtattggtagatccggtaggtttggccacttgggtttagcaatcaatttgattaactggaatgatcggtttaacctttataaaatcgaacaagaactgggcactgaaattgcggctattccggccactatcgataagtcattgtatgtggctgaaaatgacgaaacggtacctgtcccattcccgatagagcaacagagctatcatcaacaagcgatacctcagcaacaattaccatctcagcaacaatttgctattcctccgcagcaacatcatccacaattcatggttcctccttcgcatcagcaacaacaggcgtatcctccaccgcaaatgccatcgcagcaggggtatcctccacagcaggaacatttcatggcgatgccacctggtcagtcacaaccccagtattaa

SEQ ID NO: 1502 - DNA, 1521 bp, Artificial Sequence
  Description of Artificial Sequence: Synthetic polynucleotide
atgggttccatcaataataacttcaacactaataataacagtaatacggatctcgatagagactggaaaactgcattgaatattcccaagaaggataccagaccacagacagatgatgtcttaaatacaaagggtaatacttttgaagatttttatttgaaaagagagttattaatgggtatttttgaagccggttttgaaaaaccatcccctattcaagaagaggctattccggtagcaataactggtagagacatattggccagagcaaagaatggtacaggtaagacagccgcatttgttattcctacgttagagaaagtcaaaccaaagttgaataaaattcaggctttgatcatggttcccacaagagagttagctttacaaacttcccaagtcgtccgtacattgggaaaacactgtggtattagttgtatggtgaccactggtggtaccaatttgagagacgatattttaagattaaatgaaacagtccatattttggttggtactcctggtagagtgttggatttagcttccagaaaagtagcagatttatctgattgttctttattcatcatggacgaagccgataaaatgttatctcgtgacttcaagacaataattgaacaaatcttatccttcttacctccaactcaccaatctttattatttagcgctactttcccattaacggttaaggaattcatggttaaacatttgcataagccttatgaaattaatttgatggaagaattgactttgaagggtattactcaatactacgcctttgttgaagaaagacaaaagttgcattgtttaaatactttattctctaagcttcaaattaatcaagccattattttttgtaattctactaaccgtgtcgaattattagccaagaaaatcactgatttaggctattcctgttattactctcatgcaagaatgaagcaacaagaaagaaataaagttttccacgaatttcgtcaaggtaaggttcgtacattggtctgctccgatttattgacccgtggtatcgatattcaagccgttaatgtcgttatcaatttcgatttccccaaaacggcagaaacatatttacatcgtattggtagatccggtaggtttggccacttgggtttagcaatcaatttgattaactggaatgatagatttaacctttataaaatcgaacaagaattaggcactgaaattgcggctattccggccactatcgataagtctttgtatgtggctgaaaatgacgaaacggtacctgtcccattcccgatagagcaacagagctatcatcaacaagcgatacctcagcaacaattaccatctcagcaacaatttgctattcctccgcagcaacatcatccacaattcatggttcctccttctcatcagcaacaacaggcgtatcctccaccgcaaatgccatctcagcaggggtatcctccacagcaggaacatttcatggcgatgccacctggtcagtctcaaccccagtattga

SEQ ID NO: 1503 - DNA, 132 bp, Saccharomyces cerevisiae
atgtacaatcagataataaacacttttattgatgattgtcttttcttgcaaaccccaatgttacaatcgcccattagttctaagattgtgttgtcctttttcttacgaaatttttttccctcccttttttga

SEQ ID NO: 1504 - DNA, 132 bp, Artificial Sequence
  Description of Artificial Sequence: Synthetic polynucleotide
atgtacaatcagataataaacacttttattgatgattgtcttttcttgcaaaccccaatgttacaatctcccattagttctaagattgtgttgtcctttttcttaagaaatttttttccctcccttttttga

SEQ ID NO: 1505 - DNA, 1548 bp, Saccharomyces cerevisiae
atgtttcaacgaaagactttacagagaaggaacttgaaagggctcaatcttaacctgcacccagatgtgggcaataatggccaattgcaggaaaagacagagactcaccagggacaatctcgaatagaaggccacgtgatgtctaacattaatgcaatacagaataatagcaacctgtttttgcgaagaggcataaaaaaaaaactgacgttggatgcgtttggtgatgaccaagctatatcgaaaccaaacactgtggtaatacagcaaccgcaaaatgaacctgttttagttctgtcttctctatcacaatccccgtgtgtatcatcatcatcatctttgtccacgccatgcattatagatgcgtacagtaataatttcggattatcgccatcatccacgaattctactccctctacgattcagggattgtccaatattgcaacaccagttgaaaacgaacattcgatatcactaccacctttggaggaaagcctatcgccagccgcagcagatctgaaagatacgttgtcgggaacttcaaatggtaattatatacaactccaggacttggttcagttggggaaaattggtgctggaaattctggaactgtggtgaaggcactacatgttcctgattccaaaatagttgccaaaaaaaccattcctgtggaacagaataacagtacaatcatcaaccaattagttagggaattatctatcgtcaaaaacgttaagccccatgaaaacattatcaccttctatggagcttattataaccagcatataaataatgaaatcataattttaatggaatactctgattgtggttctttagataaaatactgtccgtttataaaaggtttgttcaaagagggactgtttcgagtaagaaaacctggttcaacgaattaacaatatcaaaaatagcgtatggcgtactaaatggcttggatcatttgtaccgacaatataagatcattcatcgtgatatcaagccttccaatgttctgattaatagtaaggggcagattaagttatgtgattttggagtttccaaaaaactaataaattctatcgctgatacatttgttggaacgtccacttatatgtcaccagagaggatacaaggaaacgtttattctatcaaaggggacgtttggtcattgggcttaatgatcatcgagctggtaactggagagtttcccctaggtgggcataacgatacacctgatggcatattggatttgctgcaacgtattgtcaacgagccttcaccaagattacccaaagaccgtatctattccaaggaaatgacagattttgtcaataggtgttgtattaagaatgaaagggaaaggtcatcgattcatgaattgctacatcatgatcttataatgaaatacgtatcaccgtctaaagatgataaatttagacattggtgtagaaaaataaaatctaaaataaaggaagacaagagaattaaaagagaagccttggaccgtgccaagttagaaaagaaacaatcggaaagatcaacccattga

SEQ ID NO: 1506 - DNA, 1548 bp, Artificial Sequence
  Description of Artificial Sequence: Synthetic polynucleotide
atgtttcaaagaaagactttacagagaaggaacttgaaagggctcaatcttaacttgcacccagatgtgggcaataatggccaattgcaggaaaagacagagactcaccagggacaatctagaatagaaggccacgtgatgtctaacattaatgcaatacagaataatagcaacttgtttttgagaagaggcataaaaaaaaaattaacgttggatgcgtttggtgatgaccaagctatatccaaaccaaacactgtggtaatacagcaaccgcaaaatgaacctgttttagttttatcttctttatctcaatccccgtgtgtatcttcttcttcttctttgtccacgccatgcattatagatgcgtacagtaataatttcggattatctccatcttccacgaattctactccctctacgattcagggattgtccaatattgcaacaccagttgaaaacgaacattccatatctttaccacctttggaggaaagcttatctccagccgcagcagatttgaaagatacgttgagtggaacttccaatggtaattatatacaactccaggacttggttcagttggggaaaattggtgctggaaattctggaactgtggtgaaggcattgcatgttcctgattccaaaatagttgccaaaaaaaccattcctgtggaacagaataacagtacaatcatcaaccaattagttagggaattatctatcgtcaaaaacgttaagccccatgaaaacattatcaccttctatggagcttattataaccagcatataaataatgaaatcataattttaatggaatactctgattgtggttctttagataaaatattatccgtttataaaaggtttgttcaaagagggactgtttctagtaagaaaacctggttcaacgaattaacaatatccaaaatagcgtatggcgtattgaatggcttggatcatttgtacagacaatataagatcattcatcgtgatatcaagccttccaatgttttgattaatagtaaggggcagattaagttatgtgattttggagtttccaaaaaattgataaattctatcgctgatacatttgttggaacgtccacttatatgtctccagagaggatacaaggaaacgtttattctatcaaaggggacgtttggtctttgggcttaatgatcatcgagttggtaactggagagtttcccttaggtgggcataacgatacacctgatggcatattggatttgttgcaacgtattgtcaacgagccttctccaagattacccaaagaccgtatctattccaaggaaatgacagattttgtcaataggtgttgtattaagaatgaaagggaaaggtccagtattcatgaattgttgcatcatgatcttataatgaaatacgtatccccgtctaaagatgataaatttagacattggtgtagaaaaataaaatctaaaataaaggaagacaagagaattaaaagagaagccttggaccgtgccaagttagaaaagaaacaaagtgaaagatctacccattga

SEQ ID NO: 1507 - DNA, 357 bp, Saccharomyces cerevisiae
atgagtaatattttggcagtgttcaaccctccaccacaaagggagctggaaaaagaagagactatggattgcgttccttgtcaagtcatgagcactatgttttctgttggatttggctcatacttggcatctgggaaaccattcaagtatggtaaaaaagaagccaaaagaggcatttctctgactgaatttgaaaaaagaaacccacaatggtggaaagtaactttacgtagcttcggtgggttattaatcgccttcggtttcgttagaggaaccgaaggttggttgtggcataaaaataaagaatataagaactataagaaattaagtaacgatggtgaaacacaggctaactag

SEQ ID NO: 1508 - DNA, 357 bp, Artificial Sequence
  Description of Artificial Sequence: Synthetic polynucleotide
atgagtaatattttggcagtgttcaaccctccaccacaaagggagttagaaaaagaagagactatggattgcgttccttgtcaagtcatgagcactatgttttctgttggatttggctcttacttggcatctgggaaaccattcaagtatggtaaaaaagaagccaaaagaggcatttctttgactgaatttgaaaaaagaaacccacaatggtggaaagtaactttacgtagcttcggtgggttattaatcgccttcggtttcgttagaggaaccgaaggttggttgtggcataaaaataaagaatataagaactataagaaattaagtaacgatggtgaaacacaggctaactga

SEQ ID NO: 1509 - DNA, 1569 bp, Saccharomyces cerevisiae
atgccggaattaacagaatttcagaaaaaacgtttagagaacatcaaaaggaataacgatttattgaaaaaactccatttgtctggagtagcatctcaaattaagcacgaggctggggtgttggaaaaatctagagctcctgcaaaaaagaaacaaaaaacaactaataccagagcaaccaagtctgcgagtcccactttacctacacgaagatcaagaaggctaaggggtgagtctgcagacgatgtgaaaggaatacccaatgtgaacgataatcagttgcttaaaatgggttctccagatggccaggataagaattttatagacgcaataaaggagaaacctgtaataggagatgtgaaattaagtgatctgatcaaggatgaagacgaaagtgcccttttagagaaattcaagaggtttaataacggaaacttttcttctggtgatttctttgaagaaataaaaaagagacagggtgacgttacggggatggacgaatttgatttggatctatatgacgtttttcaaccgaacgaaattaagattacatacgaaagaatctctgccacttacttccatcctgctatggaaaaaaagctaataattgcaggtgatacaagcggtactgtgggtttttggaacgttagagatgaaccactagctgacagcgaagaggaccgaatggaagaacccgatatcaccagagtgaaactatttaccaaaaacgtcggccgtattgattgcttccctgcggacacatcgaagatattgctcacctcttacgacggaagcatcaggtcagttcacttgaataacttacagagtgaagaggttctcaccttgaaaaatgaatatgacgattcactgggtatcagcgattgccagtttagctacgaaaacccaaatgttttattcctcaccacattaggtggtgaattcaccacgtttgacacaagagtaaaaaaatcagagtataatctgcgaagactcgcagacaagaagatcgggtctatggcaataaatcccatgagaccctacgagattgccaccggatcacttgatagaacactcaaaatctgggatacaagaaaccttgttaaaaagccagagtggtcacaatatgaagactatcccagtcatgaaattgtctccacatatgactcaagattgagcgtctctgcagtttcttactcaccgacagatggcaccttagtgtgcaatggctatgacgataccatccgcttattcgatgtcaagagtagggatcacctttctgcgaagttggagcccaaactaacgattcagcacaattgccaaacaggaagatggacaagcatcctcaaggccaggttcaagccgaacaagaatgtttttgcaatagctaacatgaagcgcgccatcgacatatacaacagcgaaggccagcaactggctcacctacccacagctactgtcccagctgtaattagttggcacccgctgcgaaactggattgcaggtggtaattctagcggcaaaatattcctctttactgatgactccggaaccataaagcaggaagaatga

SEQ ID NO: 1510 - DNA, 1569 bp, Artificial Sequence
  Description of Artificial Sequence: Synthetic polynucleotide
atgccggaattaacagaatttcagaaaaaacgtttagagaacatcaaaaggaataacgatttattgaaaaaactccatttgtctggagtagcatctcaaattaagcacgaggctggggtgttggaaaaatctagagctcctgcaaaaaagaaacaaaaaacaactaataccagagcaaccaagtctgcgagtcccactttacctacaagaagatctagaaggttgaggggtgagtctgcagacgatgtgaaaggaatacccaatgtgaacgataatcagttgcttaaaatgggttctccagatggccaggataagaattttatagacgcaataaaggagaaacctgtaataggagatgtgaaattaagtgatttgatcaaggatgaagacgaaagtgcccttttagagaaattcaagaggtttaataacggaaacttttcttctggtgatttctttgaagaaataaaaaagagacagggtgacgttacggggatggacgaatttgatttggatttatatgacgtttttcaaccgaacgaaattaagattacatacgaaagaatctctgccacttacttccatcctgctatggaaaaaaagttaataattgcaggtgatacaagcggtactgtgggtttttggaacgttagagatgaaccattggctgacagcgaagaggacagaatggaagaacccgatatcaccagagtgaaattatttaccaaaaacgtcggccgtattgattgcttccctgcggacacatccaagatattgctcacctcttacgacggaagcatcaggtctgttcacttgaataacttacagagtgaagaggttctcaccttgaaaaatgaatatgacgattctttgggtatcagcgattgccagtttagctacgaaaacccaaatgttttattcctcaccacattaggtggtgaattcaccacgtttgacacaagagtaaaaaaaagtgagtataatttaagaagactcgcagacaagaagatcgggtctatggcaataaatcccatgagaccctacgagattgccaccggatctcttgatagaacactcaaaatctgggatacaagaaaccttgttaaaaagccagagtggtctcaatatgaagactatcccagtcatgaaattgtctccacatatgacagtagattgagcgtctctgcagtttcttactctccgacagatggcaccttagtgtgcaatggctatgacgataccatccgcttattcgatgtcaagagtagggatcacctttctgcgaagttggagcccaaattaacgattcagcacaattgccaaacaggaagatggacaagcatcctcaaggccaggttcaagccgaacaagaatgtttttgcaatagctaacatgaagcgcgccatcgacatatacaacagcgaaggccagcaattggctcacttacccacagctactgtcccagctgtaattagttggcacccgcttagaaactggattgcaggtggtaattctagcggcaaaatattcctctttactgatgactccggaaccataaagcaggaagaatga

SEQ ID NO: 1511 - DNA, 1284 bp, Saccharomyces cerevisiae
atgcatcataactcacagtctttgagctctggacacatcaggagccccgaggatgaaaatgtggcacctataggtaatcttaaacacaggactggatccctcagtcatatttcatctgcgcacccgagggtcgcacttagcgacgttaccaatatagttgcgacaaactctagcaacaacagcataagtaagccaaaagtcgccccaattaaagaaagattggattcagctgcgataattgaggaagaaaggctggatgcgaatagtgttgcacagagaaaagaagctgatcataacgatttgttaacggacagggaacaagaggaacccgttgaagacgacggagaaagcgaagaggatgaagaagaagaccaggagcctctactgttgcaacattatgctagtgatacattggtctgggagcatgcatttagaacttactatagaactacattagatcccaatgatgatgacgtgtacgatgtggtcatggttgccgaattatctaatgagatattcgagtatatgaggaaattggaagacctgtataaacccaacccgtactacatggataaacaaccagagttaagatggtcgtttcgaagcacactgattgattggatcgtccaagtacatgaaaaatttcaacttttacctgaaactctatatctctgcattaatataatagacagatatctgtgcaaagaagttgttcctgtaaataagttccaacttgtgggtgcagcctcactcttcattgctgctaaatatgaggaaatcaactgtcctacaatcaaggatttcgtatacatgtcagaaaactgctactcaaggaacgacctgctggacgcagaaagaactattttgaacggcttagaatttgaattgggttggcctggtccgatgtcatttttacgaagaatcagtaaggcagacgattacgagcatgatacgagaacactggccaaatatctattggaatccacaataatggaccatcgactggtttccgctcaacctagttggttagctgccggtgcatactttctaagtaagattattctgggccaaaatcagtggtctctggcgcacgtctactattccaattatacacaagaacaaattcttccgttggccaccattattttagaaaattgcagatatgcctctaaacgtcataacgccatatggagaaaatattcttcacgtcgttatttgcattcttcacagatcgtagcgaagtggatagcattagctgaacacagagtagaaagatctaactaa

SEQ ID NO: 1512 - DNA, 1284 bp, Artificial Sequence
  Description of Artificial Sequence: Synthetic polynucleotide
atgcatcataactctcagtctttgagctctggacacatcaggagccccgaggatgaaaatgtggcacctataggtaatcttaaacacaggactggatccctcagtcatatttcttctgcgcacccgagggtcgcacttagcgacgttaccaatatagttgcgacaaactctagcaacaacagcataagtaagccaaaagtcgccccaattaaagaaagattggattctgctgcgataattgaggaagaaaggttagatgcgaatagtgttgcacagagaaaagaagctgatcataacgatttgttaacggacagggaacaagaggaacccgttgaagacgacggagaaagcgaagaggatgaagaagaagaccaggagcctttattattgcaacattatgctagtgatacattggtctgggagcatgcatttagaacttactatagaactacattagatcccaatgatgatgacgtgtacgatgtggtcatggttgccgaattatctaatgagatattcgagtatatgaggaaattggaagacctttataaacccaacccgtactacatggataaacaaccagagttaagatggtcttttagaagcacattaattgattggatcgtccaagtacatgaaaaatttcaacttttacctgaaactttatatctctgcattaatataatagacagatatttgtgcaaagaagttgttcctgtaaataagttccaacttgtgggtgcagccagcctcttcattgctgctaaatatgaggaaatcaactgtcctacaatcaaggatttcgtatacatgtctgaaaactgctactctaggaacgacttattagacgcagaaagaactattttgaacggcttagaatttgaattgggttggcctggtccgatgagttttttaagaagaatcagtaaggcagacgattacgagcatgatacgagaacattggccaaatatcttttggaatccacaataatggaccatcgtttagtttccgctcaacctagttggttagctgccggtgcatactttttgagtaagattattttgggccaaaatcagtggtctttagcgcacgtctactattccaattatacacaagaacaaattcttccgttggccaccattattttagaaaattgcagatatgcctctaaacgtcataacgccatatggagaaaatattcttctcgtcgttatttgcattcttctcagatcgtagcgaagtggatagcattagctgaacacagagtagaaagatctaactga

SEQ ID NO: 1513 - DNA, 2706 bp, Saccharomyces cerevisiae
atgtcccatgaatggctcataagcgcatcggaaacaatgagaagcattggtaatggggaaggtttgcgggataaaggtgctgtcgttgccaacaatgacggagaatttaacgaaggtgatacaaatcgtgaagaggatagctctaccattttctccttcgattttgacgaggagattgtaatgtgtattgacttttctggaggaaaactcgggtgttctattttagattatcataccaagactttgaaagcgtttgaccaggactacgtggtcaataaaacaacaatttcgtctcatgatcttatcgatgatgcagatatgtcttcaaacgacataagtctgttacttggacttttaataatggaagcaaacccaactgtatgcctagtgccggcaagattggaggattggattttcgactacattaagacaaaatgcgatgagataaactgtaggctagaactacaaccaataaaacgtttcaaaaaatgggacttattgcagtcattgcagttaaggggtcatgataatcagactatattgaacgacatattatcaaatagcaaatttaccaccacagtcaccttaggtacagtgggatgcatccttgcaaatcatgaacaacttggtgaatacaatgacagtactgcttcaagtaatatggtaacaggacgattagttcagaatgcttttgaagatgtgatacatggcataaggtatatcgacataagggatcggatggtactggatgaaaatactatatcggctttgcatatttttccaacagctcataaactgggccatgataagatgatgagaaatggtttctttagtgtatttgaactattcaatcaagtgtcttcggactacgccaggagaattttgaagtcttggcttattaacccattaaccaataaaaaacggatagaaacaagatacagcatcataagaaccttattggataaacaaaacgccatcatttttagtgaccttagccaatcaataaaaagatgtccagacgcttttgggtttataaatcagttaagaagtggtaaatcgacattagggacatggtccaaggttgcaagttttttagaaaaaggaatagctatatttcaactggtgtcgtccttgaaattaggttcagacgaagccaacattttacatgatatcaaaaataaggttgatatatcagctttaaaggaatgtttgagaaaagtagaaacggtaatagattttgacacatcaagagataccaagacgctcacgataaatacgggggttgacaacagattagacgaatgcagaaatatttataatcatttggaagggatcttactggatgtcgcaagagaaactcaaatttttttactgaatactatgcctcaagaagattgtaagacaacaaagagtttagaaaagttagtgaatgctgtttatattccccaattaggatacttagtaaccattagcgtcttaatggaacctttattggatggcattccaaaccttcaatgggaagagatctttaggagttcagaaaatatatacttcaaaaatggcagggttcttgagctggatgaaacatacggcgatatttatggcgcgatttcagattttgaaattgaaatcctgttttccttacaagaacaaattctgagaagaaagactcaactcactgcttacaatatactgcttagtgaactggaaatattattatcgttcgctcaagtgtctgctgaaaggaattatgcagagcctcaattggtggaagatgagtgcatattggaaattattaacggaagacatgctttgtatgaaacattccttgataattatatccccaatagcacaatgattgatggcgggctattttctgaattaagttggtgtgaacaaaataaaggaagaatcattgtagtcactggcgctaatgcatctggaaagtctgtatatcttacacagaatggtttaattgtgtacttggcacaaattggttgttttgttccagcagagagagcgagaattggaatagcggataaaatattaactagaatcaggactcaagaaactgtttataagactcaaagttcctttttgctagattctcaacaaatggcaaaatcactgagtttggccactgaaaaaagtctcattttaattgatgaatacggcaaaggtactgatattttagatggaccttcactatttggttccataatgctcaatatgtccaagagtgaaaaatgtccacgcataatcgcatgtacacactttcatgaactatttaacgaaaatgtactcacagagaatataaaaggtatcaaacattactgcactgatatacttatcagccaaaaatataatcttttagaaacagcacatgtcggagaagatcatgaaagtgagggaatcacattcctattcaaagtaaaggaggggatctcaaagcagtcatttggcatatattgcgcaaaagtatgtggtttgagcagagatattgtggaaagggctgaagaactatctcgcatgattaatagaggcgatgacgtagttcagcaatgtggaaatctgaccgaaaaggagatgagagaattccaaaagaatcaggaaatagtgaaaaagtttttatcttgggatttggatctcgaaactacaacaacttccgagaatctcaggcttaaattgaaaaatttccttcgctaa

SEQ ID NO: 1514 - DNA, 2706 bp, Artificial Sequence
  Description of Artificial Sequence: Synthetic polynucleotide
atgtcccatgaatggctcataagcgcatctgaaacaatgagaagcattggtaatggggaaggtttgagagataaaggtgctgtcgttgccaacaatgacggagaatttaacgaaggtgatacaaatcgtgaagaggatagctctaccattttctccttcgattttgacgaggagattgtaatgtgtattgacttttctggaggaaaactcgggtgttctattttagattatcataccaagactttgaaagcgtttgaccaggactacgtggtcaataaaacaacaatttcttctcatgatcttatcgatgatgcagatatgtcttccaacgacataagtttgttacttggacttttaataatggaagcaaacccaactgtatgccttgtgccggcaagattggaggattggattttcgactacattaagacaaaatgcgatgagataaactgtaggttagaattacaaccaataaaacgtttcaaaaaatgggacttattgcagtctttgcagttaaggggtcatgataatcagactatattgaacgacatattatccaatagcaaatttaccaccacagtcaccttaggtacagtgggatgcatccttgcaaatcatgaacaacttggtgaatacaatgacagtactgcttccagtaatatggtaacaggaagattagttcagaatgcttttgaagatgtgatacatggcataaggtatatcgacataagggatagaatggtattggatgaaaatactatatctgctttgcatatttttccaacagctcataaattgggccatgataagatgatgagaaatggtttctttagtgtatttgaattattcaatcaagtgtcttctgactacgccaggagaattttgaagtcttggcttattaacccattaaccaataaaaaaagaatagaaacaagatacagcatcataagaaccttattggataaacaaaacgccatcatttttagtgaccttagccaaagtataaaaagatgtccagacgcttttgggtttataaatcagttaagaagtggtaaatctacattagggacatggtccaaggttgcaagttttttagaaaaaggaatagctatatttcaattagtgtcttccttgaaattaggttctgacgaagccaacattttacatgatatcaaaaataaggttgatatatctgctttaaaggaatgtttgagaaaagtagaaacggtaatagattttgacacatctagagataccaagacgctcacgataaatacgggggttgacaacagattagacgaatgcagaaatatttataatcatttggaagggatcttattagatgtcgcaagagaaactcaaatttttttattgaatactatgcctcaagaagattgtaagacaacaaagagtttagaaaagttagtgaatgctgtttatattccccaattaggatacttagtaaccattagcgtcttaatggaacctttattggatggcattccaaaccttcaatgggaagagatctttaggagttctgaaaatatatacttcaaaaatggcagggttcttgagttagatgaaacatacggcgatatttatggcgcgatttctgattttgaaattgaaatcttattttccttacaagaacaaattttaagaagaaagactcaactcactgcttacaatatattacttagtgaattggaaatattattatctttcgctcaagtgtctgctgaaaggaattatgcagagcctcaattggtggaagatgagtgcatattggaaattattaacggaagacatgctttgtatgaaacattccttgataattatatccccaatagcacaatgattgatggcgggttgttttctgaattaagttggtgtgaacaaaataaaggaagaatcattgtagtcactggcgctaatgcatctggaaagtctgtatatcttacacagaatggtttaattgtgtacttggcacaaattggttgttttgttccagcagagagagcgagaattggaatagcggataaaatattaactagaatcaggactcaagaaactgtttataagactcaaagttcctttttgttggattctcaacaaatggcaaaatctttgagtttggccactgaaaaaagtctcattttaattgatgaatacggcaaaggtactgatattttagatggaccttctttatttggttccataatgctcaatatgtccaagagtgaaaaatgtccacgcataatcgcatgtacacactttcatgaattatttaacgaaaatgtactcacagagaatataaaaggtatcaaacattactgcactgatatacttatcagccaaaaatataatcttttagaaacagcacatgtcggagaagatcatgaaagtgagggaatcacattccttttcaaagtaaaggaggggatctccaagcagtcttttggcatatattgcgcaaaagtatgtggtttgagcagagatattgtggaaagggctgaagaattatctcgcatgattaatagaggcgatgacgtagttcagcaatgtggaaatttgaccgaaaaggagatgagagaattccaaaagaatcaggaaatagtgaaaaagtttttatcttgggatttggatctcgaaactacaacaacttccgagaatctcaggcttaaattgaaaaatttccttcgctga

SEQ ID NO: 1515 - DNA, 1833 bp, Saccharomyces cerevisiae
atggtacgcaaaggctcaaacagaactaagacctctgaagttggggatgagattaatccgtatggtttaaacgaagttgatgattttgcttctaaaagggaaaaggttttacttggacaatccacctttggcgacagtaataaagatgatgaccattctctgttagaagacgaagatgaggaagaagtcttagccatggatgaagatgatgagtcaatagatgaaagagaagatgaggaagaagaagaggaagaggaactagatggtgctgcagcctataagaaaatatttggtagaaacttagaaactgaccagcttcctgaggaagatgaagagaatggtatgttagacaacgagaatgcctgggggtccacaaaaggagaatattatggggctgatgatttagatgatgacgaagctgctaaggaaatagaaaaggaagctttacgacaacaaaagaagcatctggaagaacttaatatgaacgattacttagatgaagaagaagaagaagagtgggtcaaaagtgccaaagaatttgacatgggtgaatttaagaactcgaccaagcaggctgatactaaaacttccataacggatattctaaatatggatgacgaagcaagggataactatttaaggacaatgtttcctgaatttgctccactttcaaaagaattcacagaattagctccaaagtttgacgaattaaagaaatctgaggaaaatgagttcaataaattaaagctaattgcacttggaagttacctaggcacaatatcatgttactatagtatcttgttgcacgaactccataataatgaagatttcacatctatgaagggacatccggtcatggaaaagattttaacgacaaaagagatttggaggcaagccagcgaattgccatctagttttgatgtgaatgaaggagatggttctgaaagtgaagaaaccgcaaacattgaggcctttaacgaaaagaagctgaatgagttgcaaaacagtgaagattctgatgcagaggatggaggaaaacaaaagcaagaaattgatgaagaagaaagagaaagcgatgaagaagaagaagaagaagatgttgatattgacgattttgaagagtacgtagcacaatcacgtctgcattctaaaccgaaaacatcatcaatgcctgaagctgatgatttcattgaatctgagattgctgatgtggacgcacaagacaaaaaagctcgtagaagaactttgcgtttctatacttcgaaaattgatcaacaagaaaataaaaagacggatagattcaaaggtgatgatgatattccatataaggaacgtttatttgaaaggcagcaacgtctgttggatgaagctcgtaaacgtggtatgcatgataataatggtgctgacctagacgataaggattacggttctgaagatgaagctgtgtctaggagcatcaacactcaaggcgagaacgattattatcaacaggttcagagaggtaaacaagacaagaaaatatctcgtaaagaggctcataagaatgctgttattgctgcaagggaaggaaaattggcggaattggctgaaaatgtctcaggtgatggtaagcgtgccattaattatcaaattttaaagaacaagggtctaacgcctaaaagaaacaaggataacagaaactctcgtgtcaagaagagaaagaaataccaaaaggcacaaaagaaactcaagtcggttcgtgcagtttattctggtggtcaatctggcgtctatgaaggtgaaaagacaggtatcaagaagggtttgacgaggtctgttaaattcaagaattaa

SEQ ID NO: 1516 - DNA, 1833 bp, Artificial Sequence
  Description of Artificial Sequence: Synthetic polynucleotide
atggtacgcaaaggctctaacagaactaagacctctgaagttggggatgagattaatccgtatggtttaaacgaagttgatgattttgcttctaaaagggaaaaggttttacttggacaatccacctttggcgacagtaataaagatgatgaccattctttattagaagacgaagatgaggaagaagtcttagccatggatgaagatgatgagagtatagatgaaagagaagatgaggaagaagaagaggaagaggaattagatggtgctgcagcctataagaaaatatttggtagaaacttagaaactgaccagcttcctgaggaagatgaagagaatggtatgttagacaacgagaatgcctgggggtccacaaaaggagaatattatggggctgatgatttagatgatgacgaagctgctaaggaaatagaaaaggaagctttaagacaacaaaagaagcatttggaagaacttaatatgaacgattacttagatgaagaagaagaagaagagtgggtcaaaagtgccaaagaatttgacatgggtgaatttaagaactctaccaagcaggctgatactaaaacttccataacggatattttgaatatggatgacgaagcaagggataactatttaaggacaatgtttcctgaatttgctccactttctaaagaattcacagaattagctccaaagtttgacgaattaaagaaatctgaggaaaatgagttcaataaattaaagttgattgcacttggaagttacttgggcacaatatcttgttactatagtatcttgttgcacgaactccataataatgaagatttcacatctatgaagggacatccggtcatggaaaagattttaacgacaaaagagatttggaggcaagccagcgaattgccatctagttttgatgtgaatgaaggagatggttctgaaagtgaagaaaccgcaaacattgaggcctttaacgaaaagaagttgaatgagttgcaaaacagtgaagattctgatgcagaggatggaggaaaacaaaagcaagaaattgatgaagaagaaagagaaagcgatgaagaagaagaagaagaagatgttgatattgacgattttgaagagtacgtagcacaatcccgtttgcattctaaaccgaaaacatcttctatgcctgaagctgatgatttcattgaatctgagattgctgatgtggacgcacaagacaaaaaagctcgtagaagaactttgcgtttctatacttctaaaattgatcaacaagaaaataaaaagacggatagattcaaaggtgatgatgatattccatataaggaacgtttatttgaaaggcagcaacgtttattggatgaagctcgtaaacgtggtatgcatgataataatggtgctgacttggacgataaggattacggttctgaagatgaagctgtgtctaggagcatcaacactcaaggcgagaacgattattatcaacaggttcagagaggtaaacaagacaagaaaatatctcgtaaagaggctcataagaatgctgttattgctgcaagggaaggaaaattggcggaattggctgaaaatgtctctggtgatggtaagcgtgccattaattatcaaattttaaagaacaagggtttaacgcctaaaagaaacaaggataacagaaactctcgtgtcaagaagagaaagaaataccaaaaggcacaaaagaaactcaagtctgttcgtgcagtttattctggtggtcaatctggcgtctatgaaggtgaaaagacaggtatcaagaagggtttgacgaggtctgttaaattcaagaattga

SEQ ID NO: 1517 - DNA, 1269 bp, Saccharomyces cerevisiae
atgagcagtaataaaggaaatgggcgcttgccatcattaaaagattcctcctccaatggaggaggatctgccaagccctcattaaagtttaaaccaaaagcagttgcaagaaagtccaaggaagaaagagaagcagctgcgtccaaagtaaagctagaggaggaatctaagagaggtaatgacaagaaacatttcaataacaagaataaaagagtaaccggcgctggcggccagcaaaggcgaatggccaaatacttaaataacacacacgttatctctagcggtccattggcggctgggaactttgtaagtgagaagggtgatttgagaagaggattcatcaaatcagaaggaagcgggtcatctcttgtgcaaaagggcctggaaactattgacaatggtgctgagagctctgagaatgaggcagaagacgatgataatgaaggtgtagcgtccaaatctaagaagaagttcaatatgggaaaagaattcgaggcacgcaatctcatagaggacgaagatgacggcgaaagtgaaaagagcagtgacgtcgacatggatgacgaagaatggagatctaaacggattgaacagttattccctgtgagacctgtccgcgtaagacacgaagacgttgaaactgtcaaaagagaaatacaagaagctctttcagaaaagccaactcgtgaaccaacccccagtgtgaagacagagcctgtcggaaccggattacaatcttatttggaagaaagagaaaggcaagtcaatgagaaactggcagatcttggacttgaaaaggagtttcaatcggttgatgggaaagaagcggccgctgagttggaattattaaatgcagatcatcagcatatattacgaaaactaaagaaaatgaataataaaccagaaagattcatggtattccagttacctactaggttaccagcttttgaaagacccgctgtgaaagaagaaaaagaagacatggaaacccaggctagcgacccttcaaagaagaagaagaatattaaaaagaaggacacgaaggatgctttgtctactagagaacttgccggcaaggttgggtctatacgggttcacaaatctggaaaactttccgtgaaaattggaaatgtggtgatggatattggcaaaggtgccgaaaccacatttttacaagatgttatagcattaagtatcgctgatgatgcatcctcagcggaacttctaggccgtgtggacggtaaaatagtagtcacacctcaaatctaa

SEQ ID NO: 1518 - DNA, 1269 bp, Artificial Sequence
  Description of Artificial Sequence: Synthetic polynucleotide
atgagcagtaataaaggaaatgggcgcttgccatctttaaaagattcctcctccaatggaggaggatctgccaagccctctttaaagtttaaaccaaaagcagttgcaagaaagtccaaggaagaaagagaagcagctgcgtccaaagtaaagttggaggaggaatctaagagaggtaatgacaagaaacatttcaataacaagaataaaagagtaaccggcgctggcggccagcaaaggagaatggccaaatacttaaataacacacacgttatctctagcggtccattggcggctgggaactttgtaagtgagaagggtgatttgagaagaggattcatcaaaagtgaaggaagcgggagttctcttgtgcaaaagggccttgaaactattgacaatggtgctgagagctctgagaatgaggcagaagacgatgataatgaaggtgtagcgtccaaatctaagaagaagttcaatatgggaaaagaattcgaggcacgcaatctcatagaggacgaagatgacggcgaaagtgaaaagagcagtgacgtcgacatggatgacgaagaatggagatctaaaagaattgaacagttattccctgtgagacctgtccgcgtaagacacgaagacgttgaaactgtcaaaagagaaatacaagaagctctttctgaaaagccaactcgtgaaccaacccccagtgtgaagacagagcctgtcggaaccggattacaatcttatttggaagaaagagaaaggcaagtcaatgagaaattggcagatcttggacttgaaaaggagtttcaatctgttgatgggaaagaagcggccgctgagttggaattattaaatgcagatcatcagcatatattaagaaaattgaagaaaatgaataataaaccagaaagattcatggtattccagttacctactaggttaccagcttttgaaagacccgctgtgaaagaagaaaaagaagacatggaaacccaggctagcgacccttctaagaagaagaagaatattaaaaagaaggacacgaaggatgctttgtctactagagaacttgccggcaaggttgggtctataagagttcacaaatctggaaaactttccgtgaaaattggaaatgtggtgatggatattggcaaaggtgccgaaaccacatttttacaagatgttatagcattaagtatcgctgatgatgcatcctctgcggaacttttgggccgtgtggacggtaaaatagtagtcacacctcaaatctga

SEQ ID NO: 1519 - DNA, 2994 bp, Saccharomyces cerevisiae
atggagagagatgaataccagttacccaactctcatgggaagaatactttcttatcgcgaatatttggtttacaatcggatgaagttaatccttctcttaatagccaggagatgagcaacttccctttaccagacatagagagaggctcatctttattgcattctactaacgacagccgcgaagatgtagatgagaatgacttacgtgttcctgagtctgaccaaggcactagtacagaagaagaggatgaagtagatgaagagcaagtccaggcgtatgctccacagattagtgatggattggatggagaccaccagctaaattctgtaacgagcaaagaaaatgtacttgaaacggaaaaaagcaatttagaaagactggttgaaggctctaccgatgattctgtgcccaaagtcggacagctttcgtcagaagaagaagaggataatgagttcataaataatgatggatttgatgacgatacgcccctttttcaaaaaagcaagattcatgaatttagctctaagaaaagcaatactatagaggacggtaaacgacctttgtttttcaggcatatcttacagaataaccgccctcaacgtgatacccaaaagctatttacttcgtcgaacgccattcaccatgataaggacaagagtgcaaataatggtccccgtaacattaatggtaatcaaaagcatggcactaaatactttggtagtgctacacaacctcggtttaccggttcgcccttaaataatacaaacaggttcactaaattgtttccattaagaaagccaaatttactgagcaatatatccgttttaaacaataccccggaagatagaatcaatacgttgagcgtgaaagagcgggctctgtggaaatgggcaaacgtagaaaacctcgatatatttcttcaagatgtttacaattattatctgggaaatgggttctattgcatcatactggaaaaaatattgaatatatgcactttgctttttgttgtttttgtttctacatatatgggtcactgtgttgactactccaaattaccgactagtcaccgggtttcggatattattatcgacaagtgttattctaatagtataacggggttcacaaagtttttcctttggatgttttatttcttcgtgattctcaaaattgttcaactctactttgatgttcaaaaattatcagaattacaaaacttttacaagtatcttttaaatatatcggatgacgaacttcaaactttgccctggcaaaatgtgatacagcagctaatgtacttgaaggatcaaaacgctatgacggcaaatgttgtggaagtcaaagccaagaatagaatcgacgcgcatgacgttgccaatagaatcatgagaagagaaaactatctcatagcactttacaatagcgacatcctgaatttatccttgcctattccattatttaggaccaacgttctgacaaaaacactagaatggaatattaatttatgcgtcatgggctttgtgttcaacgagtccggatttattaaacaaagtattttaaaaccttctcaaagagaattcacgagagaagaattacaaaaaagattcatgctggcaggatttcttaatattatattggcaccatttctggtcacatactttgttttgctttattttttcagatattttaatgagtataaaacttctcctggatctattggtgctcgtcaatacacaccaattgctgaatggaaattccgtgagtacaatgaactttaccatatttttaagaaaagaataagtttgagcacaaccttagctaacaagtatgttgatcagttcccgaaggaaaagaccaatttgtttctgaaatttgtttcctttatttgtggatcatttgtggccattttagcttttctcactgtattcgatccagaaaactttttaaactttgaaatcacctcggacagatctgtcattttctacattactattctgggtgctatatggtctgtaagtagaaatacaataacccaggagtaccatgttttcgaccccgaagagacgctcaaggagttgtatgaatatacacactatctaccaaaggaatgggaaggaagatatcacaaagaggaaatcaaactagagttctgtaaattgtacaacttgagaatagtaatacttttgagggaactcactagcctgatgataacaccgtttgtactttggttttcgttgccctcgtcagccggcaggattgtagatttcttcagagagaattctgaatatgtggacggattaggttacgtttgcaagtatgctatgtttaacatgaaaaacatagacggtgaagatacacacagcatggatgaagacagtttaacgaaaaagattgccgtgaacggaagtcatacactcaacagtaaacgaaggagtaaatttaccgccgaagaccatagcgataaagatttggcaaataataaaatgttacaatcatatgtatattttatggatgattattccaacagtgaaaacttaacagggaagtaccaattgcctgcaaaaaaaggctatccgaataatgaaggcgattcatttctcaacaataagtattcttggagaaagcaatttcagccaggtcaaaagccggagctatttagaataggtaagcatgctctcggccctggccataatatttcccctgctatatattctacaaggaatcccggcaagaactgggataacaataataatggtgatgacattaagaacgggaccaataatgctacagctaaaaatgatgacaataatggcaataatgatcatgaatacgtactaacagagtctttccttgattcgggcgcattccctaatcatgatgtaatagaccataataaaatgctaaactcaaattacaatggtaatggcatactcaataagggtggtgtcttaggacttgttaaagagtattacaagaagtctgacgtcggaagataa

SEQ ID NO: 1520 - DNA, 2994 bp, Artificial Sequence
  Description of Artificial Sequence: Synthetic polynucleotide
atggagagagatgaataccagttacccaactctcatgggaagaatactttcttaagtagaatatttggtttacaatctgatgaagttaatccttctcttaatagccaggagatgagcaacttccctttaccagacatagagagaggctcttctttattgcattctactaacgacagccgcgaagatgtagatgagaatgacttacgtgttcctgagtctgaccaaggcactagtacagaagaagaggatgaagtagatgaagagcaagtccaggcgtatgctccacagattagtgatggattggatggagaccaccagttgaattctgtaacgagcaaagaaaatgtacttgaaacggaaaaaagcaatttagaaagattggttgaaggctctaccgatgattctgtgcccaaagtcggacagctttcttctgaagaagaagaggataatgagttcataaataatgatggatttgatgacgatacgcccctttttcaaaaaagcaagattcatgaatttagctctaagaaaagcaatactatagaggacggtaaaagacctttgtttttcaggcatatcttacagaataaccgccctcaacgtgatacccaaaagttatttacttcttccaacgccattcaccatgataaggacaagagtgcaaataatggtccccgtaacattaatggtaatcaaaagcatggcactaaatactttggtagtgctacacaacctagatttaccggttctcccttaaataatacaaacaggttcactaaattgtttccattaagaaagccaaatttattaagcaatatatccgttttaaacaataccccggaagatagaatcaatacgttgagcgtgaaagagagagctttatggaaatgggcaaacgtagaaaacctcgatatatttcttcaagatgtttacaattattatttgggaaatgggttctattgcatcatattggaaaaaatattgaatatatgcactttgctttttgttgtttttgtttctacatatatgggtcactgtgttgactactccaaattaccgactagtcacagagtttctgatattattatcgacaagtgttattctaatagtataacggggttcacaaagtttttcctttggatgttttatttcttcgtgattctcaaaattgttcaactctactttgatgttcaaaaattatctgaattacaaaacttttacaagtatcttttaaatatatctgatgacgaacttcaaactttgccctggcaaaatgtgatacagcagttgatgtacttgaaggatcaaaacgctatgacggcaaatgttgtggaagtcaaagccaagaatagaatcgacgcgcatgacgttgccaatagaatcatgagaagagaaaactatctcatagcactttacaatagcgacatcttgaatttatccttgcctattccattatttaggaccaacgttttgacaaaaacattagaatggaatattaatttatgcgtcatgggctttgtgttcaacgagtccggatttattaaacaaagtattttaaaaccttctcaaagagaattcacgagagaagaattacaaaaaagattcatgttagcaggatttcttaatattatattggcaccatttttagtcacatactttgttttgctttattttttcagatattttaatgagtataaaacttctcctggatctattggtgctcgtcaatacacaccaattgctgaatggaaattccgtgagtacaatgaactttaccatatttttaagaaaagaataagtttgagcacaaccttagctaacaagtatgttgatcagttcccgaaggaaaagaccaatttgtttttgaaatttgtttcctttatttgtggaagttttgtggccattttagcttttctcactgtattcgatccagaaaactttttaaactttgaaatcaccagtgacagatctgtcattttctacattactattttgggtgctatatggtctgtaagtagaaatacaataacccaggagtaccatgttttcgaccccgaagagacgctcaaggagttgtatgaatatacacactatttaccaaaggaatgggaaggaagatatcacaaagaggaaatcaaattagagttctgtaaattgtacaacttgagaatagtaatacttttgagggaactcactagcttgatgataacaccgtttgtactttggttttctttgccctcttctgccggcaggattgtagatttcttcagagagaattctgaatatgtggacggattaggttacgtttgcaagtatgctatgtttaacatgaaaaacatagacggtgaagatacacacagcatggatgaagacagtttaacgaaaaagattgccgtgaacggaagtcatacactcaacagtaaaagaaggagtaaatttaccgccgaagaccatagcgataaagatttggcaaataataaaatgttacaaagttatgtatattttatggatgattattccaacagtgaaaacttaacagggaagtaccaattgcctgcaaaaaaaggctatccgaataatgaaggcgattcttttctcaacaataagtattcttggagaaagcaatttcagccaggtcaaaagccggagttatttagaataggtaagcatgctctcggccctggccataatatttcccctgctatatattctacaaggaatcccggcaagaactgggataacaataataatggtgatgacattaagaacgggaccaataatgctacagctaaaaatgatgacaataatggcaataatgatcatgaatacgtattaacagagtctttccttgattctggcgcattccctaatcatgatgtaatagaccataataaaatgttgaacagtaattacaatggtaatggcatactcaataagggtggtgtcttaggacttgttaaagagtattacaagaagtctgacgtcggaagatga

SEQ ID NO: 1521 - DNA, 2433 bp, Saccharomyces cerevisiae
atggccggttcacaacttaagaatttaaaggccgccttgaaggcccgtggactcacaggtcaaacaaacgtcaaaagtaagaataaaaagaattccaaaagacaagcgaaggagtatgatcgtgaagaaaaaaaaaaggccattgctgaaatcagagaagagtttaatccgtttgaaataaaggctgcaaggaataagaggagagatggtctgccttctaaaactgctgatcgtattgctgtgggtaagcctggtatctctaaacagatcggtgaagaacaaagaaagcgtgcatttgaagcaagaaaaatgatgaagaataaacgtggtggtgtgatcgataagagatttggtgaaagagacaagttgttgacggaagaagaaaaaatgttggaacgtttcaccagagaaagacaaagccaatcaaagagaaacgcaaatttattcaatcttgaagacgatgaagacgacggtgacatgtttggagacggtcttacacatttaggtcaatcgctgtccctagaagatgagcttgccaatgatgaagaggattttttagcttccaaacgattcaatgaagatgatgctgagctacagcaacctcaaagaaaaaaaaccaaagctgaagtcatgaaagaggtcattgccaaatcaaaattttacaaacaagaaagacaaaaggctcaaggtataatggaagatcaaatagataatctggatgataatttcgaggatgttatgtctgaattgatgatgacgcaacccaagaagaatccaatggaacctaagaccgatctagataaggagtatgatatcaaagtgaaagaactacaattggacaaaagagctgcaccctctgatagaactaaaactgaagaggagaaaaacgctgaagctgaagaaaaaaaacgggagttggaacaacagcgtcttgatcgtatgaacggtatgattgaattagaagaaggcgaagaaagaggagtagaggatttggatgatggattctgggaaaatgaagaagactatgaagacgataatgacggtattgctgattctgatgatgatatcaaatttgaagatcaaggcagagatgaagggttttctcaaattttaaagaaaaagaacatttccatttcatgccctagaactcatgatgcgttattagatcaagtaaaaaaattagacttagatgatcatcctaagattgttaagaatattatcaaagcttaccaaccaaaattggctgaaggtaataaggaaaagttaggaaaattcaccgctgttttactgagacacatcatttttctaagcaatcaaaactaccttaaaaacgttcaaagttttaaacgtacacaaaatgcattgatctcaattctaaaatccctttcagagaaatataatagagagctttccgaggagtgtagagattatatcaatgaaatgcaagcacgctataaaaagaaccattttgatgctctatcaaatggtgatctggtatttttttccattattggtattcttttctccacctcggaccagtaccatttagtaataactccagcattgattttaatgagccagttcctggaacaaatcaagtttaattctttaaagaggatagcttttggcgctgtcttggtaaggattgtttcacaatatcaacgcatttccaaacggtacataccggaggtggtttacttctttcaaaaaatattactcacttttatagttgagaaagaaaatcaagaaaaaccattagattttgaaaatattagactagactcttacgagttggggcttccattggacgttgactttacaaaaaagagatcaactattattccattacataccttgtcaacaatggataccgaggcacatccggttgatcaatgtgtctccgttttactaaatgttatggaatctttagatgcaactatctctactgtgtggaagagcttacctgctttcaatgaaattattttaccgattcagcagttattaagtgcatacacctcaaagtattctgattttgaaaagccaagaaatattttgaacaaagttgaaaaattaacgaaattcacagaacatattccgttggctttacagaaccacaaacccgtatccatacctacgcatgctcctaaatacgaagaaaacttcaatcctgataaaaaatcgtacgatcctgatagaacaagaagtgagataaataagatgaaggcccaactaaagaaggaacgtaaattcactatgaaagaaatccgtaaagacgccaaatttgaagctagacaaagaattgaagaaaagaacaaggagagcagcgactaccatgcaaagatggctcatattgttaacactattaataccgaagaaggtgcggaaaaaaacaagtatgaaagagaaagaaaactacgtggcggaaagaaataa

SEQ ID NO: 1522 - DNA, 2433 bp, Artificial Sequence
  Description of Artificial Sequence: Synthetic polynucleotide
atggccggttctcaacttaagaatttaaaggccgccttgaaggcccgtggactcacaggtcaaacaaacgtcaaaagtaagaataaaaagaattccaaaagacaagcgaaggagtatgatcgtgaagaaaaaaaaaaggccattgctgaaatcagagaagagtttaatccgtttgaaataaaggctgcaaggaataagaggagagatggtttgccttctaaaactgctgatcgtattgctgtgggtaagcctggtatctctaaacagatcggtgaagaacaaagaaagcgtgcatttgaagcaagaaaaatgatgaagaataaacgtggtggtgtgatcgataagagatttggtgaaagagacaagttgttgacggaagaagaaaaaatgttggaacgtttcaccagagaaagacaaagccaatccaagagaaacgcaaatttattcaatcttgaagacgatgaagacgacggtgacatgtttggagacggtcttacacatttaggtcaaagtttatccttagaagatgagcttgccaatgatgaagaggattttttagcttccaaaagattcaatgaagatgatgctgagttacagcaacctcaaagaaaaaaaaccaaagctgaagtcatgaaagaggtcattgccaaatctaaattttacaaacaagaaagacaaaaggctcaaggtataatggaagatcaaatagataatttggatgataatttcgaggatgttatgtctgaattgatgatgacgcaacccaagaagaatccaatggaacctaagaccgatttggataaggagtatgatatcaaagtgaaagaattacaattggacaaaagagctgcaccctctgatagaactaaaactgaagaggagaaaaacgctgaagctgaagaaaaaaaaagagagttggaacaacagcgtcttgatcgtatgaacggtatgattgaattagaagaaggcgaagaaagaggagtagaggatttggatgatggattctgggaaaatgaagaagactatgaagacgataatgacggtattgctgattctgatgatgatatcaaatttgaagatcaaggcagagatgaagggttttctcaaattttaaagaaaaagaacatttccatttcttgccctagaactcatgatgcgttattagatcaagtaaaaaaattagacttagatgatcatcctaagattgttaagaatattatcaaagcttaccaaccaaaattggctgaaggtaataaggaaaagttaggaaaattcaccgctgttttattaagacacatcatttttttgagcaatcaaaactaccttaaaaacgttcaaagttttaaacgtacacaaaatgcattgatctctattttgaaatccctttctgagaaatataatagagagctttccgaggagtgtagagattatatcaatgaaatgcaagcacgctataaaaagaaccattttgatgctttatccaatggtgatttagtatttttttccattattggtattcttttctccaccagtgaccagtaccatttagtaataactccagcattgattttaatgagccagttcttggaacaaatcaagtttaattctttaaagaggatagcttttggcgctgtcttggtaaggattgtttctcaatatcaacgcatttccaaaagatacataccggaggtggtttacttctttcaaaaaatattactcacttttatagttgagaaagaaaatcaagaaaaaccattagattttgaaaatattagattagactcttacgagttggggcttccattggacgttgactttacaaaaaagagatctactattattccattacataccttgagtacaatggataccgaggcacatccggttgatcaatgtgtctccgttttattgaatgttatggaatctttagatgcaactatctctactgtgtggaagagcttacctgctttcaatgaaattattttaccgattcagcagttattaagtgcatacacctccaagtattctgattttgaaaagccaagaaatattttgaacaaagttgaaaaattaacgaaattcacagaacatattccgttggctttacagaaccacaaacccgtatccatacctacgcatgctcctaaatacgaagaaaacttcaatcctgataaaaaatcttacgatcctgatagaacaagaagtgagataaataagatgaaggcccaattgaagaaggaacgtaaattcactatgaaagaaatccgtaaagacgccaaatttgaagctagacaaagaattgaagaaaagaacaaggagagcagcgactaccatgcaaagatggctcatattgttaacactattaataccgaagaaggtgcggaaaaaaacaagtatgaaagagaaagaaaattacgtggcggaaagaaatga

SEQ ID NO: 1523 - DNA, 1338 bp, Saccharomyces cerevisiae
atgtcaagagatgcaccaattaaggctgacaaggattatagccaaattttgaaggaagagtttcctaagatcgattcgctcgctcaaaatgattgtaactctgctttagaccaactgttagtgttggagaagaaaaccagacaagcttcagatctggcctcctcgaaagaagttttggccaagattgtagatctgctagcatcaaggaataagtgggacgacctaaatgagcaattgactctactctcaaaaaagcatggtcagttgaaattgtcaattcagtatatgatacaaaaggttatggaatatttgaaaagctcgaaatctttggatttaaacaccagaattagtgtcattgaaactatcagggtggttacagagaacaaaatatttgtagaagtggaaagagctagggtcaccaaagatttggtggaaattaagaaagaagagggtaagattgatgaagctgcagacatcttgtgtgagttacaggttgagacctatggctccatggaaatgtctgagaaaattcagtttatattagagcaaatggaattgagtatattaaaaggtgattattcccaagccacggtgctttcaagaaaaattctgaaaaaaacttttaaaaatccaaaatacgagtcattgaagctagaatattataatcttctggtaaaaattagtttgcacaagagagaatacctagaagttgcgcagtatctgcaagaaatttatcaaacagacgccattaaatcagatgaggctaagtggaaacctgttttatcgcacattgtatatttcttagtcctttcaccttacggcaatttacaaaatgatttaattcacaaaatccagaatgataacaacctgaaaaaattagaaagccaagaatctttagtaaaattgtttactacgaatgagttgatgagatggccaattgttcaaaaaacctatgagcccgtcttaaatgaggatgatttggcatttggtggagaagctaataagcatcactgggaagatttacaaaaaagggtcatcgagcacaatttaagagtcatttccgaatactattccagaattactttactaagattgaatgaattgctggacctaacggagagccagacggaaacatacatcagtgatttggtaaaccagggcatcatatacgctaaagttaatcgcccagccaaaatcgtgaattttgaaaaaccaaaaaactcaagccaattattgaacgaatggtcacataatgttgacgaactattagaacatatagaaacaataggccatttaattacaaaagaggaaatcatgcacggtttgcaagctaaatga

SEQ ID NO: 1524 - DNA, 1338 bp, Artificial Sequence
  Description of Artificial Sequence: Synthetic polynucleotide
atgagtagagatgcaccaattaaggctgacaaggattatagccaaattttgaaggaagagtttcctaagatcgattctctcgctcaaaatgattgtaactctgctttagaccaattattagtgttggagaagaaaaccagacaagcttctgatttggcctcctctaaagaagttttggccaagattgtagatttattggcaagcaggaataagtgggacgacttgaatgagcaattgactttactctctaaaaagcatggtcagttgaaattgtctattcagtatatgatacaaaaggttatggaatatttgaaaagcagtaaatctttggatttaaacaccagaattagtgtcattgaaactatcagggtggttacagagaacaaaatatttgtagaagtggaaagagctagggtcaccaaagatttggtggaaattaagaaagaagagggtaagattgatgaagctgcagacatcttgtgtgagttacaggttgagacctatggctccatggaaatgtctgagaaaattcagtttatattagagcaaatggaattgagtatattaaaaggtgattattcccaagccacggtgctttctagaaaaattttgaaaaaaacttttaaaaatccaaaatacgagtctttgaagttggaatattataatcttttggtaaaaattagtttgcacaagagagaatacttggaagttgcgcagtatttacaagaaatttatcaaacagacgccattaaatctgatgaggctaagtggaaacctgttttatcccacattgtatatttcttagtcctttctccttacggcaatttacaaaatgatttaattcacaaaatccagaatgataacaacttgaaaaaattagaaagccaagaatctttagtaaaattgtttactacgaatgagttgatgagatggccaattgttcaaaaaacctatgagcccgtcttaaatgaggatgatttggcatttggtggagaagctaataagcatcactgggaagatttacaaaaaagggtcatcgagcacaatttaagagtcatttccgaatactattccagaattactttattaagattgaatgaattgttggacttaacggagagccagacggaaacatacatcagtgatttggtaaaccagggcatcatatacgctaaagttaatcgcccagccaaaatcgtgaattttgaaaaaccaaaaaactccagccaattattgaacgaatggtctcataatgttgacgaattattagaacatatagaaacaataggccatttaattacaaaagaggaaatcatgcacggtttgcaagctaaatga

SEQ ID NO: 1525 - DNA, 1476 bp, Saccharomyces cerevisiae
atgatattagatccattatctccaaatattgaaaatcatactcaagatgaaataattgagttttgggaaaaaactgagtctattgctaacataccaaaggaaaacttggatgaatcccatgttaactcaagcctggttgcctacctgaagtttgctactgattcctataaggtttttattaatactgatcgtgacctctaccggatgtcgctaatactgttagaatcgtccttatttgaatttaaaaaagagttttgcctaagtaagttgcagtcgttactcaacatagacctactggaaatgaatatgaagttcattattgtttacattcttctctgtgaggcgaaaaaaaacgtgtactccttagaaatcatgctcaagttccaaggatttactgtgttttataataccttgtacacacaattcgcctatttgagcaaatacggaaaggaaaggacagttgcttctaaacatcaatacaattctaataattctagcacaggtacatccttggacagtttagaccgaagtttgactgatattgatttgggtattatagacgaaatgaagcaaatttcaactgttttgatggatttgttatttcaaattatgaagtactgtaagtgtgttattgctaatcttcaaattgtggatgacttttttgtttactatatgatggaatcaatgaggtccgacactatggacgatatgttcaataacgcggagtttaaactgctgttggcgttgaacgaacaatatatgatgtttgccaaggagtacgacattgagaacaaggtctataagtatttgatcaatgggtctgtctcaagatgttttacggagctattattactgaaattcaatagggcatcggaccctccgttacaaattatgatgtgcaaaattatttatcttatcttgacaccaagaggagactactctccgatgaatttcttttatacaaacgacttacgtgttcttatcgatgtattaatcagagaactacagaatatcagtgaggatgaagaggtattgagaaacacccttctaagggttctgattccgctattaaagaatacacaattatccaaaacacattatagaaaggatgatttgaataaactattaaactacttgtcgactttagataatatatgcgttgacagtccagcgttgcacgagcatcaagttacagtggccttatctcggaagtgtcttcaacaaattccttggttagagacaccttcaacgccttcagatggaggttcatcggtctctagtaataacactagtagaaactctagcattgttgcattggggacgcccgacaatcaaaatatcttggctcgtaaaggccatctttatagtaatcgtgaattagatgtttctgcagaatctttgactaaaagaaaggctaaagctccgcctccgcctcctcctcctcctccatcaagaaaatgtggaactccaaaataa

SEQ ID NO: 1526 - DNA, 1476 bp, Artificial Sequence
  Description of Artificial Sequence: Synthetic polynucleotide
atgatattagatccattatctccaaatattgaaaatcatactcaagatgaaataattgagttttgggaaaaaactgagtctattgctaacataccaaaggaaaacttggatgaatcccatgttaactccagcttagttgcctacttgaagtttgctactgattcctataaggtttttattaatactgatcgtgacctctacagaatgtctttgatattattagaatcttccttatttgaatttaaaaaagagttttgcttaagtaagttgcagtctttactcaacatagacttattggaaatgaatatgaagttcattattgtttacattcttctctgtgaggcgaaaaaaaacgtgtactccttagaaatcatgctcaagttccaaggatttactgtgttttataataccttgtacacacaattcgcctatttgagcaaatacggaaaggaaaggacagttgcttctaaacatcaatacaattctaataattctagcacaggtacatccttggacagtttagacagaagtttgactgatattgatttgggtattatagacgaaatgaagcaaatttctactgttttgatggatttgttatttcaaattatgaagtactgtaagtgtgttattgctaatcttcaaattgtggatgacttttttgtttactatatgatggaaagtatgaggtccgacactatggacgatatgttcaataacgcggagtttaaattattattggcgttgaacgaacaatatatgatgtttgccaaggagtacgacattgagaacaaggtctataagtatttgatcaatgggtctgtctctagatgttttacggagttattattattgaaattcaatagggcaagtgaccctccgttacaaattatgatgtgcaaaattatttatcttatcttgacaccaagaggagactactctccgatgaatttcttttatacaaacgacttacgtgttcttatcgatgtattaatcagagaattacagaatatcagtgaggatgaagaggtattgagaaacacccttttgagggttttgattccgttgttaaagaatacacaattatccaaaacacattatagaaaggatgatttgaataaattattaaactacttgtctactttagataatatatgcgttgacagtccagcgttgcacgagcatcaagttacagtggccttatctagaaagtgtcttcaacaaattccttggttagagacaccttctacgccttctgatggaggttcttctgtctctagtaataacactagtagaaactctagcattgttgcattggggacgcccgacaatcaaaatatcttggctcgtaaaggccatctttatagtaatcgtgaattagatgtttctgcagaatctttgactaaaagaaaggctaaagctccgcctccgcctcctcctcctcctccatctagaaaatgtggaactccaaaatga

SEQ ID NO: 1527 - DNA, 3606 bp, Saccharomyces cerevisiae
atgaagatgttaactaaatttgaatcaaagtccactagggccaagggcattgccttccacccctccagaccttgggttttggtggctttgttttcctctactattcaattatgggattacaggatgggaacactacttcacagatttgaagaccacgagggccctgttcgtgggctagatttccatccaacccaaccgatttttgtttcggcaggtgacgactataccattaaagtttggtccttagatactaacaaatgtctatacaccttaactgggcatttggattatgtccgtaccgtgtttttccaccgtgagctgccttggatcatatctgcttctgatgaccagaccataagaatctggaactggcaaaaccgtaaggaaattgcatgtttgaccggccacaatcattttgtcatgtgtgctcaatttcatccaaccgatgacctgatcgtttccgcttctctggatgaaaccatcagaatttgggatatttccggtttaaggaaaagacactccgctcctggtactagttcatttgaggagcaaatgagtgcacaacaaaatctattggatggctctcttggtgactgtgttgtcaagtttattctagagggtcacacaagaggtgtcaactgggcctctttccatccaactttaccattgattgtctccggcagtgacgaccgtcaagttaaattatggagaatgagtgctacgaaagcttgggaagttgatacttgcagaggtcacactaacaatgttgatagtgttatctttcacccacatcaaaacttgatcatttctgtcggtgaagacaaaacgctaagggtttgggatcttgacaagagaactccagtaaagcaattcaaaagagaaaacgatagattttggttgattgcagcacatcctcatatcaatctatttggtgcagctcacgattctggtattatggttttcaagctcgatcgcgaaagaccatgcagctttatccatcaaaaccagttgttttttgtcaatgcggaaaagcaaatccaaagtttcaatttccagaaaagagtcgcttcattaccttatgcgtccttaaagggtattggtcaaccttgggatgcattcagaagtatatcgtacaatccctcccaacattcagttttggttaatgaagctaatggcaaatttgctctcgttattttaccaaaacaaccagttggagctgtggagccaacaagtgtcacccaagatacaggtaattttgctacttttgttggtcgtaatagatttgttgtttacaacaagaacactgaatctgttgaagttcgctctctcgaaaacaaagttacaagaaatatcaaagtagaggaaacagtaagaactattgtagctgcaggtcctggatctgttttggtcatacaccccagagaagttattctttatgatgtccaacagggcaaaaaagtatcccaattggctgttaaaaacgtcaagtacgtttcgtggtccttagatggtcaatatgttgcattgatgagtaagcacaccataactttggctaccaaaaagctagaattgattaattctatgcatgaaacgattagaatcaaaagtgccgcttgggatgaaactggtgtattaatttattcaactttaaatcatataaggtactcactattgaacggggatagaggtattattaaaactttggagaaaactttatatatcacaaaagttcagggaaaattagtgtactgcttgaaccgtgaaggtgagattgaaattttaaccattgatcctacagaatatcgcttcaaaaaggccctggttaacaaaaatttcccagaagttttacgtctgataaaagattctaatttggttggccagaatatcatttcctatctgcagaagtcaggttacccagaaattgctttacaattcgttcaagacccacatatccgttttgatttagctttggaatacggtaatttggatgttgccttagatgaagccaaaaaactgaatgattctagtacttgggaaagattaatccaagaagccttggcacaaggtaatgccagcttagctgaaatgatttatcaaactcaacattcttttgacaaactttccttcctgtatttagttacaggtgacgttaacaaactatctaaaatgcaaaatatcgctcagactcgtgaagactttggaagtatgctattaaacaccttttacaacaattcaaccaaggaaagatctagcatttttgcagagggcggctctttaccattagcttatgccgtagcaaaggctaacggagatgaagcggctgcttctgctttcttggagcaagctgaagttgatgaacaagatgttactttaccagaccagatggatgcctccaacttcgttcaaagaccagtgatctcaaagccacttgaaaaatggccattaaaagaggctgaactatcttactttgaaaaggctgttttaggtcaaattgacgatttgactatagacgatgaaactccagcagtaaacaccactcaagagcaagaagaaccactaggcgaagaaaactttaacgatgaggatattggtgaagacgaaggtgcctgggatttgggtgacgaagatttggatgtgggagaagagttacctgaagaagttgagcaaggcgaaattacctctccagcacaggaagttgaaacagccatttggatcaagaattctaaactgcctgctgtcctagttgccgctggtgcctttgatgccgctgttcaagccttgagcaagcaagtgggtgtagtcaagctggagccattgaagaaatattttaccaacatttatgagggttgtagaacatacattcctagtacgccctgtgaacttcctgctcaattaggttatgtcagagcgtatgatgataccgtaagtgaagatcaaattcttccttacgtgccaggtcttgatgtcgttaatgaaaaaatgaatgagggttacaaaaactttaaactaaacaaaccagatattgcaatcgaatgcttcagagaagctatctaccgtattacgctattaatggtcgatgatgctgaagatgaaaaattagcacacaagatactggaaactgctagggagtatatattaggtttatccattgaattggaacgccgctcattaaaggagggaaatactgtacgcatgcttgagctagctgcatactttacaaaggcaaaactatccccaattcatcgtaccaatgctttacaagtggctatgtcccaacatttcaaacacaaaaatttcttacaggcctcatattttgccggtgaatttttaaagattatttcttctggtcctcgtgcagaacaagcacgtaaaatcaaaaacaaagccgactcaatggccagtgacgccattccaattgactttgatccttatgctaaattcgatatttgtgcagccacctacaaaccaatttatgaagatacaccttccgtttctgacccattaacaggtagtaaatacgttatcacggaaaaagataaaatagatagaattgctatgatttctaagatcggtgcacctgcatccggattaagaatacgtgtataa

SEQ ID NO: 1528 - DNA, 3606 bp, Artificial Sequence
  Description of Artificial Sequence: Synthetic polynucleotide
atgaagatgttaactaaatttgaatccaagtccactagggccaagggcattgccttccacccctccagaccttgggttttggtggctttgttttcctctactattcaattatgggattacaggatgggaacattgcttcacagatttgaagaccacgagggccctgttcgtgggttagatttccatccaacccaaccgatttttgtttctgcaggtgacgactataccattaaagtttggtccttagatactaacaaatgtctttacaccttaactgggcatttggattatgtccgtaccgtgtttttccaccgtgagcttccttggatcatatctgcttctgatgaccagaccataagaatctggaactggcaaaaccgtaaggaaattgcatgtttgaccggccacaatcattttgtcatgtgtgctcaatttcatccaaccgatgacttgatcgtttccgcttctttagatgaaaccatcagaatttgggatatttccggtttaaggaaaagacactccgctcctggtactagttcttttgaggagcaaatgagtgcacaacaaaatttattggatggctctcttggtgactgtgttgtcaagtttattttagagggtcacacaagaggtgtcaactgggcctctttccatccaactttaccattgattgtctccggcagtgacgaccgtcaagttaaattatggagaatgagtgctacgaaagcttgggaagttgatacttgcagaggtcacactaacaatgttgatagtgttatctttcacccacatcaaaacttgatcatttctgtcggtgaagacaaaacgttgagggtttgggatcttgacaagagaactccagtaaagcaattcaaaagagaaaacgatagattttggttgattgcagcacatcctcatatcaatttatttggtgcagctcacgattctggtattatggttttcaagctcgatcgcgaaagaccatgcagctttatccatcaaaaccagttgttttttgtcaatgcggaaaagcaaatccaaagtttcaatttccagaaaagagtcgcttctttaccttatgcgtccttaaagggtattggtcaaccttgggatgcattcagaagtatatcttacaatccctcccaacattctgttttggttaatgaagctaatggcaaatttgctctcgttattttaccaaaacaaccagttggagctgtggagccaacaagtgtcacccaagatacaggtaattttgctacttttgttggtcgtaatagatttgttgtttacaacaagaacactgaatctgttgaagttcgctctctcgaaaacaaagttacaagaaatatcaaagtagaggaaacagtaagaactattgtagctgcaggtcctggatctgttttggtcatacaccccagagaagttattctttatgatgtccaacagggcaaaaaagtatcccaattggctgttaaaaacgtcaagtacgtttcctggtccttagatggtcaatatgttgcattgatgagtaagcacaccataactttggctaccaaaaagttggaattgattaattctatgcatgaaacgattagaatcaaaagtgccgcttgggatgaaactggtgtattaatttattctactttaaatcatataaggtactctttgttgaacggggatagaggtattattaaaactttggagaaaactttatatatcacaaaagttcagggaaaattagtgtactgcttgaaccgtgaaggtgagattgaaattttaaccattgatcctacagaatatcgcttcaaaaaggccttagttaacaaaaatttcccagaagttttacgtttaataaaagattctaatttggttggccagaatatcatttcctatttacagaagtctggttacccagaaattgctttacaattcgttcaagacccacatatccgttttgatttagctttggaatacggtaatttggatgttgccttagatgaagccaaaaaattgaatgattctagtacttgggaaagattaatccaagaagccttggcacaaggtaatgccagcttagctgaaatgatttatcaaactcaacattcttttgacaaactttccttcctctatttagttacaggtgacgttaacaaattatctaaaatgcaaaatatcgctcagactcgtgaagactttggaagtatgcttttaaacaccttttacaacaattctaccaaggaaagatctagcatttttgcagagggcggctctttaccattagcttatgccgtagcaaaggctaacggagatgaagcggctgcttctgctttcttggagcaagctgaagttgatgaacaagatgttactttaccagaccagatggatgcctccaacttcgttcaaagaccagtgatctccaagccacttgaaaaatggccattaaaagaggctgaattatcttactttgaaaaggctgttttaggtcaaattgacgatttgactatagacgatgaaactccagcagtaaacaccactcaagagcaagaagaaccattaggcgaagaaaactttaacgatgaggatattggtgaagacgaaggtgcctgggatttgggtgacgaagatttggatgtgggagaagagttacctgaagaagttgagcaaggcgaaattacctctccagcacaggaagttgaaacagccatttggatcaagaattctaaattacctgctgtcttggttgccgctggtgcctttgatgccgctgttcaagccttgagcaagcaagtgggtgtagtcaagttggagccattgaagaaatattttaccaacatttatgagggttgtagaacatacattcctagtacgccctgtgaacttcctgctcaattaggttatgtcagagcgtatgatgataccgtaagtgaagatcaaattcttccttacgtgccaggtcttgatgtcgttaatgaaaaaatgaatgagggttacaaaaactttaaattgaacaaaccagatattgcaatcgaatgcttcagagaagctatctaccgtattacgttattaatggtcgatgatgctgaagatgaaaaattagcacacaagatattggaaactgctagggagtatatattaggtttatccattgaattggaacgccgctctttaaaggagggaaatactgtacgcatgcttgagttggctgcatactttacaaaggcaaaactttccccaattcatcgtaccaatgctttacaagtggctatgtcccaacatttcaaacacaaaaatttcttacaggcctcttattttgccggtgaatttttaaagattatttcttctggtcctcgtgcagaacaagcacgtaaaatcaaaaacaaagccgactccatggccagtgacgccattccaattgactttgatccttatgctaaattcgatatttgtgcagccacctacaaaccaatttatgaagatacaccttccgtttctgacccattaacaggtagtaaatacgttatcacggaaaaagataaaatagatagaattgctatgatttctaagatcggtgcacctgcatccggattaagaatacgtgtatga

SEQ ID NO: 1529 - DNA, 1071 bp, Saccharomyces cerevisiae
atgtctagaatactagttatcggggcaggtggcgttggggtcattactgcgctttcgttgtggcttaagaaggagagcgacgtttccttggtagtcagatctgactacgatagggtattgaagcatggctacacaatcgaatcatgtgactatggccggttagaaggttggagaccccaccatatttacagcagcgtcgaggacgctgcttctgccgcagacaaccaaggatacaactatattgtagtgactaccaagaacatcatagatgggcccgttaattcaagggtgtccaacatcatcagacctgtgcttgagaagaataaagagctacatgggccgcaattgacgacacacattttactggtacagaacggaatcgatattgagaaggagatatgggcggaatttcccagagagcagtatcgttacacggtgctttctggcatccagttaatcggatccactaagatcgggtcaggccatatcagtcaagtgggccaggaccacttatcgtgtggagcttttgatccacaggacgctgctgctatccaggctgccaacgacttcgtcaggatgtacagcaacgaggggcaaaactttgtcgaatttgaccctagggtccgttactctcggtggaagaagttgctctacaatgcagctatcaacacatccacggcacttgtggggctagacgttccgcgttgcctggagtttggggttaacaagaagagcacagaaattgaagtgttccaccctgccatgagggagatcatcgccattgcggcgagtgaaggcatcattatcgaagaggagttcataacgatgtttacagagattaccaggaaaaaggtgttcaagccatccatgtgcgtggactgcgagaagggccaattgatggagctagaagtcatcctaggcaaccccataagaatcgcgaaaagaaacggcgtcgctacacccactctttctatcttatacaacctacttgtgctagtacaggccaaactaaaggagcggaaaggcctattgaagttcgacgaaaaaactgccactcttgtggacgagtag

SEQ ID NO: 1530 - DNA, 1071 bp, Artificial Sequence
  Description of Artificial Sequence: Synthetic polynucleotide
atgtctagaatattagttatcggggcaggtggcgttggggtcattactgcgctttctttgtggcttaagaaggagagcgacgtttccttggtagtcagatctgactacgatagggtattgaagcatggctacacaatcgaaagttgtgactatggcagattagaaggttggagaccccaccatatttacagcagcgtcgaggacgctgcttctgccgcagacaaccaaggatacaactatattgtagtgactaccaagaacatcatagatgggcccgttaattctagggtgtccaacatcatcagacctgtgcttgagaagaataaagagttacatgggccgcaattgacgacacacattttattggtacagaacggaatcgatattgagaaggagatatgggcggaatttcccagagagcagtatcgttacacggtgctttctggcatccagttaatcggatccactaagatcgggtctggccatatcagtcaagtgggccaggaccacttaagttgtggagcttttgatccacaggacgctgctgctatccaggctgccaacgacttcgtcaggatgtacagcaacgaggggcaaaactttgtcgaatttgaccctagggtccgttactctcgttggaagaagttgctctacaatgcagctatcaacacatccacggcacttgtggggttggacgttccgcgttgcttagagtttggggttaacaagaagagcacagaaattgaagtgttccaccctgccatgagggagatcatcgccattgcggcgagtgaaggcatcattatcgaagaggagttcataacgatgtttacagagattaccaggaaaaaggtgttcaagccatccatgtgcgtggactgcgagaagggccaattgatggagttagaagtcatcttgggcaaccccataagaatcgcgaaaagaaacggcgtcgctacacccactctttctatcttatacaacttacttgtgttagtacaggccaaattgaaggagagaaaaggccttttgaagttcgacgaaaaaactgccactcttgtggacgagtga

SEQ ID NO: 1531 - DNA, 1587 bp, Saccharomyces cerevisiae
atgtctgctaaagttccatctaacgccacgtttaagaacaaggaaaaacctcaagaggttcgcaaagccaacatcatcgctgcacgttctgttgcagatgccatccgtacttcattgggtcccaagggtatggacaagatgattaagacatctcgtggagaaatcatcatctctaatgatggccacaccattctaaaacagatggccattctgcatccggtggccagaatgctagtagaggtttctgccgcgcaggactcggaagccggtgatggtaccacttctgtggtgatcttgaccggagctctattgggtgctgctgagaggctgttaaacaagggcatccatccaaccatcattgcggactcctttcaaagtgctgcgaagagatctgtcgatattcttttagaaatgtgccataaggtttcgttgagcgatagagaacagctggttcgtgctgcatccacttctttgagttccaagattgtgtctcaatactcttcgtttttggcgcccttggcagtggactccgtattgaagatatctgatgaaaactctaagaatgttgacctgaacgatatcagactggtcaaaaaagttggtggtaccattgatgacacagaaatgatagatggtgtggtcttgacacaaacggcaatcaaatctgctggtggtccgacaagaaaggaaaaagcaaagattgggttaattcaattccaaatatctcctccaaagcccgacacagaaaataatatcatcgttaatgactatagacaaatggataagatccttaaagaagaaagagcgtatttgctaaatatctgtaaaaaaattaaaaaggccaagtgtaacgtgctgttgattcagaaatccatcttgagagatgcggtaaatgatttggctcttcatttcttgtcaaaattgaacataatggtggtaaaggatatcgagagagaagaaatcgagtttctgtcgaagggcttgggttgtaagccaattgctgatatagaattgttcaccgaagatagattgggttccgctgatttagttgaggagatcgatagcgatggttccaagatagttagagtaactggtataagaaacaataatgcaagaccaaccgtctctgttgttattcgtggtgcaaacaacatgatcattgatgaaacagagcgttccctccatgatgcactatgtgttattcgttgtctagtgaaagagagaggtttaatcgctggtggtggtgctccagaaattgaaatatcccgtaggttgagtaaggaagcaaggtctatggaaggtgtacaggcttttatttggcaagaatttgcctctgctttggaagttattccaacgactttggctgaaaacgcaggtttgaatagtatcaaagttgtcacagaattgcgctctaagcatgaaaatggtgaattgaatgacggtatctctgttagacgatctggtactacgaacacctatgaagaacacatcttacaacccgtacttgttagtacaagtgcaattaccttagcgtctgaatgtgttaaatccatcttacgtattgatgatattgcattcagccgttaa

SEQ ID NO: 1532 - DNA, 1587 bp, Artificial Sequence
  Description of Artificial Sequence: Synthetic polynucleotide
atgtctgctaaagttccatctaacgccacgtttaagaacaaggaaaaacctcaagaggttcgcaaagccaacatcatcgctgcacgttctgttgcagatgccatccgtacttctttgggtcccaagggtatggacaagatgattaagacatctcgtggagaaatcatcatctctaatgatggccacaccattttgaaacagatggccattttgcatccggtggccagaatgttggtagaggtttctgccgcgcaggactctgaagccggtgatggtaccacttctgtggtgatcttgaccggagctttattgggtgctgctgagaggttattaaacaagggcatccatccaaccatcattgcggactcctttcaaagtgctgcgaagagatctgtcgatattcttttagaaatgtgccataaggtttctttgagcgatagagaacagttggttcgtgctgcatccacttctttgagttccaagattgtgtctcaatactcttcttttttggcgcccttggcagtggactccgtattgaagatatctgatgaaaactctaagaatgttgacttgaacgatatcagattggtcaaaaaagttggtggtaccattgatgacacagaaatgatagatggtgtggtcttgacacaaacggcaatcaaatctgctggtggtccgacaagaaaggaaaaagcaaagattgggttaattcaattccaaatatctcctccaaagcccgacacagaaaataatatcatcgttaatgactatagacaaatggataagatccttaaagaagaaagagcgtatttgttgaatatctgtaaaaaaattaaaaaggccaagtgtaacgtgttattgattcagaaatccatcttgagagatgcggtaaatgatttggctcttcatttcttgagtaaattgaacataatggtggtaaaggatatcgagagagaagaaatcgagtttttatccaagggcttgggttgtaagccaattgctgatatagaattgttcaccgaagatagattgggttccgctgatttagttgaggagatcgatagcgatggttccaagatagttagagtaactggtataagaaacaataatgcaagaccaaccgtctctgttgttattcgtggtgcaaacaacatgatcattgatgaaacagagcgttccctccatgatgcattatgtgttattcgttgtttggtgaaagagagaggtttaatcgctggtggtggtgctccagaaattgaaatatcccgtaggttgagtaaggaagcaaggtctatggaaggtgtacaggcttttatttggcaagaatttgcctctgctttggaagttattccaacgactttggctgaaaacgcaggtttgaatagtatcaaagttgtcacagaattgcgctctaagcatgaaaatggtgaattgaatgacggtatctctgttagaagatctggtactacgaacacctatgaagaacacatcttacaacccgtacttgttagtacaagtgcaattaccttagcgtctgaatgtgttaaatccatcttacgtattgatgatattgcattcagccgttga

SEQ ID NO: 1533 - DNA, 852 bp, Saccharomyces cerevisiae
atgattcaaatggtgcccatttattcatgctccgcattacttcggagaactataccgaaaaggccattctatcatgtgttatcagggttaactgtacgctttaaggtaaacccgcaattaaattacaatcttttcagagatctcactaggagggaatatgctaccaatccgagtaaaactcctcatataaagagcaagttgctcaatattcccaacattttgactttatcacgaataggatgtacaccctttatcggactcttcattataacgaataatttgaccccagcattaggtttgtttgcattttccagcatcactgattttatggatgggtatatagcaagaaaatacggcctgaaaaccattgcaggaaccatattagatccacttgcagataaactactcatgatcacaacaactttggcattatctgtaccatccggccctcagattataccggtatctattgcggcgataattctgggtagagatgtgctactagccataagtgctttgtttatacgatatagcactttaaagttgaaatatcctggtcgtgtggcatggaattcctattgggatattgttcgctatcccagcgctgaggtcagaccttcccaactatcaaaatggaacacgtttttccaaatggtatatcttggatctggagtattattacttttatatgagaaagaagagggctgtgaaaaaaccgaggaggatttcgaagatagaaaacaggactttcaaaaggcctttagctatttagggtatgtaaccgccacgaccacaataatgagcggagtatcctacgcattaaagagaaacgcttttaaacttttaaaatag

SEQ ID NO: 1534 - DNA, 852 bp, Artificial Sequence
  Description of Artificial Sequence: Synthetic polynucleotide
atgattcaaatggtgcccatttattcttgctccgcattacttagaagaactataccgaaaaggccattctatcatgtgttaagtgggttaactgtacgctttaaggtaaacccgcaattaaattacaatcttttcagagatctcactaggagggaatatgctaccaatccgagtaaaactcctcatataaagagcaagttgctcaatattcccaacattttgactttaagtagaataggatgtacaccctttatcggactcttcattataacgaataatttgaccccagcattaggtttgtttgcattttccagcatcactgattttatggatgggtatatagcaagaaaatacggcttgaaaaccattgcaggaaccatattagatccacttgcagataaattactcatgatcacaacaactttggcattatctgtaccatccggccctcagattataccggtatctattgcggcgataattttgggtagagatgtgcttttagccataagtgctttgtttataagatatagcactttaaagttgaaatatcctggtcgtgtggcatggaattcctattgggatattgttcgctatcccagcgctgaggtcagaccttcccaattatccaaatggaacacgtttttccaaatggtatatcttggatctggagtattattacttttatatgagaaagaagagggctgtgaaaaaaccgaggaggatttcgaagatagaaaacaggactttcaaaaggcctttagctatttagggtatgtaaccgccacgaccacaataatgagcggagtatcctacgcattaaagagaaacgcttttaaacttttaaaatga

SEQ ID NO: 1535 - DNA, 2073 bp, Saccharomyces cerevisiae
atgaatgtattagtctataatggcccagggactacgccaggatcagttaagcatgctgttgaaagtttacgtgactttttggaaccctattacgccgtcagtactgtcaatgttaaggtattacagacagaaccatggatgtcaaagacctccgctgtagtttttcctggtggtgccgatcttccttacgttcaagcttgtcaacccattatttctcgattgaaacattttgttagcaaacaaggtggtgtctttatcggattttgtgcaggaggttactttggcaccagccgtgtagaatttgctcaaggtgaccctacaatggaagtatcaggaagcagggatttgcgattctttccgggaacaagcagaggacctgcgtacaatggatttcagtataacagcgaggccggtgcacgtgcagttaaattgaatcttccagatggctcacagttctcaacttatttcaatggaggagccgtttttgttgatgcagataaatttgataatgtcgagatcttggccacgtacgcagaacacccggatgtgccttcttctgactcaggaaaaggtcaaagtgaaaacccagctgctgtagtgctatgtacggtcggaagaggaaaggttttactcactggaccacaccctgaattcaacgtccgttttatgaggaaatccacagataagcattttcttgaaaccgttgtggaaaacctgaaagcacaggaaatcatgaggttgaaatttatgagaacggttcttaccaaaactgggttgaattgtaataatgacttcaattatgtaagagctccaaatttgacaccactgtttatggctagtgcacctaataagcggaattacttgcaagaaatggaaaacaacttagctcatcatggaatgcatgcaaataatgttgaactctgctcagaattaaacgccgaaactgactctttccaattttatagaggctatagagcctcttacgatgcagcaagttcgtccttgcttcataaagagccagatgaggttcctaagaccgtaatatttcctggcgtagatgaagatattccaccatttcaatatacgcccaattttgacatgaaagaatacttcaagtatctgaatgttcaaaacaccataggttctttacttctatatggtgaagttgttacatcaacgagtaccatattgaataataataaatccttattaagttcgatccctgaaagcactttacttcacgtgggtactattcaggtttctgggcgtgggagaggtggtaacacttggattaatcctaaaggtgtttgcgcatcaacggccgtcgtaacaatgccgcttcaatcgcctgtgactaatcgaaatatatcagttgtttttgtccagtatctttctatgcttgcttactgtaaggcgatactttcgtacgctcctggattttcagatattcctgttaggatcaaatggcccaatgacctttatgctttgagccccacctactataagcgtaaaaacttgaaattggttaacaccggttttgagcatacaaagttgcccttaggtgatatcgagcccgcttatcttaagatctctggtttattagttaatacccacttcataaacaataaatattgtttgctacttggctgtggtataaatttgactagtgatggtcctacaacttcattacaaacttggattgatatcctgaatgaagaacgccaacaattacaccttgatttattgccagcaataaaggcagaaaagctgcaggcactctatatgaataaccttgaggtcatattaaaacagtttattaactacggagctgcggaaatattgccaagttattatgagttgtggttacatagtaaccaaatagtaacattaccagatcacggaaatacgcaagccatgattactggtatcacggaagactacggtttactgattgcaaaagaattggtaagcggtagttccactcaatttacaggaaacgtttataatttacagccggacggtaacacttttgatatcttcaagagcttaattgctaaaaaggttcagagttaa

SEQ ID NO: 1536 - DNA, 2073 bp, Artificial Sequence
  Description of Artificial Sequence: Synthetic polynucleotide
atgaatgtattagtctataatggcccagggactacgccaggatctgttaagcatgctgttgaaagtttacgtgactttttggaaccctattacgccgtcagtactgtcaatgttaaggtattacagacagaaccatggatgtccaagacctccgctgtagtttttcctggtggtgccgatcttccttacgttcaagcttgtcaacccattatttctagattgaaacattttgttagcaaacaaggtggtgtctttatcggattttgtgcaggaggttactttggcaccagccgtgtagaatttgctcaaggtgaccctacaatggaagtatctggaagcagggatttgagattctttccgggaacaagcagaggacctgcgtacaatggatttcagtataacagcgaggccggtgcacgtgcagttaaattgaatcttccagatggctctcagttctctacttatttcaatggaggagccgtttttgttgatgcagataaatttgataatgtcgagatcttggccacgtacgcagaacacccggatgtgccttcttctgactctggaaaaggtcaaagtgaaaacccagctgctgtagtgttgtgtacggtcggaagaggaaaggttttactcactggaccacaccctgaattcaacgtccgttttatgaggaaatccacagataagcattttcttgaaaccgttgtggaaaacttgaaagcacaggaaatcatgaggttgaaatttatgagaacggttcttaccaaaactgggttgaattgtaataatgacttcaattatgtaagagctccaaatttgacaccattatttatggctagtgcacctaataagagaaattacttgcaagaaatggaaaacaacttagctcatcatggaatgcatgcaaataatgttgaactctgcagtgaattaaacgccgaaactgactctttccaattttatagaggctatagagcctcttacgatgcagcaagttcttccttgcttcataaagagccagatgaggttcctaagaccgtaatatttcctggcgtagatgaagatattccaccatttcaatatacgcccaattttgacatgaaagaatacttcaagtatttgaatgttcaaaacaccataggttctttacttttatatggtgaagttgttacaagtacgagtaccatattgaataataataaatccttattaagttctatccctgaaagcactttacttcacgtgggtactattcaggtttctgggcgtgggagaggtggtaacacttggattaatcctaaaggtgtttgcgcaagcacggccgtcgtaacaatgccgcttcaaagtcctgtgactaatagaaatatatctgttgtttttgtccagtatctttctatgcttgcttactgtaaggcgatactttcttacgctcctggattttctgatattcctgttaggatcaaatggcccaatgacctttatgctttgagccccacctactataagcgtaaaaacttgaaattggttaacaccggttttgagcatacaaagttgcccttaggtgatatcgagcccgcttatcttaagatctctggtttattagttaatacccacttcataaacaataaatattgtttgttacttggctgtggtataaatttgactagtgatggtcctacaacttctttacaaacttggattgatatcttgaatgaagaacgccaacaattacaccttgatttattgccagcaataaaggcagaaaagttacaggcactctatatgaataaccttgaggtcatattaaaacagtttattaactacggagctgcggaaatattgccaagttattatgagttgtggttacatagtaaccaaatagtaacattaccagatcacggaaatacgcaagccatgattactggtatcacggaagactacggtttattgattgcaaaagaattggtaagcggtagttccactcaatttacaggaaacgtttataatttacagccggacggtaacacttttgatatcttcaagagcttaattgctaaaaaggttcagagttga

SEQ ID NO: 1537 - DNA, 5202 bp, Saccharomyces cerevisiae
atggtaggacaacagtattctagtgctccactccgtacagtaaaagaggtccaattcggtcttttctcacctgaagaagttagagcaatcagtgtggccaaaattagatttccagagacaatggatgaaacccagacgagagcgaaaattggtggtctaaacgaccctaggttaggctctattgatcgtaatctgaagtgtcaaacttgtcaagagggtatgaacgaatgtcctggtcattttggtcacatagatttagcaaaacctgtatttcatgttggttttattgccaaaattaagaaagtatgtgagtgtgtctgtatgcactgtggtaagctattactggatgaacataatgaattaatgagacaagctctagcaatcaaagacagtaaaaaaaggtttgctgcaatttggactttatgtaaaacaaaaatggtctgcgaaacagatgtcccttctgaagatgatcctactcagctcgtatcaaggggaggttgtggtaatacacagcctacaattcgtaaggatgggttgaaattagttggtagttggaaaaaagatagagccacgggggatgcggatgaaccagaactaagagttttaagtacggaggaaatcttgaatatttttaagcatatctcagtaaaagacttcactagtttgggtttcaacgaagttttttctcgtccagaatggatgattttaacatgccttcctgtcccaccaccaccggtgcgtccatccatttccttcaatgaatctcaaagaggtgaggatgatttaacctttaaacttgctgatattttaaaagctaatattagtttggaaacactagagcataacggtgctccacatcatgctattgaagaagcagagagtttattacaatttcatgttgccacttatatggataatgatattgctggtcaaccacaagctcttcaaaagtccggccgtcccgttaaatctattcgtgctcgtttgaagggtaaagagggtcgtatcagaggtaatttaatgggtaagcgtgtggatttttcggcaagaactgttatttctggtgatcctaatttggaattagaccaagtcggtgttccaaaatctattgccaagactttaacatacccagaagtggtcacaccatataacatagatcgtctgacgcaacttgttaggaatggaccaaatgagcaccccggtgccaaatacgtcattcgtgatagcggagaccgtatagatttaagatacagtaaaagggcaggtgatattcaattacagtatgggtggaaagttgaacgtcatattatggacaatgatccagttttattcaaccgtcaaccttcgttgcacaaaatgtccatgatggcccacagagtaaaagttattccatattctacatttagattgaatttgtccgttacatctccatacaatgccgatttcgacggtgacgaaatgaatcttcacgttcctcagtctgaggaaacaagggcggaactttctcaattatgtgctgttcctctgcaaattgtttcaccacaatctaacaaaccttgtatgggtattgttcaagatactttgtgtggtattcgtaaactgacattaagagatacatttatagaacttgatcaagttttgaatatgctttattgggttccagattgggatggtgttattccgacacctgcaattatcaagcccaaacctttgtggtccggtaaacaaatcttgtctgtggctatcccaaacggtattcatttacaacgttttgatgagggcactactctgctttctccaaaggataatggtatgcttattattgacggtcaaatcatttttggtgtagtagagaaaaaaaccgttggttcctccaatggtggtttaattcatgttgttacgagagaaaagggacctcaagtttgtgctaagttgtttggtaacatacagaaagttgttaacttttggttactacataatgggttttcaacaggtattggtgataccattgcggacggcccaacaatgagggaaattacagagacaattgcagaggctaaaaagaaagttttggatgttacgaaagaagcccaggcaaacttattgactgctaaacatggtatgactctccgtgagtcttttgaggataacgttgttcggttcctaaatgaagcaagagataaggcaggtcgtttagctgaagtcaatttgaaagatttgaacaatgtgaaacaaatggttatggcaggttccaagggttcatttattaatatcgcgcaaatgtcagcttgtgtaggacagcaatctgttgaaggtaaacgtattgcttttgggttcgttgatcgtaccttacctcatttctctaaagatgattactccccagagtctaaaggttttgttgagaactcatatttgagaggtttgaccccacaagaattttttttccatgcaatgggtggtcgtgaaggtcttatcgataccgccgtcaaaacagccgaaacaggttatattcaacgtcgtttagtgaaagctctagaagatatcatggttcattacgataacaccacaagaaactcattgggtaacgttattcagtttatttatggtgaagatggtatggatgctgcgcatattgaaaagcaatcgctagatactattggtggctccgatgcagcttttgaaaagagatacagagttgatttattgaatacagaccatacccttgatccctcactattggaatccggatctgagatacttggcgatttgaaacttcaagttctcctggatgaagaatacaaacaattagtgaaagatcgtaaatttttgagggaagtttttgttgatggtgaagcaaactggccattaccagtcaacataagacgtattattcaaaatgctcaacaaactttccacatagatcatacgaaaccatctgatttaacaatcaaagacatcgttcttggtgtaaaggatttgcaagaaaacttattagtgttgcgtggtaagaatgaaattatacaaaatgcccagcgagatgcagttacattgttctgctgtttattacgttcccgtttggccacacgtagagttctacaagagtacagactaacaaaacaggcattcgattgggtattaagtaatatcgaggcacaattcctccgttctgttgttcaccctggtgaaatggttggtgttctagcagcccaatccattggtgaaccagccacacaaatgacccttaacaccttccattttgctggtgttgcttccaaaaaagttacttctggtgtcccccgtttaaaggaaattttgaatgtggccaaaaacatgaaaaccccttccttgactgtatacttagagcctggtcatgctgccgatcaagaacaagcgaagttgatcagatctgctatcgagcataccactttaaagagtgtcactattgcttcagaaatttactatgatcctgatccacgttccacagttattccagaagatgaagaaattatccaacttcatttctcattattggatgaagaggctgaacaatcttttgaccaacaatcaccttggttattacgtctggaactggatcgtgcagcaatgaatgataaagacttaacaatgggtcaggttggtgaaagaatcaagcaaacattcaaaaatgatttgtttgttatctggtctgaagacaacgatgagaagttgatcatccgttgtcgtgttgttcgtccaaagtcactagatgctgagactgaagcagaagaagatcatatgttgaagaaaattgagaacacaatgttagagaatattacattacgtggtgtagagaacatcgagcgtgttgtcatgatgaaatatgaccgtaaagtaccaagtccaactggtgaatacgttaaggaacctgaatgggtgttggaaacagatggtgttaacttatctgaagttatgactgttcctggtatcgacccaaccagaatctataccaactccttcattgatataatggaagttctaggtattgaagctggtcgtgcagccttgtataaagaagtttacaatgttattgcttctgatggttcgtatgttaactaccgtcatatggctttgttagtcgatgttatgacaacccaaggtggcttaacttctgttactcgtcatggtttcaacagatcaaatacaggtgccttaatgagatgttcatttgaagaaactgtcgaaattttgtttgaagctggtgcttcagccgaattagatgattgtcgtggtgtttcggaaaatgtcattcttggtcaaatggctccaatcggtaccggtgcatttgatgtgatgatcgatgaggagtcactggtaaaatacatgccagaacaaaaaataactgagattgaagacggacaagatggtggcgtcacaccatacagtaacgaaagtggtttggtcaatgcagatcttgacgttaaagatgagctaatgttttcacctctggttgattcgggttcaaatgacgctatggctggaggatttacagcgtacggtggtgctgattatggtgaagccacgtctccatttggtgcttatggtgaagcacctacatctcccggatttggagtctcctcaccaggcttttctccaacttccccaacatactctcctacctctccagcgtactcaccaacatcaccatcgtactcaccaacatcaccatcgtactcgccaacatcaccatcgtactcacctacatcaccatcgtattcaccaacgtcaccatcatattcgccaacgtcaccatcatattcgccaacgtcgccatcgtattctccaacgtcaccatcgtattcgccaacgtcgccttcctactctcccacgtcgccaagctacagccctacgtctccttcttattctcctacatctccatcatactctcctacgtcaccaagttacagcccaacgtcaccaagttacagcccaacgtctccagcctattccccaacatcaccaagttatagtcctacatcgccttcatactctccaacatcaccatcctattccccaacatcaccttcttactctcccacctctccaaactatagccctacttcaccttcttactccccaacatctccaggctacagcccaggatctcctgcatattctccaaagcaagacgaacaaaagcataatgaaaatgaaaattccagatga

SEQ ID NO: 1538 - DNA, 5202 bp, Artificial Sequence
  Description of Artificial Sequence: Synthetic polynucleotide
atggtaggacaacagtattctagtgctccactccgtacagtaaaagaggtccaattcggtcttttcagtcctgaagaagttagagcaatcagtgtggccaaaattagatttccagagacaatggatgaaacccagacgagagcgaaaattggtggtttgaacgaccctaggttaggctctattgatcgtaatttgaagtgtcaaacttgtcaagagggtatgaacgaatgtcctggtcattttggtcacatagatttagcaaaacctgtatttcatgttggttttattgccaaaattaagaaagtatgtgagtgtgtctgtatgcactgtggtaagcttttattagatgaacataatgaattaatgagacaagctttggcaatcaaagacagtaaaaaaaggtttgctgcaatttggactttatgtaaaacaaaaatggtctgcgaaacagatgtcccttctgaagatgatcctactcagctcgtaagtaggggaggttgtggtaatacacagcctacaattcgtaaggatgggttgaaattagttggtagttggaaaaaagatagagccacgggggatgcggatgaaccagaattgagagttttaagtacggaggaaatcttgaatatttttaagcatatctctgtaaaagacttcactagtttgggtttcaacgaagttttttctcgtccagaatggatgattttaacatgccttcctgtcccaccaccaccggtgcgtccatccatttccttcaatgaatctcaaagaggtgaggatgatttaacctttaaacttgctgatattttaaaagctaatattagtttggaaacattagagcataacggtgctccacatcatgctattgaagaagcagagagtttattacaatttcatgttgccacttatatggataatgatattgctggtcaaccacaagctcttcaaaagtccggccgtcccgttaaatctattcgtgctcgtttgaagggtaaagagggtcgtatcagaggtaatttaatgggtaagcgtgtggatttttctgcaagaactgttatttctggtgatcctaatttggaattagaccaagtcggtgttccaaaatctattgccaagactttaacatacccagaagtggtcacaccatataacatagatcgtctcacgcaacttgttaggaatggaccaaatgagcaccccggtgccaaatacgtcattcgtgatagcggagaccgtatagatttaagatacagtaaaagggcaggtgatattcaattacagtatgggtggaaagttgaacgtcatattatggacaatgatccagttttattcaaccgtcaaccttctttgcacaaaatgtccatgatggcccacagagtaaaagttattccatattctacatttagattgaatttgtccgttacatctccatacaatgccgatttcgacggtgacgaaatgaatcttcacgttcctcagtctgaggaaacaagggcggaactttctcaattatgtgctgttcctttacaaattgtttctccacaatctaacaaaccttgtatgggtattgttcaagatactttgtgtggtattcgtaaattaacattaagagatacatttatagaacttgatcaagttttgaatatgctttattgggttccagattgggatggtgttattccgacacctgcaattatcaagcccaaacctttgtggtccggtaaacaaatcttgtctgtggctatcccaaacggtattcatttacaacgttttgatgagggcactactttactttctccaaaggataatggtatgcttattattgacggtcaaatcatttttggtgtagtagagaaaaaaaccgttggttcctccaatggtggtttaattcatgttgttacgagagaaaagggacctcaagtttgtgctaagttgtttggtaacatacagaaagttgttaacttttggttattacataatgggttttctacaggtattggtgataccattgcggacggcccaacaatgagggaaattacagagacaattgcagaggctaaaaagaaagttttggatgttacgaaagaagcccaggcaaacttattgactgctaaacatggtatgactctccgtgagtcttttgaggataacgttgttagattcttgaatgaagcaagagataaggcaggtcgtttagctgaagtcaatttgaaagatttgaacaatgtgaaacaaatggttatggcaggttccaagggttcttttattaatatcgcgcaaatgtctgcttgtgtaggacagcaatctgttgaaggtaaacgtattgcttttgggttcgttgatcgtaccttacctcatttctctaaagatgattactccccagagtctaaaggttttgttgagaacagttatttgagaggtttgaccccacaagaattttttttccatgcaatgggtggtcgtgaaggtcttatcgataccgccgtcaaaacagccgaaacaggttatattcaacgtcgtttagtgaaagctttggaagatatcatggttcattacgataacaccacaagaaactctttgggtaacgttattcagtttatttatggtgaagatggtatggatgctgcgcatattgaaaagcaatctttagatactattggtggctccgatgcagcttttgaaaagagatacagagttgatttattgaatacagaccatacccttgatccctctttgttggaatccggatctgagatacttggcgatttgaaacttcaagttctcttggatgaagaatacaaacaattagtgaaagatcgtaaatttttgagggaagtttttgttgatggtgaagcaaactggccattaccagtcaacataagacgtattattcaaaatgctcaacaaactttccacatagatcatacgaaaccatctgatttaacaatcaaagacatcgttcttggtgtaaaggatttgcaagaaaacttattagtgttgcgtggtaagaatgaaattatacaaaatgcccagagagatgcagttacattgttctgctgtttattacgttcccgtttggccacacgtagagttttgcaagagtacagattgacaaaacaggcattcgattgggtattaagtaatatcgaggcacaattcctccgttctgttgttcaccctggtgaaatggttggtgttttagcagcccaatccattggtgaaccagccacacaaatgacccttaacaccttccattttgctggtgttgcttccaaaaaagttacttctggtgtcccccgtttaaaggaaattttgaatgtggccaaaaacatgaaaaccccttccttgactgtatacttagagcctggtcatgctgccgatcaagaacaagcgaagttgatcagatctgctatcgagcataccactttaaagagtgtcactattgcttctgaaatttactatgatcctgatccacgttccacagttattccagaagatgaagaaattatccaacttcatttctctttattggatgaagaggctgaacaatcttttgaccaacaaagtccttggttattacgtttagaattagatcgtgcagcaatgaatgataaagacttaacaatgggtcaggttggtgaaagaatcaagcaaacattcaaaaatgatttgtttgttatctggtctgaagacaacgatgagaagttgatcatccgttgtcgtgttgttcgtccaaagtctttagatgctgagactgaagcagaagaagatcatatgttgaagaaaattgagaacacaatgttagagaatattacattacgtggtgtagagaacatcgagcgtgttgtcatgatgaaatatgaccgtaaagtaccaagtccaactggtgaatacgttaaggaacctgaatgggtgttggaaacagatggtgttaacttatctgaagttatgactgttcctggtatcgacccaaccagaatctataccaactccttcattgatataatggaagttttaggtattgaagctggtcgtgcagccttgtataaagaagtttacaatgttattgcttctgatggttcttatgttaactaccgtcatatggctttgttagtcgatgttatgacaacccaaggtggcttaacttctgttactcgtcatggtttcaacagatctaatacaggtgccttaatgagatgttcctttgaagaaactgtcgaaattttgtttgaagctggtgcttctgccgaattagatgattgtcgtggtgtttctgaaaatgtcattcttggtcaaatggctccaatcggtaccggtgcatttgatgtgatgatcgatgaggagtctttagtaaaatacatgccagaacaaaaaataactgagattgaagacggacaagatggtggcgtcacaccatacagtaacgaaagtggtttggtcaatgcagatcttgacgttaaagatgagttgatgttttctcctttggttgattctggtagtaatgacgctatggctggaggatttacagcgtacggtggtgctgattatggtgaagccacgtctccatttggtgcttatggtgaagcacctacatctcccggatttggagtctcctctccaggcttttctccaacttccccaacatactctcctacctctccagcgtactctccaacatctccatcttactctccaacatctccatcttactctccaacatctccatcttactctcctacatctccatcttattctccaacgtctccatcttattctccaacgtctccatcttattctccaacgtctccatcttattctccaacgtctccatcttattctccaacgtctccttcctactctcccacgtctccaagctacagccctacgtctccttcttattctcctacatctccatcttactctcctacgtctccaagttacagcccaacgtctccaagttacagcccaacgtctccagcctattccccaacatctccaagttatagtcctacatctccttcttactctccaacatctccatcctattccccaacatctccttcttactctcccacctctccaaactatagccctacttctccttcttactccccaacatctccaggctacagcccaggatctcctgcatattctccaaagcaagacgaacaaaagcataatgaaaatgaaaattccagatga

SEQ ID NO: 1539 - DNA, 672 bp, Saccharomyces cerevisiae
atgaaaaccaataagaaaatttctaaaagaagaagcctgaaaaatctccatggtgccttaaaaggactattgaaagagtccggcaagaagagtgagtccaaaatacgaaaacatagcgattgcaatcctgttcatcgagtatatccgccaaatatcgaaaaacggaagaccaaaaaggacgatggaatttcacggccaattgctgaaagaaatggtcatgtgtatataatgtccaaggaaaaccacatcatccctaaactaaccgatgatgaagtcatggagcgccacaaactagcagacgaaaacatgagaaaagtgtggtccaacatcataagcaaatacgagtctattgaagaacaaggagacctcgtagacctgaaaactggtgaaatagttgaagataatgggcatatcaagacgctgacggccaacaacagcacgaaagataaaagaacaaaatacacaagcgtgctcagagacattatcgacatcagcgacgaggaagatggtgataaaaatgatgaatatactctttgggctaacgatagcgaggcaagcgattcagaggtggatgctgacaacgacactgaagaggaaaaagacgagaaattgatagacgcagatttcaagaagtacgaggccaaactctcgaaaaggatattacgagattaa

SEQ ID NO: 1540 - DNA, 672 bp, Artificial Sequence
  Description of Artificial Sequence: Synthetic polynucleotide
atgaaaaccaataagaaaatttctaaaagaagaagcttgaaaaatctccatggtgccttaaaaggattattgaaagagtccggcaagaagagtgagtccaaaataagaaaacatagcgattgcaatcctgttcatagagtatatccgccaaatatcgaaaaaagaaagaccaaaaaggacgatggaattagtaggccaattgctgaaagaaatggtcatgtgtatataatgtccaaggaaaaccacatcatccctaaattgaccgatgatgaagtcatggagcgccacaaattggcagacgaaaacatgagaaaagtgtggtccaacatcataagcaaatacgagtctattgaagaacaaggagacctcgtagacttgaaaactggtgaaatagttgaagataatgggcatatcaagacgttaacggccaacaacagcacgaaagataaaagaacaaaatacacaagcgtgctcagagacattatcgacatcagcgacgaggaagatggtgataaaaatgatgaatatactctttgggctaacgatagcgaggcaagcgattctgaggtggatgctgacaacgacactgaagaggaaaaagacgagaaattgatagacgcagatttcaagaagtacgaggccaaactctctaaaaggatattaagagattga

SEQ ID NO: 1541 - DNA, 2292 bp, Saccharomyces cerevisiae
atgaacgatagccaaaactgcctacgacagagggaagaaaatagtcatctgaatcctggaaatgacttcggccaccaccagggtgcagaatgtacgataaatcataacaacatgccacaccgcaatgcatacacagaatctacgaatgacacggaagcaaagtccatagtgatgtgcgacgatcctaacgcataccaaatttcctacacaaataatgagccggcgggagatggagctatagaaaccacgtccattctactatcgcaaccgctgccgctgcgatcgaatgtgatgtctgtcttggtaggcatatttgttgccgtggggggcttcttgtttgggtatgacactggacttataaacagtatcacggatatgccgtatgttaaaacctacattgctccgaaccattcatatttcaccactagccaaatagccatactcgtatcattcctctccctaggaacatttttcggtgcgttaatcgctccctatatttcagattcatatggtaggaagccaacaattatgtttagtaccgctgttatcttttccatcggaaactcattacaggtggcatccggtggcttggtgctattaatcgtcggaagagtgatctcaggtatcgggatcgggataatctctgctgtggttcctctttatcaagctgaagctgcgcagaagaaccttagaggtgccatcatttccagttatcagtgggctatcactattgggttactcgtgtccagtgcagtatcgcaaggaactcattccaaaaatggcccgtcttcatatagaataccaattggtttgcagtacgtttggtcaagtattttagctgtgggcatgatattccttccagagagtccaagatattacgtcttgaaggatgaactcaataaagctgcaaaatcgttatcctttttaagaggcctcccgatcgaagatccaagactcttagaggagcttgttgaaataaaagccacttacgattatgaagcatcgttcggcccgtcaacacttttagattgtttcaaaacaagtgaaaatagacccaaacagattttacgaatatttactggtatcgccatacaagcttttcaacaggcatctggtatcaattttatattctactatggagttaattttttcaacaacacaggggtggacaactcttacttggtttcttttatcagctatgccgtcaacgtcgccttcagtataccgggtatgtatttagtggatcgaattggtagaagaccagtccttcttgctggaggtgtcataatggcaatagcaaatttagtcattgccatcgttggtgtttccgagggaaaaactgttgttgctagtaaaattatgattgcttttatatgccttttcattgctgcattttcggcgacatggggtggtgtcgtgtgggtggtatctgctgaactgtacccacttggtgtcagatcgaaatgtaccgccatatgcgctgccgcaaattggctagttaatttcacctgtgccctgattacaccttacattgttgatgtcggatcacacacttcttcaatggggcccaaaatattcttcatttggggcggcttaaatgtcgtggccgttatcgttgtttatttcgctgtttatgaaacgaggggattgactttggaagagattgacgagttatttagaaaggccccaaatagcgtcatttctagcaaatggaacaaaaaaataaggaaaaggtgcttagcctttcccatttcacaacaaatagagatgaaaactaatatcaagaacgctggaaagttggacaacaacaacagtccaattgtacaggatgacagccacaacataatcgatgtggatggattcttggagaaccaaatacagtccaatgatcatatgattgcggcggataaaggaagtggctcgttagtaaacatcatcgatactgcccccctaacatctacagagtttaaacccgtggaacatccgccagtaaattacgtcgacttggggaatggtttgggtctgaatacatacaatagaggtcctccttctatcatttctgactctactgatgagttctatgaggaaaatgactcttcttattacaataacaacactgaacgaaatggagctaacagcgtcaatacatatatggctcaactaatcaatagctcatctactacaagcaacgacacatcgttctctccatcacacaatagcaatgcaagaacgtcctctaattggacgagtgacctcgctagtaagcacagccaatacacttccccccaataa

SEQ ID NO: 1542 - DNA, 2292 bp, Artificial Sequence
  Description of Artificial Sequence: Synthetic polynucleotide
atgaacgatagccaaaactgccttcgtcagagggaagaaaatagtcatttgaatcctggaaatgacttcggccaccaccagggtgcagaatgtacgataaatcataacaacatgccacaccgcaatgcatacacagaatctacgaatgacacggaagcaaagtccatagtgatgtgcgacgatcctaacgcataccaaatttcctacacaaataatgagccggcgggagatggagctatagaaaccacgtccattttattatctcaaccgttaccgcttagatctaatgtgatgtctgtcttggtaggcatatttgttgccgtggggggcttcttgtttgggtatgacactggacttataaacagtatcacggatatgccgtatgttaaaacctacattgctccgaaccattcttatttcaccactagccaaatagccatactcgtatctttcctctccttgggaacatttttcggtgcgttaatcgctccctatatttctgattcttatggtaggaagccaacaattatgtttagtaccgctgttatcttttccatcggaaactctttacaggtggcatccggtggcttggtgttattaatcgtcggaagagtgatcagtggtatcgggatcgggataatctctgctgtggttcctctttatcaagctgaagctgcgcagaagaaccttagaggtgccatcatttccagttatcagtgggctatcactattgggttactcgtgtccagtgcagtatctcaaggaactcattccaaaaatggcccgtcttcttatagaataccaattggtttgcagtacgtttggtctagtattttagctgtgggcatgatattccttccagagagtccaagatattacgtcttgaaggatgaactcaataaagctgcaaaatctttatcctttttaagaggcctcccgatcgaagatccaagactcttagaggagcttgttgaaataaaagccacttacgattatgaagcatctttcggcccgtccacacttttagattgtttcaaaacaagtgaaaatagacccaaacagattttaagaatatttactggtatcgccatacaagcttttcaacaggcatctggtatcaattttatattctactatggagttaattttttcaacaacacaggggtggacaactcttacttggtttcttttatcagctatgccgtcaacgtcgccttcagtataccgggtatgtatttagtggatagaattggtagaagaccagtccttcttgctggaggtgtcataatggcaatagcaaatttagtcattgccatcgttggtgtttccgagggaaaaactgttgttgctagtaaaattatgattgcttttatatgccttttcattgctgcattttctgcgacatggggtggtgtcgtgtgggtggtatctgctgaattatacccacttggtgtcagaagtaaatgtaccgccatatgcgctgccgcaaattggttagttaatttcacctgtgccttaattacaccttacattgttgatgtcggatctcacacttcttctatggggcccaaaatattcttcatttggggcggcttaaatgtcgtggccgttatcgttgtttatttcgctgtttatgaaacgaggggattgactttggaagagattgacgagttatttagaaaggccccaaatagcgtcatttctagcaaatggaacaaaaaaataaggaaaaggtgcttagcctttcccatttctcaacaaatagagatgaaaactaatatcaagaacgctggaaagttggacaacaacaacagtccaattgtacaggatgacagccacaacataatcgatgtggatggattcttggagaaccaaatacagtccaatgatcatatgattgcggcggataaaggaagtggctctttagtaaacatcatcgatactgcccccttgacatctacagagtttaaacccgtggaacatccgccagtaaattacgtcgacttggggaatggtttgggtttgaatacatacaatagaggtcctccttctatcatttctgactctactgatgagttctatgaggaaaatgactcttcttattacaataacaacactgaaagaaatggagctaacagcgtcaatacatatatggctcaattgatcaatagctcttctactacaagcaacgacacatctttctctccatctcacaatagcaatgcaagaacgtcctctaattggacgagtgacctcgctagtaagcacagccaatacacttccccccaatga

SEQ ID NO: 1543 - DNA, 546 bp, Saccharomyces cerevisiae
atgggtctatacgcttctaagttattcagcaatctttttggcaacaaagagatgcgtatacttatggttggtctagatggtgccggtaagaccaccgttttgtacaagttgaagttgggcgaagttatcactaccattccaaccattggtttcaacgttgagactgtccaatataagaacatttccttcactgtctgggacgtcggtggacaagacaggattagatctttatggagacactactacagaaacaccgaaggtgttatttttgtcatcgattccaacgatagatcgcgtattggtgaagccagagaagtcatgcagagaatgctgaatgaagatgaattgagaaatgctgtctggttagtcttcgctaacaaacaagatttgccagaagccatgtctgctgctgaaatcaccgaaaaattaggtttacattctattagaaaccgtccatggtttatccagtctacttgtgcaacctcgggtgaaggtctgtacgaaggtctggagtggttaagcaacaacttgaagaatcaatcctaa

SEQ ID NO: 1544 - DNA, 546 bp, Artificial Sequence
  Description of Artificial Sequence: Synthetic polynucleotide
atgggtttatacgcttctaagttattcagcaatctttttggcaacaaagagatgcgtatacttatggttggtttggatggtgccggtaagaccaccgttttgtacaagttgaagttgggcgaagttatcactaccattccaaccattggtttcaacgttgagactgtccaatataagaacatttccttcactgtctgggacgtcggtggacaagacaggattagatctttatggagacactactacagaaacaccgaaggtgttatttttgtcatcgattccaacgatagatctcgtattggtgaagccagagaagtcatgcagagaatgttgaatgaagatgaattgagaaatgctgtctggttagtcttcgctaacaaacaagatttgccagaagccatgtctgctgctgaaatcaccgaaaaattaggtttacattctattagaaaccgtccatggtttatccagtctacttgtgcaacctctggtgaaggtttatacgaaggtttagagtggttaagcaacaacttgaagaatcaatcctga

SEQ ID NO: 1545 - DNA, 363 bp, Saccharomyces cerevisiae
atggccggcgttaaagcttacgaactaagaaccaaatccaaggaacaattagcttctcaattggttgacttgaaaaaggagttggctgaattgaaggtccaaaagttgtccagaccatctttgccaaagatcaagaccgtcagaaagagtatcgcctgtgtcttgaccgtcatcaacgaacaacaaagagaagctgttagacaattatacaagggtaagaagtaccaaccaaaggacttgagagccaagaagaccagagctttgagaagagctttgaccaaattcgaagcttcccaagttaccgaaaagcaaagaaagaagcaaatcgctttcccacaaagaaagtacgctatcaaggcttaa

SEQ ID NO: 1546 - DNA, 363 bp, Artificial Sequence
  Description of Artificial Sequence: Synthetic polynucleotide
atggccggcgttaaagcttacgaattgagaaccaaatccaaggaacaattagcttctcaattggttgacttgaaaaaggagttggctgaattgaaggtccaaaagttgtccagaccatctttgccaaagatcaagaccgtcagaaagagtatcgcctgtgtcttgaccgtcatcaacgaacaacaaagagaagctgttagacaattatacaagggtaagaagtaccaaccaaaggacttgagagccaagaagaccagagctttgagaagagctttgaccaaattcgaagcttcccaagttaccgaaaagcaaagaaagaagcaaatcgctttcccacaaagaaagtacgctatcaaggcttga

SEQ ID NO: 1547 - DNA, 609 bp, Saccharomyces cerevisiae
atggccgaagaaagtaccgactttagtcaattcgaagaggagagaaacaacgatcagtataaagtttcagccaaaaaaactgttgacgaatacaaaaatctggatgctgaagacgaatccttggcgaaatggaaagagtctttgggtctaagttcagacgtcttgccattggaatttcccggtgacaaaaggaaggtggttgttcaaaaaattcaattactagtcaatacagaaccaaatcctatcacatttgatcttaccaacgaaaagacaatcaaagaactggcatctaaaagatacaaaattaaagaaaattctatttataagttgaagattgtgttcaaagttcaacatgaaattatcacagggttgcgatatgtccagtatatcaaaaaagcgggtattgccgttgacaagatagacgatcatttgggatcgtatgctcctaataccaagaccaaaccattttatgaggtggaactaccggaaagtgaagcacctagtgggtttttagcaagaggtaactacagtgccgtatcaaaattcattgatgatgataaaactaaccacttgactttaaattggggggtcgaaattgtcaaaaaataa

SEQ ID NO: 1548 - DNA, 609 bp, Artificial Sequence
  Description of Artificial Sequence: Synthetic polynucleotide
atggccgaagaaagtaccgactttagtcaattcgaagaggagagaaacaacgatcagtataaagtttctgccaaaaaaactgttgacgaatacaaaaatttggatgctgaagacgaatccttggcgaaatggaaagagtctttgggtttgagtagtgacgtcttgccattggaatttcccggtgacaaaaggaaggtggttgttcaaaaaattcaattattggtcaatacagaaccaaatcctatcacatttgatcttaccaacgaaaagacaatcaaagaattggcatctaaaagatacaaaattaaagaaaattctatttataagttgaagattgtgttcaaagttcaacatgaaattatcacagggttgagatatgtccagtatatcaaaaaagcgggtattgccgttgacaagatagacgatcatttgggatcctatgctcctaataccaagaccaaaccattttatgaggtggaattaccggaaagtgaagcacctagtgggtttttagcaagaggtaactacagtgccgtatccaaattcattgatgatgataaaactaaccacttgactttaaattggggggtcgaaattgtcaaaaaatga

SEQ ID NO: 1549 - DNA, 1110 bp, Saccharomyces cerevisiae
atggatacagatttagatgtgcctatgcaagatgctgttaccgaacagctgactcccacagtatctgaagatatggatctcaacaacaattcatcggataataatgcagaagaattctcggttgatgatttaaaacctggttcctcgggcatagcagatcacaaatcttccaaaccactagaactgaataacacaaatataaatcagcttgaccaatggattgagcatttgagtaaatgcgagccactatcagaagacgatgtagcacgactatgtaaaatggcggtggacgtgttgcagttcgaggagaatgttaaaccaattaacgtgcctgttaccatttgtggtgacgtacacggtcaattccatgacttgttagaactttttaagattggtggcccttgtcctgacaccaattaccttttcatgggtgattacgtggatagaggatattattctgttgaaactgtatcttacctagttgccatgaaagtcagatacccacatagaattacgatactgagaggcaatcacgagtctaggcagattacccaagtatacgggttttatgatgaatgtttgagaaagtacggcagtgcaaacgtgtggaaaatgttcacagatcttttcgattattttcctataaccgcattagtagataataaaattttctgtctgcatggaggactttcccccatgatagaaaccatagatcaggtgagagagttgaacagaatacaggaagtgcctcatgaaggtcctatgtgtgaccttctatggtcagaccctgacgatagaggcggatggggaatcagtcccagaggtgcaggcttcacttttggacaagatgtcagtgagcaattcaatcacactaatgatctatcactaatagcaagagctcaccaattggtaatggaaggctatgcttggtctcaccagcaaaatgttgtcaccattttcagtgctcctaattactgctacagatgtggtaatcaagcagctatcatggaagtggacgagaatcataatagacaattcttacagtacgacccatccgtaagaccaggtgaacctagcgtcagcagaaagacgccagattactttttatga

SEQ ID NO: 1550 - DNA, 1110 bp, Artificial Sequence
  Description of Artificial Sequence: Synthetic polynucleotide
atggatacagatttagatgtgcctatgcaagatgctgttaccgaacagttgactcccacagtatctgaagatatggatctcaacaacaattcttctgataataatgcagaagaattctctgttgatgatttaaaacctggttccagtggcatagcagatcacaaatcttccaaaccattggaattgaataacacaaatataaatcagcttgaccaatggattgagcatttgagtaaatgcgagccattatctgaagacgatgtagcaagattatgtaaaatggcggtggacgtgttgcagttcgaggagaatgttaaaccaattaacgtgcctgttaccatttgtggtgacgtacacggtcaattccatgacttgttagaactttttaagattggtggcccttgtcctgacaccaattaccttttcatgggtgattacgtggatagaggatattattctgttgaaactgtatcttacttggttgccatgaaagtcagatacccacatagaattacgatattaagaggcaatcacgagtctaggcagattacccaagtatacgggttttatgatgaatgtttgagaaagtacggcagtgcaaacgtgtggaaaatgttcacagatcttttcgattattttcctataaccgcattagtagataataaaattttctgtttgcatggaggactttcccccatgatagaaaccatagatcaggtgagagagttgaacagaatacaggaagtgcctcatgaaggtcctatgtgtgaccttttatggtctgaccctgacgatagaggcggatggggaatcagtcccagaggtgcaggcttcacttttggacaagatgtcagtgagcaattcaatcacactaatgatttaagtttgatagcaagagctcaccaattggtaatggaaggctatgcttggtctcaccagcaaaatgttgtcaccattttcagtgctcctaattactgctacagatgtggtaatcaagcagctatcatggaagtggacgagaatcataatagacaattcttacagtacgacccatccgtaagaccaggtgaacctagcgtcagcagaaagacgccagattactttttatga

SEQ ID NO: 1551 - DNA, 78 bp, Saccharomyces cerevisiae
atgagagctaagtggagaaagaagagaactagaagacttaagagaaagagacggaaggtgagagccagatccaaataa

SEQ ID NO: 1552 - DNA, 78 bp, Artificial Sequence
  Description of Artificial Sequence: Synthetic oligonucleotide
atgagagctaagtggagaaagaagagaactagaagacttaagagaaagagaagaaaggtgagagccagatccaaatga

SEQ ID NO: 1553 - DNA, 1314 bp, Saccharomyces cerevisiae
atgggggattctaattccagccaagaagcgtattctgatacaacatccacgaacgcttctagaatcgcagatcaaaatcaacttaatttaaacgtggatcttgaaaaaaatcaaacagtaaggaagtcaggttcactggaagcattacagaatgcaaagatacatgttcccaaacacagtgatggttcaccactagactatccaaaattaaatacttacacgtttgtgcctaccacagtgccgccttatgttttagaggcgcagtttgataaattaagacttcaggataagggcaccgttgatggaaatgttaccgatgataaaaatcttccaaaagagtttaaatggggccagtttgcatctaccatcggctgtcattctgcatacactagagaccaaaactacaatcctagtcacaaatcctacgatggttactctctatcatcatctacctcatcaaaaaatgcggctcttagagaaattttaggtgacatgtgcagcgagtggggaggtgaagaacgactagaaggtgttctacattcagaaataggtgccaatttagagttcaacacgacagaagagagaaaagagtggttacaatatatcgaaaaggtaaaagatttctattacggtgataataagaagaacccagaatcacccgaatcagtacacaacaaagtttacaagtcagattgggtaaatgagctcaataaagagagagaaaagtggcggaggttaaagcaaaggaagttacaacagtggagacctcctttgacgtcgctattacttgataatcaatatttgattttgggtttgaggattttcactggtatattatcgtgcatttcacttgctctggcaatcaagatttttcaaaactcaagatcaaataacaccatcagtgaaagtaaaatcgggcaacaaccaagcaccataatggccatctgcgtcaacgccgtggcgattgcgtatattatttacattgcacacgatgaatttgctggtaaacctgttggtttgaggaatccgttaagcaaactgaaactaattttgttggacttactttttataattttttcaagcgctaatctagcgctggcatttaatactcgtttcgacaaagagtgggtttgcacttctattcgcaggtcaaatggaagcacgtatggatacccaaaaataccgcgtatctgcagaaaacaggaagctttatccgcttttctgttcgttgccttgtttatgtgggtaatcactttctcgatcagtattgttagagtagtcgaaaaagtcagttcaattaccaacagaaactga

SEQ ID NO: 1554 - DNA, 1314 bp, Artificial Sequence
  Description of Artificial Sequence: Synthetic polynucleotide
atgggggattctaattccagccaagaagcgtattctgatacaacatccacgaacgcttctagaatcgcagatcaaaatcaacttaatttaaacgtggatcttgaaaaaaatcaaacagtaaggaagtctggttctttggaagcattacagaatgcaaagatacatgttcccaaacacagtgatggttctccattggactatccaaaattaaatacttacacgtttgtgcctaccacagtgccgccttatgttttagaggcgcagtttgataaattaagacttcaggataagggcaccgttgatggaaatgttaccgatgataaaaatcttccaaaagagtttaaatggggccagtttgcatctaccatcggctgtcattctgcatacactagagaccaaaactacaatcctagtcacaaatcctacgatggttactctttatcttcttctacctcttctaaaaatgcggctcttagagaaattttaggtgacatgtgcagcgagtggggaggtgaagaaagattagaaggtgttttgcattctgaaataggtgccaatttagagttcaacacgacagaagagagaaaagagtggttacaatatatcgaaaaggtaaaagatttctattacggtgataataagaagaacccagaaagtcccgaaagtgtacacaacaaagtttacaagagtgattgggtaaatgagctcaataaagagagagaaaagtggagaaggttaaagcaaaggaagttacaacagtggagacctcctttgacgtctttattacttgataatcaatatttgattttgggtttgaggattttcactggtatattaagttgcatttctcttgctttggcaatcaagatttttcaaaactctagatctaataacaccatcagtgaaagtaaaatcgggcaacaaccaagcaccataatggccatctgcgtcaacgccgtggcgattgcgtatattatttacattgcacacgatgaatttgctggtaaacctgttggtttgaggaatccgttaagcaaattgaaattgattttgttggacttactttttataattttttctagcgctaatttggcgttggcatttaatactcgtttcgacaaagagtgggtttgcacttctattcgcaggtctaatggaagcacgtatggatacccaaaaataccgcgtatctgcagaaaacaggaagctttatccgcttttcttttcgttgccttgtttatgtgggtaatcactttctccatcagtattgttagagtagtcgaaaaagtcagttctattaccaacagaaactga

SEQ ID NO: 1555 - DNA, 2448 bp, Saccharomyces cerevisiae
atgtctgagactctgcctagatctgatgatttagaggccacttggaactttatagagccaggaattaaccaaatactgggtaatgagaaaaaccaagcatccacgtctaagcgagtttacaaaattctttctccaaccatgtatatggaagtctataccgcaatttataactactgtgtgaacaaatcacgctcgtctggacattttagtactgacagtagaactggccaatcaacaattttggttggcagtgagatttacgaaaagttaaagaattatttgaagaattacattttaaattttaagcagtctaattcagagacctttttgcagttttacgtcaagcgctggaaaaggtttacaataggtgccatttttttaaaccatgcattcgattatatgaatagatattgggttcaaaaggaaagaagtgacggcaaaaggcatatttttgatgtaaacaccttgtgcttgatgacatggaaagaagtcatgtttgatccgagtaaagatgttttaataaacgaattattagaccaggtaaccttgggaagggaggggcaaataattcaaagaagtaatattagcactgccataaagtctttagttgcactaggtatcgatccacaggatttgaaaaagttgaacctaaatgtctacatccaagttttcgaaaagccatttttaaagaagactcaggagtactacacgcaatatacaaacgattatttagagaaacactcggtaactgagtatatttttgaagcacatgaaatcatcaaacgtgaggaaaaagcaatgacaatatattgggatgatcatacaaaaaaaccactatccatggcattaaacaaggtcttgatcacagaccatattgaaaagttggaaaatgagtttgttgtccttctggatgccagagatattgaaaaaattacttctttgtacgcactaatacgcagagactttacattaatcccaagaatggcttcagtgtttgaaaattatgttaaaaagacaggtgagaatgaaatttcgagtctactggcaatgcataaacacaatattatgaaaaacgaaaacgcaaaccctaaaaaactagcactaatgacagctcactccctttctcctaaagactatatcaagaaattactggaagtacacgatatattctctaagatttttaatgaaagtttccccgacgacatacctttagctaaagctctagataatgcgtgtggtgctttcatcaacatcaacgagttcgcattacctgctggatctccaaaaagtgccacctcgaagacttccgagatgctagctaagtacagtgatatactattaaagaaggccaccaaacctgaagtggcaagtgacatgtcagatgaagatattataacaatattcaaatatttgaccgacaaagatgcgttcgaaactcattatagaagacttttcgccaagcgtttaattcatggcacttcaacatcagcagaagacgaagaaaatattattcaaaggctgcaagcggcaaatagtatggaatatacaggcaagataactaaaatgtttcaagatattagactttccaagatcttggaagacgattttgctgtcgccctgaagaatgaaccagattactctaaagcaaaatatccagatctacaaccatttgtattggcagaaaatatgtggccattttcataccaagaagttgaatttaagctacccaaggaattggtaccatctcacgaaaaattgaaggagtcatacagccaaaagcataatggtagaatattgaagtggctatggccattatgtcgtggcgaattgaaggcagatattggaaaacccggcaggatgccgttcaactttacggtaacactgtttcaaatggcaattttgctactatataacgatgctgatgtattaaccttagaaaatattcaagagggcacgagcttaaccattcagcacatcgcagcggcaatggtaccattcatcaaattcaaactgattcaacaggtcccaccagggctagatgctctcgtgaaacctgaaacacaattcaagctatcacgtccttataaggcgcttaagaccaatattaatttcgctagcggagtcaaaaacgacattctgcaatcgctatccggtggaggccacgataatcacggtaataagttaggaaacaaacgcttgacggaagacgaaagaatagaaaaagaattgaatacagaaaggcagattttcttggaagcttgtattgtgagaataatgaaagcgaaaagaaatctgccacatacaacattggtcaacgaatgcattgcgcaatcacaccaaaggttcaatgcaaaggtttctatggtcaagagagccatcgatagcttaatacaaaagggatacctacagaggggagacgatggtgaatcgtatgcttaccttgcttaa

SEQ ID NO: 1556 - DNA, 2448 bp, Artificial Sequence
  Description of Artificial Sequence: Synthetic polynucleotide
atgtctgagactttacctagatctgatgatttagaggccacttggaactttatagagccaggaattaaccaaatattaggtaatgagaaaaaccaagcatccacgtctaagagagtttacaaaattctttctccaaccatgtatatggaagtctataccgcaatttataactactgtgtgaacaaaagccgctcttctggacattttagtactgacagtagaactggccaaagtacaattttggttggcagtgagatttacgaaaagttaaagaattatttgaagaattacattttaaattttaagcagtctaattctgagacctttttgcagttttacgtcaagcgctggaaaaggtttacaataggtgccatttttttaaaccatgcattcgattatatgaatagatattgggttcaaaaggaaagaagtgacggcaaaaggcatatttttgatgtaaacaccttgtgcttgatgacatggaaagaagtcatgtttgatccgagtaaagatgttttaataaacgaattattagaccaggtaaccttgggaagggaggggcaaataattcaaagaagtaatattagcactgccataaagtctttagttgcattgggtatcgatccacaggatttgaaaaagttgaacttgaatgtctacatccaagttttcgaaaagccatttttaaagaagactcaggagtactacacgcaatatacaaacgattatttagagaaacactctgtaactgagtatatttttgaagcacatgaaatcatcaaacgtgaggaaaaagcaatgacaatatattgggatgatcatacaaaaaaaccattgtccatggcattaaacaaggtcttgatcacagaccatattgaaaagttggaaaatgagtttgttgtccttttagatgccagagatattgaaaaaattacttctttgtacgcattaatacgcagagactttacattaatcccaagaatggcttctgtgtttgaaaattatgttaaaaagacaggtgagaatgaaatttccagtttattggcaatgcataaacacaatattatgaaaaacgaaaacgcaaaccctaaaaaattggcattaatgacagctcactccctttctcctaaagactatatcaagaaattattggaagtacacgatatattctctaagatttttaatgaaagtttccccgacgacatacctttagctaaagctttagataatgcgtgtggtgctttcatcaacatcaacgagttcgcattacctgctggatctccaaaaagtgccacctccaagacttccgagatgttggctaagtacagtgatatattattaaagaaggccaccaaacctgaagtggcaagtgacatgagtgatgaagatattataacaatattcaaatatttgaccgacaaagatgcgttcgaaactcattatagaagacttttcgccaagcgtttaattcatggcacttctacaagtgcagaagacgaagaaaatattattcaaaggttacaagcggcaaatagtatggaatatacaggcaagataactaaaatgtttcaagatattagactttccaagatcttggaagacgattttgctgtcgccttgaagaatgaaccagattactctaaagcaaaatatccagatttgcaaccatttgtattggcagaaaatatgtggccattttcttaccaagaagttgaatttaagttgcccaaggaattggtaccatctcacgaaaaattgaaggagagttacagccaaaagcataatggtagaatattgaagtggttatggccattatgtcgtggcgaattgaaggcagatattggaaaacccggcaggatgccgttcaactttacggtaacattatttcaaatggcaattttgttattatataacgatgctgatgtattaaccttagaaaatattcaagagggcacgagcttaaccattcagcacatcgcagcggcaatggtaccattcatcaaattcaaattgattcaacaggtcccaccagggttagatgctctcgtgaaacctgaaacacaattcaagttatctcgtccttataaggcgcttaagaccaatattaatttcgctagcggagtcaaaaacgacattttacaatctttatccggtggaggccacgataatcacggtaataagttaggaaacaaacgcttgacggaagacgaaagaatagaaaaagaattgaatacagaaaggcagattttcttggaagcttgtattgtgagaataatgaaagcgaaaagaaatttaccacatacaacattggtcaacgaatgcattgcgcaatctcaccaaaggttcaatgcaaaggtttctatggtcaagagagccatcgatagcttaatacaaaagggatacttacagaggggagacgatggtgaaagttatgcttaccttgcttga

SEQ ID NO: 1557 - DNA, 1323 bp, Saccharomyces cerevisiae
atgtctgaaaataacgaattccagagtgtcaccgaatcgacgactgctccaaccactagtaacccatatggcccaaatcctgcggattatctatccaatgttaagaatttccagttgattgattcaacactaagagagggtgaacaatttgccaacgcattcttcgatactgaaaaaaagattgaaattgctagagccttggatgatttcggtgtggactacatcgagttaacctctcccgtagcatccgaacaatcaagaaaggactgtgaagctatatgtaaactaggtttaaaggccaagatccttacacacattcgttgtcacatggacgatgccagagtcgccgtagagactggtgtcgacggtgtcgatgttgttatcggcacctccaaatttttaagacaatattcccacggtaaggatatgaactacatcgccaagagtgctgttgaagtcattgaatttgtcaaatccaaaggtattgaaatcagattttcctctgaagattccttcagaagtgatctcgttgatcttttgaacatttataaaaccgttgacaagatcggtgtaaatagagtcggtattgccgacacagttggatgtgccaacccaagacaagtatatgaactgatcagaactttgaagagtgttgtctcatgtgacatcgaatgccatttccacaatgataccggttgtgccattgcaaacgcctacactgctttggaaggtggtgccagattgattgacgtcagtgtactgggtattggtgaaagaaacggtatcactcctctaggtgggctcatggcaagaatgattgttgccgcaccagactatgtcagatctaaatacaagctgcacaagatcagagacatcgaaaacctggtcgctgatgctgtggaagttaacattccattcaacaaccctatcaccgggttctgtgcattcacacataaagcaggtatccatgccaaggccattttggctaacccatctacctacgaaatcttggaccctcacgatttcggtatgaagagatatatccacttcgccaacagactaactggttggaatgcaatcaaatcaagagtcgaccaattgaacttgaatttgacggatgatcaaatcaaggaagttactgctaagattaagaagctgggtgatgtcagaccgctaaatattgatgatgtagactccattatcaaggacttccatgcagaattgagcaccccacttttaaaaccagtaaataagggtacagatgacgacaatatcgatatttccaatgggcatgtttctaaaaaggcaaaggtcaccaaatag

SEQ ID NO: 1558 - DNA, 1323 bp, Artificial Sequence
  Description of Artificial Sequence: Synthetic polynucleotide
atgtctgaaaataacgaattccagagtgtcaccgaaagtacgactgctccaaccactagtaacccatatggcccaaatcctgcggattatttatccaatgttaagaatttccagttgattgattctacattaagagagggtgaacaatttgccaacgcattcttcgatactgaaaaaaagattgaaattgctagagccttggatgatttcggtgtggactacatcgagttaacctctcccgtagcatccgaacaatctagaaaggactgtgaagctatatgtaaattgggtttaaaggccaagatccttacacacattcgttgtcacatggacgatgccagagtcgccgtagagactggtgtcgacggtgtcgatgttgttatcggcacctccaaatttttaagacaatattcccacggtaaggatatgaactacatcgccaagagtgctgttgaagtcattgaatttgtcaaatccaaaggtattgaaatcagattttcctctgaagattccttcagaagtgatctcgttgatcttttgaacatttataaaaccgttgacaagatcggtgtaaatagagtcggtattgccgacacagttggatgtgccaacccaagacaagtatatgaattgatcagaactttgaagagtgttgtctcctgtgacatcgaatgccatttccacaatgataccggttgtgccattgcaaacgcctacactgctttggaaggtggtgccagattgattgacgtcagtgtattgggtattggtgaaagaaacggtatcactcctttaggtgggctcatggcaagaatgattgttgccgcaccagactatgtcagatctaaatacaagttgcacaagatcagagacatcgaaaacttggtcgctgatgctgtggaagttaacattccattcaacaaccctatcaccgggttctgtgcattcacacataaagcaggtatccatgccaaggccattttggctaacccatctacctacgaaatcttggaccctcacgatttcggtatgaagagatatatccacttcgccaacagattaactggttggaatgcaatcaaatctagagtcgaccaattgaacttgaatttgacggatgatcaaatcaaggaagttactgctaagattaagaagttgggtgatgtcagaccgttaaatattgatgatgtagactccattatcaaggacttccatgcagaattgagcaccccacttttaaaaccagtaaataagggtacagatgacgacaatatcgatatttccaatgggcatgtttctaaaaaggcaaaggtcaccaaatga

SEQ ID NO: 1559 - DNA, 261 bp, Saccharomyces cerevisiae
atgttaaaccgttgcatttcccgtaataccaggctgccagtaaacctaagaattgcctctcgcttttattcagatggtcctctcggtggtgccggacctggtaatcctcaagatatctttatcaagagagaacgtgccaaagaggattattatgccagacaacaagagagggaacaattagcacatgtgaaggaacaactaaaagaacacaagaaaaaattagagaatttagaaaacaaaattaataacctttcaaagtga

SEQ ID NO: 1560 - DNA, 261 bp, Artificial Sequence
  Description of Artificial Sequence: Synthetic polynucleotide
atgttaaaccgttgcatttcccgtaataccaggttaccagtaaacttgagaattgcctctcgcttttattctgatggtcctctcggtggtgccggacctggtaatcctcaagatatctttatcaagagagaacgtgccaaagaggattattatgccagacaacaagagagggaacaattagcacatgtgaaggaacaattgaaagaacacaagaaaaaattagagaatttagaaaacaaaattaataacctttccaagtga

SEQ ID NO: 1561 - DNA, 321 bp, Saccharomyces cerevisiae
atgtctgactctattatttcctttgctgctttcatcctagctgatgctggtttggaaatcacctctgacaacttattgactatcaccaaggccgctggtgctaatgtcgacaacgtctgggctgatgtttacgctaaggctttggaaggtaaggacttgaaggaaatcctatctggtttccataacgctggccctgttgctggtgctggtgctgcttctggcgctgccgctgctggtggtgacgctgctgctgaagaagaaaaagaagaagaagctgctgaagaatctgacgacgacatgggtttcggtttattcgactaa

SEQ ID NO: 1562 - DNA, 321 bp, Artificial Sequence
  Description of Artificial Sequence: Synthetic polynucleotide
atgtctgactctattatttcctttgctgctttcatcttggctgatgctggtttggaaatcacctctgacaacttattgactatcaccaaggccgctggtgctaatgtcgacaacgtctgggctgatgtttacgctaaggctttggaaggtaaggacttgaaggaaatcctttctggtttccataacgctggccctgttgctggtgctggtgctgcttctggcgctgccgctgctggtggtgacgctgctgctgaagaagaaaaagaagaagaagctgctgaagaatctgacgacgacatgggtttcggtttattcgactga

SEQ ID NO: 1563 - DNA, 876 bp, Saccharomyces cerevisiae
atggagctaagaagtagacggagcgcagaggcctatcttgtcacgcctgaggaacctgccaagaataagagtgaacggagcatagaatccaatgagagggtcggcacgagggaagcaaagagcgagaacacaagtgtatttagtcccgcttactctgataccgctactacagattcatcgaagaaagttgatgacaatgaatactacaattttactagtcacttcatgccatctttgaaaaacaccagagaactagaaaacacaattctcaatctcatacagaggataaaggaaggggatgatgaaacgttagttagtgagaaagatctcatattaagtgtgcttaacaggtctttagcatccacatctcactggaagttacaggcccagctatcggagttaagggccacctcagagggaaggtatgcagttgagacaaacttgttgaaaaaagaggtagaatttttaaaaaacaagaccccaaaaaccaacgaaagtgcaagttccgcagagttgagaccacttcttgaacgacctttaaagcgtaaactgtcattgccaggactagcgcaaagaccattatccactggcgctaggctagaaggaggatatggaggtgtatcgccgaactcatggaaaaccaaagttccaaaacttcctcttcctgcttcccggccgtctttgaatctttctccccaaaaagtcccaacgggtactgataaagttgaggaagataccaaaattgacacattggaattagtagagaacaataaaccgcatccaaggatgagaagaaggagtgacaatccagcaacaaacgaatatgtgagagtttttcatttggagaaaaaagaacctaaatcacgaaaaaaatag

SEQ ID NO: 1564 - DNA, 876 bp, Artificial Sequence
  Description of Artificial Sequence: Synthetic polynucleotide
atggagttaagaagtagaagaagcgcagaggcctatcttgtcacgcctgaggaacctgccaagaataagagtgaaagaagcatagaatccaatgagagggtcggcacgagggaagcaaagagcgagaacacaagtgtatttagtcccgcttactctgataccgctactacagattcttccaagaaagttgatgacaatgaatactacaattttactagtcacttcatgccatctttgaaaaacaccagagaattggaaaacacaattctcaatctcatacagaggataaaggaaggggatgatgaaacgttagttagtgagaaagatctcatattaagtgtgcttaacaggtctttagcatccacatctcactggaagttacaggcccagttatctgagttaagggccacctctgagggaaggtatgcagttgagacaaacttgttgaaaaaagaggtagaatttttaaaaaacaagaccccaaaaaccaacgaaagtgcaagttccgcagagttgagaccacttcttgaaaggcctttaaagcgtaaattatctttgccaggattagcgcaaagaccattatccactggcgctaggttagaaggaggatatggaggtgtatccccgaacagttggaaaaccaaagttccaaaacttcctcttcctgcttccagaccgtctttgaatctttctccccaaaaagtcccaacgggtactgataaagttgaggaagataccaaaattgacacattggaattagtagagaacaataaaccgcatccaaggatgagaagaaggagtgacaatccagcaacaaacgaatatgtgagagtttttcatttggagaaaaaagaacctaaatctagaaaaaaatga

SEQ ID NO: 1565 - DNA, 1236 bp, Saccharomyces cerevisiae
atggatgcaactaccccactattaactgttgcgaacagtcatcccgcccgcaatccaaagcacactgcatggagagcagctgtgtatgatttacagtatattttgaaagcgtcacccctgaatttcctattggtatttgttcctttaggtctgatttggggacacttccaactatctcatacactgacatttctttttaatttcttggcaattataccgttggcagctatcttggctaatgccacggaagagttggctgataaggctggtaacaccattgggggactgctaaatgctacttttggtaacgctgtggaactaattgtttctatcattgccctgaaaaaaggtcaagtgagaattgtgcaggcctcgatgctaggtagtcttctttctaatttgctgttagtgcttggattatgcttcatattcggtggatacaatagagtccaacagacattcaaccaaaccgccgctcaaacaatgtcctcattacttgccattgcgtgtgcatccctactgattcccgctgcctttagagccaccctacctcatggcaaggaagaccacttcatcgatggaaaaatattggagttatccagaggcacctctattgttattctcatcgtttacgttttgttcttatatttccagctagggagccatcacgccttgtttgagcaacaagaagaagagaccgatgaagttatgagcaccatttccaggaatccacatcactctttgagtgtcaagtcatcattggtgatacttctaggtacaactgtgatcatctctttttgtgcggattttctagtcggtacgatagacaacgttgttgaatctaccgggctatctaaaacatttataggtttgattgtcattcctattgtgggtaatgccgcagagcatgtcacttcagtcttggtggccatgaaggataagatggatctggcgctaggtgttgccatcggttcctctttacaagttgccttatttgttacaccattcatggttcttgtgggctggatgatcgatgttccaatgacgctaaatttctccacttttgaaaccgctactctttttattgctgttttcttatccaattacttaattctcgatggtgagtcaaactggttggagggtgtcatgtctctagctatgtatattttgattgcaatggcatttttctattatccagacgaaaaaacccttgactctattggaaatagtttatga

SEQ ID NO: 1566 - DNA, 1236 bp, Artificial Sequence
  Description of Artificial Sequence: Synthetic polynucleotide
atggatgcaactaccccattattaactgttgcgaacagtcatcccgcccgcaatccaaagcacactgcatggagagcagctgtgtatgatttacagtatattttgaaagcgtctcccttgaatttcttgttggtatttgttcctttaggtttgatttggggacacttccaattatctcatacattaacatttctttttaatttcttggcaattataccgttggcagctatcttggctaatgccacggaagagttggctgataaggctggtaacaccattgggggattattgaatgctacttttggtaacgctgtggaattgattgtttctatcattgccttgaaaaaaggtcaagtgagaattgtgcaggcctctatgttgggtagtcttctttctaatttgttattagtgcttggattatgcttcatattcggtggatacaatagagtccaacagacattcaaccaaaccgccgctcaaacaatgtcctctttacttgccattgcgtgtgcatccttattgattcccgctgcctttagagccaccttacctcatggcaaggaagaccacttcatcgatggaaaaatattggagttatccagaggcacctctattgttattctcatcgtttacgttttgttcttatatttccagttagggagccatcacgccttgtttgagcaacaagaagaagagaccgatgaagttatgagcaccatttccaggaatccacatcactctttgagtgtcaagagttctttggtgatacttttgggtacaactgtgatcatctctttttgtgcggattttttagtcggtacgatagacaacgttgttgaatctaccgggttatctaaaacatttataggtttgattgtcattcctattgtgggtaatgccgcagagcatgtcactagtgtcttggtggccatgaaggataagatggatttggcgcttggtgttgccatcggttcctctttacaagttgccttatttgttacaccattcatggttcttgtgggctggatgatcgatgttccaatgacgttgaatttctccacttttgaaaccgctactctttttattgctgttttcttatccaattacttaattctcgatggtgagagcaactggttggagggtgtcatgtctttggctatgtatattttgattgcaatggcatttttctattatccagacgaaaaaacccttgactctattggaaatagtttatga

SEQ ID NO: 1567 - DNA, 927 bp, Saccharomyces cerevisiae
atgtcaaactacgaagccttgctgaaattcaataggaaggctgtatctaaggaaatggtgcaatatctagcatcgaccacagcttccattatcaaaattaagaagacgaatagtatgatagatattgcattgccagcaccaccgttgactaaattcatcaacagactgatcaagcattctaacgttcaaactccgactctgatggctacctctgtatatttggccaaattaagatcaataataccgagtaacgtttatggtatagagaccaccaggcatagaatattcttaggttgcctaatattagctgcaaaaacgttaaatgattcctcccctcttaacaaacactgggccgaatatacggacggccttctcatcctaagggaggttaatactattgaaagggaactattagaatattttgattgggacgtcaccatttccacagatgatttaattacatgtctctcgccattcttgaagcctatcaaagaggagcagttgtacaaatcgcaaagagactgtcgcacgttgaaaaatttttctgctcaagaaaaagacatagtaaacaaaacatccatttcccattcgcgctcatcgtccaatatgtctatcccatctttagcttccacttcgaccctctccacgttggaatctagaagatcgaatttatccaattatagtaacagaatacgaactttgcccgaactacacgaatccaataacattagcgacaagttttctccgcgaacatacaacatagactccaaacacgataacaaggaaaataggccaataccgacaattaagccttttaattttagtaaagcgcgccctgtgatcttgaaaactgggttaaacaaacagataataaaagaagatacaaaagtaaagaaatcgaattggtcaaattacttcaaatcgtga

SEQ ID NO: 1568 - DNA, 927 bp, Artificial Sequence
  Description of Artificial Sequence: Synthetic polynucleotide
atgtccaactacgaagccttgttgaaattcaataggaaggctgtatctaaggaaatggtgcaatatttggcatctaccacagcttccattatcaaaattaagaagacgaatagtatgatagatattgcattgccagcaccaccgttgactaaattcatcaacagattgatcaagcattctaacgttcaaactccgactttaatggctacctctgtatatttggccaaattaagaagtataataccgagtaacgtttatggtatagagaccaccaggcatagaatattcttaggttgcttaatattagctgcaaaaacgttaaatgattcctcccctcttaacaaacactgggccgaatatacggacggccttctcatcttgagggaggttaatactattgaaagggaattattagaatattttgattgggacgtcaccatttccacagatgatttaattacatgtctctctccattcttgaagcctatcaaagaggagcagttgtacaaatctcaaagagactgtcgcacgttgaaaaatttttctgctcaagaaaaagacatagtaaacaaaacatccatttcccattctcgcagctcttccaatatgtctatcccatctttagcttccacttctaccctctccacgttggaatctagaagatctaatttatccaattatagtaacagaataagaactttgcccgaattgcacgaatccaataacattagcgacaagttttctccgcgcacatacaacatagactccaaacacgataacaaggaaaataggccaataccgacaattaagccttttaattttagtaaagcgcgccctgtgatcttgaaaactgggttaaacaaacagataataaaagaagatacaaaagtaaagaaatctaattggtctaattacttcaaaagttga

SEQ ID NO: 1569 - DNA, 2508 bp, Saccharomyces cerevisiae
atgggtgaagaacataaaccacttttggacgcctcgggtgtcgaccctcgtgaggaggataaaaccgccaccgccattttaagaagaaagaagaaggacaacatgcttttggtggacgatgctatcaatgatgacaattctgtcattgctattaattctaacaccatggacaaattggaattgttccgtggtgacaccgttctcgttaagggcaagaagagaaaagatactgtcttaattgtgttgatcgatgacgaattagaagacggagcatgcaggataaaccgtgtagttcgtaacaatttacgtattaggctgggtgatttagttacaattcatccttgccccgatatcaaatacgctactagaatttctgtgttaccaattgctgatacgatcgaaggtataactggtaatcttttcgatgtttttttgaagccttattttgtggaagcctacagaccagtgaggaaaggcgaccattttgttgtcagaggcggtatgagacaagtcgaattcaaggttgtggatgtcgaacctgaagaatatgccgtcgttgctcaggatactattattcactgggaaggtgagccaatcaacagggaagatgaagaaaataatatgaatgaggtgggttacgatgatattggtggttgtcgtaagcaaatggctcaaattagggaaatggttgaactaccattgagacatcctcagttgttcaaggctatcggtatcaagccaccaagaggtgttttgatgtatggtccccctggtactggtaaaaccttgatggcaagagctgttgctaatgagaccggtgccttttttttcttaattaatggtccagaagtcatgtcaaaaatggctggtgaatcagagtctaacttaagaaaggcctttgaagaagccgaaaagaacgctccagccatcatttttatcgatgaaatcgattctatagctccaaagagagacaagactaatggtgaagttgagagaagagttgtctctcaattgttaactttaatggatggtatgaaggcaagatctaatgttgttgtcattgctgctaccaatagaccaaattcgattgatcccgctttaagaagatttggtagattcgatcgtgaagtcgacattggtatcccagatgctacaggtagacttgaagttctacgtattcacaccaagaacatgaagttggctgatgatgttgatttggaagcattggctgctgaaacacacggttacgtgggtgctgatattgcctctttgtgttctgaagctgccatgcaacagatccgtgaaaaaatggacttgatagatttagatgaagatgaaattgatgcagaggtgctcgattctttaggagtcaccatggacaacttcagattcgcattgggcaattcaaacccatctgcattgcgtgaaaccgttgttgaaagtgtcaatgttacttgggatgacgttggtggcctagatgaaatcaaggaggaattgaaggaaactgtagaatacccagtcttacatccagaccaatacacaaagtttgggttatcaccatcaaagggtgtgttgttctacggtccaccaggtacaggtaaaactttgttagcaaaagctgtagctactgaggtttctgccaactttatctcagtcaaaggtccagaattattgagtatgtggtatggtgaatcggaatctaacatccgtgatatttttgataaggcaagagcagctgcaccaaccgtcgtttttctagatgaattagactccattgccaaggcaagaggtggttccttgggtgatgctggtggtgcttcggatagagtcgtcaaccaactattaacagaaatggatggtatgaatgctaagaaaaatgtgttcgtgattggtgccaccaataggccagatcaaattgatcctgctattttaagacctggcagattggatcaattaatttatgttccattgccagatgaaaacgctagattatctattctaaatgctcaattaaggaaaacaccactagaaccagggctagagttaactgcgattgccaaggccactcaaggtttctctggtgctgatttactctatattgtgcagagggctgctaaatacgctatcaaggattctatcgaagctcacagacaacacgaagctgaaaaggaagtgaaagtagaaggtgaagacgtggaaatgacagatgagggagcaaaggctgaacaagaaccagaagtagatcctgttccatatattacaaaggagcatttcgcagaagctatgaagaccgctaaacgttctgtttcagatgctgaattgcgtcgttatgaagcatactcacagcaaatgaaagcatctagaggtcaattcagtaatttcaactttaatgacgctccattaggtactacggctacggacaatgctaacagtaataatagtgctccaagtggagcaggtgctgcatttggttctaatgcggaggaagatgatgatttgtatagttag

SEQ ID NO: 1570 - DNA, 2508 bp, Artificial Sequence
  Description of Artificial Sequence: Synthetic polynucleotide
atgggtgaagaacataaaccacttttggacgcctctggtgtcgaccctcgtgaggaggataaaaccgccaccgccattttaagaagaaagaagaaggacaacatgcttttggtggacgatgctatcaatgatgacaattctgtcattgctattaattctaacaccatggacaaattggaattgttccgtggtgacaccgttctcgttaagggcaagaagagaaaagatactgtcttaattgtgttgatcgatgacgaattagaagacggagcatgcaggataaaccgtgtagttcgtaacaatttacgtattaggcttggtgatttagttacaattcatccttgccccgatatcaaatacgctactagaatttctgtgttaccaattgctgatacgatcgaaggtataactggtaatcttttcgatgtttttttgaagccttattttgtggaagcctacagaccagtgaggaaaggcgaccattttgttgtcagaggcggtatgagacaagtcgaattcaaggttgtggatgtcgaacctgaagaatatgccgtcgttgctcaggatactattattcactgggaaggtgagccaatcaacagggaagatgaagaaaataatatgaatgaggtgggttacgatgatattggtggttgtcgtaagcaaatggctcaaattagggaaatggttgaattaccattgagacatcctcagttgttcaaggctatcggtatcaagccaccaagaggtgttttgatgtatggtccccctggtactggtaaaaccttgatggcaagagctgttgctaatgagaccggtgccttttttttcttaattaatggtccagaagtcatgtccaaaatggctggtgaaagtgagtctaacttaagaaaggcctttgaagaagccgaaaagaacgctccagccatcatttttatcgatgaaatcgattctatagctccaaagagagacaagactaatggtgaagttgagagaagagttgtctctcaattgttaactttaatggatggtatgaaggcaagatctaatgttgttgtcattgctgctaccaatagaccaaattctattgatcccgctttaagaagatttggtagattcgatcgtgaagtcgacattggtatcccagatgctacaggtagacttgaagttttacgtattcacaccaagaacatgaagttggctgatgatgttgatttggaagcattggctgctgaaacacacggttacgtgggtgctgatattgcctctttgtgttctgaagctgccatgcaacagatccgtgaaaaaatggacttgatagatttagatgaagatgaaattgatgcagaggtgctcgattctttaggagtcaccatggacaacttcagattcgcattgggcaatagcaacccatctgcattgcgtgaaaccgttgttgaaagtgtcaatgttacttgggatgacgttggtggcttggatgaaatcaaggaggaattgaaggaaactgtagaatacccagtcttacatccagaccaatacacaaagtttgggttatctccatctaagggtgtgttgttctacggtccaccaggtacaggtaaaactttgttagcaaaagctgtagctactgaggtttctgccaactttatctctgtcaaaggtccagaattattgagtatgtggtatggtgaaagtgaatctaacatccgtgatatttttgataaggcaagagcagctgcaccaaccgtcgtttttttggatgaattagactccattgccaaggcaagaggtggttccttgggtgatgctggtggtgcttctgatagagtcgtcaaccaattattaacagaaatggatggtatgaatgctaagaaaaatgtgttcgtgattggtgccaccaataggccagatcaaattgatcctgctattttaagacctggcagattggatcaattaatttatgttccattgccagatgaaaacgctagattatctattttgaatgctcaattaaggaaaacaccattggaaccagggttagagttaactgcgattgccaaggccactcaaggtttctctggtgctgatttactctatattgtgcagagggctgctaaatacgctatcaaggattctatcgaagctcacagacaacacgaagctgaaaaggaagtgaaagtagaaggtgaagacgtggaaatgacagatgagggagcaaaggctgaacaagaaccagaagtagatcctgttccatatattacaaaggagcatttcgcagaagctatgaagaccgctaaacgttctgtttctgatgctgaattgcgtcgttatgaagcatactctcagcaaatgaaagcatctagaggtcaattcagtaatttcaactttaatgacgctccattaggtactacggctacggacaatgctaacagtaataatagtgctccaagtggagcaggtgctgcatttggttctaatgcggaggaagatgatgatttgtatagttga

SEQ ID NO: 1571 - DNA, 477 bp, Saccharomyces cerevisiae
atggagccattgatatcggcaccgtacctaacaacaacaaaaatgtctgctcctgctacgcttgatgctgcctgtattttttgcaagattattaaaagcgaaattccatccttcaaattgattgaaacaaagtactcgtatgctttcttggacatccaacctactgctgaaggtcatgctttaatcattcctaagtaccatggtgcgaagttgcatgacatcccggacgaattccttaccgatgctatgccgattgccaagagactggccaaggcaatgaagttggacacttataatgtgttgcagaataatggtaaaattgcgcatcaagaagtcgaccacgtccacttccatttgattcctaagagagatgagaaaagtggtttgattgtagggtggccagcccaagaaacggacttcgataagttgggcaagctacacaaggaattgcttgccaaactagaaggctccgattag

SEQ ID NO: 1572 - DNA, 477 bp, Artificial Sequence
  Description of Artificial Sequence: Synthetic polynucleotide
atggagccattgatatctgcaccgtacttgacaacaacaaaaatgtctgctcctgctacgcttgatgctgcctgtattttttgcaagattattaaaagcgaaattccatccttcaaattgattgaaacaaagtactcctatgctttcttggacatccaacctactgctgaaggtcatgctttaatcattcctaagtaccatggtgcgaagttgcatgacatcccggacgaattccttaccgatgctatgccgattgccaagagattggccaaggcaatgaagttggacacttataatgtgttgcagaataatggtaaaattgcgcatcaagaagtcgaccacgtccacttccatttgattcctaagagagatgagaaaagtggtttgattgtagggtggccagcccaagaaacggacttcgataagttgggcaagttgcacaaggaattgcttgccaaattagaaggctccgattga

SEQ ID NO: 1573 - DNA, 939 bp, Saccharomyces cerevisiae
atgtcatttcaccaacagttctttaccttgaataatggaaataaaatccccgcaatcgccatcattgggacaggtactagatggtataaaaacgaagaaacggatgctaccttttcgaacagtttggtcgaacagattgtttatgctctgaagttacctggcattattcacattgatgctgctgagatctacagaacatatccagaagttgggaaggcacttagcctcaccgaaaaaccaagaaatgcaatattcttgacagacaagtactcacctcaaatcaagatgtcagattccccagcggatggactagatttagctttgaagaagatgggcactgactatgtcgatctataccttttgcatagcccatttgtttccaaagaggtcaacgggttaagtttggaggaagcctggaaggacatggagcaattgtacaaatcaggtaaagctaaaaatatcggtgtttccaactttgctgtggaagacttgcaaagaattctgaaagttgcggaagtcaagccccaagttaatcaaattgagttcagtcccttcttgcagaatcaaacaccagggatctacaaattttgccaagaacatgatatattggtagaagcatactcgccactaggtcccttacaaaagaaaacagcacaagatgactctcaaccgtttttcgaatacgtgaaagagttatccgagaaatatatcaaatctgaagcccaaattatcctacgttgggtgaccaaacgtggcgtgttgcctgtaaccacctcttccaaacctcaaagaatttctgacgcgcaaaatttattctctttcgacttgacggctgaggaagtcgataagataacggagttgggcttggaacatgaaccgctaagattgtattggaataaattgtacggtaaatacaactacgctgctcaaaaagtataa

SEQ ID NO: 1574 - DNA, 939 bp, Artificial Sequence
  Description of Artificial Sequence: Synthetic polynucleotide
atgagttttcaccaacagttctttaccttgaataatggaaataaaatccccgcaatcgccatcattgggacaggtactagatggtataaaaacgaagaaacggatgctaccttttccaacagtttggtcgaacagattgtttatgctttgaagttacctggcattattcacattgatgctgctgagatctacagaacatatccagaagttgggaaggcacttagcctcaccgaaaaaccaagaaatgcaatattcttgacagacaagtactctcctcaaatcaagatgagtgattccccagcggatggattagatttagctttgaagaagatgggcactgactatgtcgatttataccttttgcatagcccatttgtttccaaagaggtcaacgggttaagtttggaggaagcctggaaggacatggagcaattgtacaaatctggtaaagctaaaaatatcggtgtttccaactttgctgtggaagacttgcaaagaattttgaaagttgcggaagtcaagccccaagttaatcaaattgagttcagtcccttcttgcagaatcaaacaccagggatctacaaattttgccaagaacatgatatattggtagaagcatactctccattgggtcccttacaaaagaaaacagcacaagatgactctcaaccgtttttcgaatacgtgaaagagttatccgagaaatatatcaaatctgaagcccaaattatcttacgttgggtgaccaaacgtggcgtgttgcctgtaaccacctcttccaaacctcaaagaatttctgacgcgcaaaatttattctctttcgacttgacggctgaggaagtcgataagataacggagttgggcttggaacatgaaccgttaagattgtattggaataaattgtacggtaaatacaactacgctgctcaaaaagtatga

SEQ ID NO: 1575 - DNA, 423 bp, Saccharomyces cerevisiae
atgtgttgctactgtgtttgttgtaccgtttctgactttatactgtatattgttgcgttttttttccccccagctgcagtccttcttcgatctgggccttgttcatctgatttcctcctgaatgtattgctaacgctactgggatttttgcccggtatgttacacgcattctactacatcacaattacaagtcctttaaggaacgctgaatacgtctattattaccagcaaggctgggtggatagcgaaagaaacgttccttcgaatcgtcctcaaaactcgcagaccccccaaaaccgcccacaacaaggaagctccgctagaaacgtatacccgagcgttgaaactcctctgttacaaggcgcagctccccatgacaacaaacagtctctggttgagtctcctcctccttatgtgccatga

SEQ ID NO: 1576 - DNA, 423 bp, Artificial Sequence
  Description of Artificial Sequence: Synthetic polynucleotide
atgtgttgctactgtgtttgttgtaccgtttctgactttatactttatattgttgcgttttttttccccccagctgcagtccttcttagatctgggccttgttcttctgatttcctcttgaatgtattgttgacgttattaggatttttgcccggtatgttacacgcattctactacatcacaattacaagtcctttaaggaacgctgaatacgtctattattaccagcaaggctgggtggatagcgaaagaaacgttccttccaatcgtcctcaaaactctcagaccccccaaaaccgcccacaacaaggaagctccgctagaaacgtatacccgagcgttgaaactcctttattacaaggcgcagctccccatgacaacaaacagtctttggttgagtctcctcctccttatgtgccatga

SEQ ID NO: 1577 - DNA, 2430 bp, Saccharomyces cerevisiae
atggatttgtttattgaaagcaagataaacagtttattacaatttttatttggttcccgacaggattttttgagaaattttaaaacttggagtaacaacaataacaatctatcgatttatttattaatttttggcatagtagtatttttttataaaaaaccagaccatctaaactacattgttgagagcgttagtgaaatgacaacaaacttcagaaataataatagccttagccgttggttgcccagaagtaagtttacccacttagacgaagagatcttgaaaagaggtggtttcattgctggtttagttaatgatggtaacacttgttttatgaactctgttttgcaatcattggcatcatccagagaattaatggagttcttggacaataatgtcataaggacctatgaggagatagaacaaaatgaacacaatgaagaaggaaacgggcaagaatctgctcaagatgaagccactcataagaaaaacactcgtaagggtggcaaagtttatggtaagcataagaagaaattgaataggaagtcaagttcgaaagaagacgaagaaaagagccaggagccagatatcactttcagtgtcgccttaagggatctactttctgccttaaatgcgaagtattatcgggataaaccctatttcaaaaccaatagtttattgaaagcaatgtccaaatctccaagaaaaaatattcttcttggctacgaccaagaggacgcgcaagaattcttccagaacatactagccgagttggaaagtaacgttaaatcattgaatactgaaaaactagataccactccagttgcgaaatcagaattacccgatgatgctttagtaggtcaacttaaccttggtgaagttggcactgtttacattccaactgaacagattgatcctaactctatactacatgacaagtccattcaaaatttcacacctttcaaactaatgactcctttagatggtatcacggcagaaagaattggttgtttacagtgtggtgagaacggtggcataagatattccgtattttcgggattaagcttaaatttaccgaacgagaatattggttccactttaaaattatctcagttattaagcgactggagtaaacctgaaatcatcgaaggcgtagaatgtaaccgttgtgccctcacagcagcgcactctcatttatttggtcagttgaaagaatttgaaaaaaaacctgagggttcgatcccagaaaagttaattaacgctgtaaaagatagggtccatcaaatcgaagaagttcttgccaaaccagttattgacgatgaagattataagaagttgcatacagcaaatatggtacgtaaatgctctaaatctaagcagattttaatatcaagacctccaccattattatccattcatatcaacagatccgtatttgatccaagaacgtacatgattagaaaaaataactcgaaagtattgtttaagtcaaggttgaatcttgccccatggtgttgtgatattaatgaaatcaatttggatgctcgtttgccaatgtcaaaaaaggaaaaagctgcgcaacaagattcaagtgaagatgaaaacattggcggtgaatactatacgaaattacatgaacgcttcgagcaggaatttgaagacagcgaggaagaaaaagaatacgatgacgcagaggggaactatgcgtctcattacaatcataccaaggatatcagtaactatgatcccctaaacggtgaagtcgatggcgtgacatccgatgatgaagatgagtacattgaagaaaccgatgctttagggaatacaatcaaaaaaaggatcatagaacattctgatgttgaaaacgagaatgtaaaagataatgaagaactgcaagaaatcgacaatgtgagccttgacgaaccaaagatcaatgttgaagatcaactagaaacatcatctgatgaggaagatgttataccagctccacctatcaattatgctaggtcattttccacagttccagccactccattgacatattcattgcgctctgtcattgttcactacggtacccataattatggtcattacattgcatttagaaaatacaggggttgttggtggagaatatctgatgagactgtgtacgttgtggacgaagctgaagtcctttcaacacccggtgtatttatgttattttacgaatatgactttgatgaagaaactgggaagatgaaggatgatttggaagctattcagagtaataatgaagaagatgatgaaaaagagcaggagcaaaaaggagtccaggagccaaaggaaagccaagagcaaggagaaggtgaagagcaagaggaaggtcaagagcagatgaagttcgagagaacagaagaccatagagatatttctggtaaagatgtaaactaa

SEQ ID NO: 1578 - DNA, 2430 bp, Artificial Sequence
  Description of Artificial Sequence: Synthetic polynucleotide
atggatttgtttattgaaagcaagataaacagtttattacaatttttatttggttccaggcaggattttttgagaaattttaaaacttggagtaacaacaataacaatttatccatttatttattaatttttggcatagtagtatttttttataaaaaaccagaccatttgaactacattgttgagagcgttagtgaaatgacaacaaacttcagaaataataatagccttagccgttggttgcccagaagtaagtttacccacttagacgaagagatcttgaaaagaggtggtttcattgctggtttagttaatgatggtaacacttgttttatgaactctgttttgcaatctttggcatcttccagagaattaatggagttcttggacaataatgtcataaggacctatgaggagatagaacaaaatgaacacaatgaagaaggaaacgggcaagaatctgctcaagatgaagccactcataagaaaaacactcgtaagggtggcaaagtttatggtaagcataagaagaaattgaataggaagagtagttctaaagaagacgaagaaaagagccaggagccagatatcactttcagtgtcgccttaagggatttactttctgccttaaatgcgaagtattatagagataaaccctatttcaaaaccaatagtttattgaaagcaatgtccaaatctccaagaaaaaatattcttcttggctacgaccaagaggacgcgcaagaattcttccagaacatattggccgagttggaaagtaacgttaaatctttgaatactgaaaaattggataccactccagttgcgaaaagtgaattacccgatgatgctttagtaggtcaacttaaccttggtgaagttggcactgtttacattccaactgaacagattgatcctaactctatattacatgacaagtccattcaaaatttcacacctttcaaattaatgactcctttagatggtatcacggcagaaagaattggttgtttacagtgtggtgagaacggtggcataagatattccgtattttctggattaagcttaaatttaccgaacgagaatattggttccactttaaaattatctcagttattaagcgactggagtaaacctgaaatcatcgaaggcgtagaatgtaaccgttgtgccctcacagcagcgcactctcatttatttggtcagttgaaagaatttgaaaaaaaacctgagggttctatcccagaaaagttaattaacgctgtaaaagatagggtccatcaaatcgaagaagttcttgccaaaccagttattgacgatgaagattataagaagttgcatacagcaaatatggtacgtaaatgctctaaatctaagcagattttaatatctagacctccaccattattatccattcatatcaacagatccgtatttgatccaagaacgtacatgattagaaaaaataactccaaagtattgtttaagtccaggttgaatcttgccccatggtgttgtgatattaatgaaatcaatttggatgctcgtttgccaatgtccaaaaaggaaaaagctgcgcaacaagattctagtgaagatgaaaacattggcggtgaatactatacgaaattacatgaacgcttcgagcaggaatttgaagacagcgaggaagaaaaagaatacgatgacgcagaggggaactatgcgtctcattacaatcataccaaggatatcagtaactatgatcccttaaacggtgaagtcgatggcgtgacatccgatgatgaagatgagtacattgaagaaaccgatgctttagggaatacaatcaaaaaaaggatcatagaacattctgatgttgaaaacgagaatgtaaaagataatgaagaattacaagaaatcgacaatgtgagccttgacgaaccaaagatcaatgttgaagatcaattggaaacatcttctgatgaggaagatgttataccagctccacctatcaattatgctaggtctttttccacagttccagccactccattgacatattctttgcgctctgtcattgttcactacggtacccataattatggtcattacattgcatttagaaaatacaggggttgttggtggagaatatctgatgagactgtgtacgttgtggacgaagctgaagtcctttctacacccggtgtatttatgttattttacgaatatgactttgatgaagaaactgggaagatgaaggatgatttggaagctattcagagtaataatgaagaagatgatgaaaaagagcaggagcaaaaaggagtccaggagccaaaggaaagccaagagcaaggagaaggtgaagagcaagaggaaggtcaagagcagatgaagttcgagagaacagaagaccatagagatatttctggtaaagatgtaaactga

SEQ ID NO: 1579 - DNA, 450 bp, Saccharomyces cerevisiae
atgaatctatacggttattttttacttctcattattgtgattgctttcattgcattgttgccattgttttctggcatcggtacattcaaactaacaaaaccgaaatcgtctgcaacagcacagtcagcgactggtaagcttggtaagagggaatatttgaaaaaaaaacttgatcataccaatgtattaaagtttgatctgaaggacacggaggaaagccttggccatgacagtgcaagtgcctcttccgcttccagaaaatttgaaatagactcaaagacaggccttaaaagacgtgtaattggacagtacaacaaagatccaaatgatttcgatttcgatattgatgacctaattaacgaagatgaactagatgaacggagagaagaagagaaaaagttgaagaagtacaatggtaagaaaaatgaagcttacgaaggatttgtataa

SEQ ID NO: 1580 - DNA, 450 bp, Artificial Sequence
  Description of Artificial Sequence: Synthetic polynucleotide
atgaatctttacggttattttttacttctcattattgtgattgctttcattgcattgttgccattgttttctggcatcggtacattcaaattaacaaaaccgaaatcttctgcaacagcacagtctgcgactggtaagcttggtaagagggaatatttgaaaaaaaaacttgatcataccaatgtattaaagtttgatttgaaggacacggaggaaagccttggccatgacagtgcaagtgcctcttccgcttccagaaaatttgaaatagactccaagacaggccttaaaagacgtgtaattggacagtacaacaaagatccaaatgatttcgatttcgatattgatgacttgattaacgaagatgaattagatgaaagaagagaagaagagaaaaagttgaagaagtacaatggtaagaaaaatgaagcttacgaaggatttgtatga

SEQ ID NO: 1581 - DNA, 525 bp, Saccharomyces cerevisiae
atgattaagcggtctctcgcaagtttagttcgagtcagctctgtaatgggcagaagatatatgatagcagcggcaggaggagaacgtgccagattttgtccagctgtaacaaataaaaagaatcatactgtaaatacttttcagaagagatttgtagaatcctcgacagatggtcaagttgtgcctcaagaagtgttaaacttaccgcttgaaaaataccatgaagaggcagatgactacctagaccatttactagatagcttagaagaactgagtgaggctcatccggattgtatacctgatgtagagctaagccatggcgtaatgacattggaaattccagcttttggaacgtatgtaataaacaaacagcctccaaataagcaaatttggttggcatcaccattgtccgggcctaacagatttgaccttctcaatggggagtgggtttcgttaagaaatggcacaaagctaacagatatacttactgaagaagttgagaaggccatttctaaaagccaataa

SEQ ID NO: 1582 - DNA, 525 bp, Artificial Sequence
  Description of Artificial Sequence: Synthetic polynucleotide
atgattaagagatctctcgcaagtttagttagagtcagctctgtaatgggcagaagatatatgatagcagcggcaggaggagaacgtgccagattttgtccagctgtaacaaataaaaagaatcatactgtaaatacttttcagaagagatttgtagaatcctctacagatggtcaagttgtgcctcaagaagtgttaaacttaccgcttgaaaaataccatgaagaggcagatgactacttggaccatttattagatagcttagaagaattaagtgaggctcatccggattgtatacctgatgtagagttgagccatggcgtaatgacattggaaattccagcttttggaacgtatgtaataaacaaacagcctccaaataagcaaatttggttggcatctccattgtccgggcctaacagatttgaccttctcaatggggagtgggtttctttaagaaatggcacaaagttaacagatatacttactgaagaagttgagaaggccatttctaaaagccaatga

SEQ ID NO: 1583 - DNA, 924 bp, Saccharomyces cerevisiae
atgactgagcaagcaactaagccaagaaattcatcgcatttgatcgggggctttttcggtgggctaacatctgctgttgcgttgcaacctttagaccttttgaagacgagaatccagcaagacaagaaagctacattatggaaaaatttgaaagagatagacagccctctacagctatggagaggtacattaccttcagcattacgaacatcaataggcagcgccttatatttatcatgtttgaaccttatgcgctcatctttggcaaagaggaggaatgctgtgccttcattaacaaacgattcaaacattgtatataacaagagcagtagcttaccacgattaacgatgtatgaaaatttactaacaggtgcatttgcaagaggtttggtaggttatataaccatgcctatcaccgtcattaaagtccgttatgagtctactctgtacaattactccagtttaaaggaggcaattacccatatatatactaaggaaggactttttggatttttcagagggtttggagctacttgtttaagagacgctccctatgcaggtttgtatgtgctgctatatgaaaaatcgaaacaattactgcccatggtattaccttctaggtttatacattacaatcctgagggaggatttactacttatacctctacaacagtaaatacaacaagcgccgtactatccgccagtttagccaccacagtaacggcaccgttcgacaccataaaaacgagaatgcaattggaaccatcaaaatttaccaactccttcaatacatttacatctatagttaaaaatgaaaatgtgctgaagttatttagcgggttaagcatgaggctggcaagaaaggccttcagtgcaggtattgcgtggggtatatatgaggagttggtcaaaagattcatgtaa

SEQ ID NO: 1584 - DNA, 924 bp, Artificial Sequence
  Description of Artificial Sequence: Synthetic polynucleotide
atgactgagcaagcaactaagccaagaaattcttctcatttgatcgggggctttttcggtgggttgacatctgctgttgcgttgcaacctttagaccttttgaagacgagaatccagcaagacaagaaagctacattatggaaaaatttgaaagagatagacagccctttgcagttatggagaggtacattaccttctgcattaagaacatctataggcagcgccttatatttaagttgtttgaaccttatgcgctcttctttggcaaagaggaggaatgctgtgccttctttaacaaacgattccaacattgtatataacaagagcagtagcttaccaagattaacgatgtatgaaaatttattaacaggtgcatttgcaagaggtttggtaggttatataaccatgcctatcaccgtcattaaagtccgttatgagtctactttgtacaattactccagtttaaaggaggcaattacccatatatatactaaggaaggactttttggatttttcagagggtttggagctacttgtttaagagacgctccctatgcaggtttgtatgtgcttttatatgaaaaatctaaacaattattgcccatggtattaccttctaggtttatacattacaatcctgagggaggatttactacttatacctctacaacagtaaatacaacaagcgccgtattgtccgccagtttagccaccacagtaacggcaccgttcgacaccataaaaacgagaatgcaattggaaccatctaaatttaccaactccttcaatacatttacatctatagttaaaaatgaaaatgtgttgaagttatttagcgggttaagcatgaggttagcaagaaaggccttcagtgcaggtattgcgtggggtatatatgaggagttggtcaaaagattcatgtga

SEQ ID NO: 1585 - DNA, 2658 bp, Saccharomyces cerevisiae
atggccactaacttaacatctttgaagccaccatttaaggtgaaggccaggtatggttggtcgggccaaactaaaggcgacttaggctttctggagggagatattatggaagtcacaaggattgccggttcttggttctacggcaagttattgagaaacaaaaaatgttctgggtattttcctcataacttcgtcatactattagaggagagattaaattcgagcactgaaaatggtaggcaaccttcaaaaatagtagaaagttttgaaaaatcaaataaagttgttattccaccagtaccatcaaggtattctgacgagaggccaaggcctaaaaagaagctatcttcatcaatgcccaattcacccaagaagccggtagattctttgacaaaggctagaaaggcaaaatcaaaagaaatggtaaatgaaaaaaatatctataatacccaatcctctcgacatcataataactcagctccaaatttacctttggctagccatagtaagcctcaagtacgaaatttcgaggagtccatgaacaatccgttaccacctctaccgccactaccagatttggacaatatgagaaagacagataaaagggcaccaaagaaatcatattctgcaaacgatttacatatggcacgttcttcaagagaatataactattacaaagacaaccagaaattctatgatgggtttatcccagaaaagagatattctttagaagaggactctatttcatcaggcctgttttcaaactctcagtacttaaatgattctgcttgtagtagtgagaacagttttgccttaatgagtgattttagtgccacgagcgcgggaagtttcgccagacataaatatgcacaatcgttttccgattcattgcaaagatcacagaatgcaaatggctgctctacaaagataaatgattcacaggagtttggtgattccaatgctagttcgagaaatggaaaaatgggtgatatccttaggaaaataattattccaaagaggaatacaaatatttactccagttcagtatcctcaccaaagtcaccaaaagcatatcctaaactaccagatattcagaatttaaacttgtctgcaacacccgatgaagctcgcgattggattgcggtaaaatgtcacttgaacagagcaaggactcttaccaaatatgacaaacatccgaggtatatgagagctctcgaagaaaatcgcgacttgatcttacatcctcaagattcgatttataacgggctaaataccaatgaagtcaaaggtaatacaaagcccggtttggtcgatgtggaactggccgaattaaacatagaatacattgataagatgacttggaaacggtgtattagagacggaactatgacattagacagttgggctcaaacaactttttcagcaagatactcaactgttctggaaaagttaagaggcatatacattttttgcacagagatgtttgctctgactgatgataatggaacgtcagatttttctgcggaaccccaaaatttagagaaaatactatacagaaagcattgtacgccatatgaattgacatggcttttcaagaaattagcaaactcattgggaatcacttgtgaaattgttataggtttcctgaaaacaccgagtgctataaattgggagtttaagtataaccactgctggttgagaatactggttaacaaagaatggagatttattgacgttattttaggaaatgtaaccaacccaattcatgaatttgtaaataacagaaagatcaagaaagcagaaaatagctactttttgatggcaccattagaaatgatatacacacatataccgcctagggaatttgagcagcatattgttcctagtatcgatcaattatctgcattgtatctgccattagtttttccatcttttttcaaaaatgagttaaagttatacaaatttagtactgcactatcatttttggaagattctgagatctacgaatgctccttagaaattcccaatgacgttgaagtctttgcatccgtggttattccaacggataatgaagaagcttcatctgcgtacaggaatatggaactcgcactgacccaaatcaaaaagcagaaagccgagtctggtagaagaattgctctaatcaaagcagtcctaccacccaatgtgaacaaaggttcactgtacatacattcaggtgtaagaggtacgcaaacgagtattgccaatatccatccactgtccatgatggtcccattaacacataagggaagtaacatgaaatacgaatttgtgatcaagataccctcagaaagcattcagaagattgagctatacattgtcgagccacagagtagatatctatttgttggtaatgagtactcattcgaagttattcaaagtccctccgatggtattgtatacagcagtgatgaagggccgaaccaaaataggaaacaaccaatggcaataaaatcaccctcaggaagagttcatgagctagtcaagagcgatccccactttccttatggtacctggaaaggaagcattaaaatcaaagagcccggcgtctggagcgctttagtgatcgctgactctggtattgggtggtccgtttttgctgaatggttgtgcgtataa

SEQ ID NO: 1586 - DNA, 2658 bp, Artificial Sequence
  Description of Artificial Sequence: Synthetic polynucleotide
atggccactaacttaacatctttgaagccaccatttaaggtgaaggccaggtatggttggtctggccaaactaaaggcgacttaggctttttggagggagatattatggaagtcacaaggattgccggttcttggttctacggcaagttattgagaaacaaaaaatgttctgggtattttcctcataacttcgtcatattattagaggagagattaaatagtagcactgaaaatggtaggcaaccttccaaaatagtagaaagttttgaaaaatctaataaagttgttattccaccagtaccatctaggtattctgacgagaggccaaggcctaaaaagaagttatcttcttctatgcccaattctcccaagaagccggtagattctttgacaaaggctagaaaggcaaaatctaaagaaatggtaaatgaaaaaaatatctataatacccaatcctctagacatcataataactctgctccaaatttacctttggctagccatagtaagcctcaagtaagaaatttcgaggagtccatgaacaatccgttaccacctttgccgccattaccagatttggacaatatgagaaagacagataaaagggcaccaaagaaaagttattctgcaaacgatttacatatggcacgttcttctagagaatataactattacaaagacaaccagaaattctatgatgggtttatcccagaaaagagatattctttagaagaggactctatttcttctggcttattttccaactctcagtacttaaatgattctgcttgtagtagtgagaacagttttgccttaatgagtgattttagtgccacgagcgcgggaagtttcgccagacataaatatgcacaaagtttttccgattctttgcaaagaagccagaatgcaaatggctgctctacaaagataaatgattctcaggagtttggtgattccaatgctagtagtagaaatggaaaaatgggtgatatccttaggaaaataattattccaaagaggaatacaaatatttactccagttctgtatcctctccaaagtctccaaaagcatatcctaaattaccagatattcagaatttaaacttgtctgcaacacccgatgaagctcgcgattggattgcggtaaaatgtcacttgaacagagcaaggactcttaccaaatatgacaaacatccgaggtatatgagagctctcgaagaaaatcgcgacttgatcttacatcctcaagattctatttataacgggttaaataccaatgaagtcaaaggtaatacaaagcccggtttggtcgatgtggaattggccgaattaaacatagaatacattgataagatgacttggaaaagatgtattagagacggaactatgacattagacagttgggctcaaacaactttttctgcaagatactccactgttttggaaaagttaagaggcatatacattttttgcacagagatgtttgctttgactgatgataatggaacgtctgatttttctgcggaaccccaaaatttagagaaaatattatacagaaagcattgtacgccatatgaattgacatggcttttcaagaaattagcaaactctttgggaatcacttgtgaaattgttataggtttcttgaaaacaccgagtgctataaattgggagtttaagtataaccactgctggttgagaatattagttaacaaagaatggagatttattgacgttattttaggaaatgtaaccaacccaattcatgaatttgtaaataacagaaagatcaagaaagcagaaaatagctactttttgatggcaccattagaaatgatatacacacatataccgcctagggaatttgagcagcatattgttcctagtatcgatcaattatctgcattgtatttaccattagtttttccatcttttttcaaaaatgagttaaagttatacaaatttagtactgcattatcttttttggaagattctgagatctacgaatgctccttagaaattcccaatgacgttgaagtctttgcatccgtggttattccaacggataatgaagaagcttcttctgcgtacaggaatatggaactcgcattgacccaaatcaaaaagcagaaagccgagtctggtagaagaattgctttgatcaaagcagtcttgccacccaatgtgaacaaaggttctttgtacatacattctggtgtaagaggtacgcaaacgagtattgccaatatccatccattgtccatgatggtcccattaacacataagggaagtaacatgaaatacgaatttgtgatcaagatacccagtgaaagcattcagaagattgagttatacattgtcgagccacagagtagatatttatttgttggtaatgagtactctttcgaagttattcaaagtccctccgatggtattgtatacagcagtgatgaagggccgaaccaaaataggaaacaaccaatggcaataaaaagtcccagtggaagagttcatgagttggtcaagagcgatccccactttccttatggtacctggaaaggaagcattaaaatcaaagagcccggcgtctggagcgctttagtgatcgctgactctggtattgggtggtccgtttttgctgaatggttgtgcgtatga

SEQ ID NO: 1587 - DNA, 2181 bp, Saccharomyces cerevisiae
atggaattatcccctacttatcaaacagaacgcttcacaaagttctcagacactttaaaggaattcaaaattgaacaaaataatgagcaaaaccccattgacccgtttaacatcataagagagtttcgctcagccgcggggcagcttgcgttagatttggctaattctggagatgaaagtaacgtcatatcttctaaggattgggaactggaagctagattttggcatttagtagaactgttactggttttcaggaacgctgatcttgatctagatgaaatggaacttcatccttataactcgaggggtttatttgaaaagaaattaatgcaagacaacaaacaactttatcaaatatggatagtgatggtttggctcaaagaaaatacatatgtgatggaaagacccaaaaatgtaccaacttcaaaatggttaaatagtattacttctggaggattgaaaagctgtgacttggattttcctttacgagaaaacactaatgtcctcgatgttaaagataaagaagaagatcatattttcttcaaatacatttacgaactaattttggccggtgcgattgatgaagcattagaagaagctaaactttccgacaatatttcaatttgtatgatcctgtgtgggatacaagagtacttaaaccctgtcattgatacgcaaattgcaaacgaattcaatacccagcaaggtatcaagaagcactctttgtggagaagaacagtttacagcctttcgcagcaggccggtttggacccttatgaaagggcgatatacagctatttgagtggcgctattcccaaccaagaagttctgcaatattcggattgggagtctgatctgcacatacacttaaatcaaattttacaaactgaaattgaaaattatcttttggaaaacaatcaagtaggtactgatgaactgattttaccattaccttcacacgcgctaactgtacaagaggtgcttaatagagtggcttcaaggcatccctcagaaagtgaacatccaatcagagttttaatggcatctgtcatactagattctttgccatcagttattcattcatccgtggaaatgttgcttgatgtcgtcaagggaaccgaagctagtaacgatattatagataagccttatcttctgaggatagttacacatttagccatttgccttgatataattaatccaggttctgttgaagaggttgataagtccaagctcattactacgtatatcagtcttctgaaattgcaaggcctttatgaaaatattccaatatatgctactttcctgaatgagtcagactgcttagaggcatgctctttcatattgtcttctttagaggacccccaagtaaggaaaaagcaaattgagacaataaactttctaagattacctgcctcaaatattttgagaagaaccacacagcgtgttttcgatgaaaccgaacaagaatattcaccatctaacgaaatttccatatctttcgatgtaaacaacattgatatgcacttaatatatggcgtggaatggcttattgaagggaagctttatgtggacgctgtccactctatcattgccttatcgaggagatttttgttaaatggccgcgtaaaggctctcgaacaatttatggagagaaataatattggagaaatatgcaagaattatgaattagagaaaatagccgataacatatcaaaggatgaaaatgaagatcagtttttggaagaaataactcaatatgagcatttgataaagggcataagagaatatgaagaatggcaaaaatccgttagcttgttaagctctgaatcgaacattcctactttaatagagaaattgcaaggtttttcaaaggatacatttgaattgatcaagacatttttagtagatttaacttcctctaatttcgcggattcggcagattatgaaatcctgtatgagattagagccctatatactccatttctactgatggaattgcataaaaagttagtggaagccgcaaagttgttaaagatcccaaaatttatttcggaagccctggcatttacctcattggtcgctaatgagaacgacaagatttatttattattccaatctagtggaaagttaaaagagtatctggatctcgttgctcgcacagcaaccctttcgaactga

SEQ ID NO: 1588 - DNA, 2181 bp, Artificial Sequence
  Description of Artificial Sequence: Synthetic polynucleotide
atggaattatcccctacttatcaaacagaacgcttcacaaagttcagtgacactttaaaggaattcaaaattgaacaaaataatgagcaaaaccccattgacccgtttaacatcataagagagtttcgctctgccgcggggcagcttgcgttagatttggctaattctggagatgaaagtaacgtcatatcttctaaggattgggaattggaagctagattttggcatttagtagaattattattggttttcaggaacgctgatcttgatttggatgaaatggaacttcatccttataacagcaggggtttatttgaaaagaaattaatgcaagacaacaaacaactttatcaaatatggatagtgatggtttggctcaaagaaaatacatatgtgatggaaagacccaaaaatgtaccaacttctaaatggttaaatagtattacttctggaggattgaaaagctgtgacttggattttcctttaagagaaaacactaatgtcctcgatgttaaagataaagaagaagatcatattttcttcaaatacatttacgaattgattttggccggtgcgattgatgaagcattagaagaagctaaactttccgacaatatttccatttgtatgatcttgtgtgggatacaagagtacttaaaccctgtcattgatacgcaaattgcaaacgaattcaatacccagcaaggtatcaagaagcactctttgtggagaagaacagtttacagcctttctcagcaggccggtttggacccttatgaaagggcgatatacagctatttgagtggcgctattcccaaccaagaagttttgcaatattctgattgggagtctgatttacacatacacttaaatcaaattttacaaactgaaattgaaaattatcttttggaaaacaatcaagtaggtactgatgaattgattttaccattaccttctcacgcgttgactgtacaagaggtgcttaatagagtggcttccaggcatcccagtgaaagtgaacatccaatcagagttttaatggcatctgtcatattggattctttgccatctgttattcattcttccgtggaaatgttgcttgatgtcgtcaagggaaccgaagctagtaacgatattatagataagccttatcttttgaggatagttacacatttagccatttgccttgatataattaatccaggttctgttgaagaggttgataagtccaagctcattactacgtatatcagtcttttgaaattgcaaggcctttatgaaaatattccaatatatgctactttcttgaatgagagtgactgcttagaggcatgctctttcatattgtcttctttagaggacccccaagtaaggaaaaagcaaattgagacaataaactttttaagattacctgcctctaatattttgagaagaaccacacagcgtgttttcgatgaaaccgaacaagaatattctccatctaacgaaatttccatatctttcgatgtaaacaacattgatatgcacttaatatatggcgtggaatggcttattgaagggaagctttatgtggacgctgtccactctatcattgccttatctaggagatttttgttaaatggccgcgtaaaggctctcgaacaatttatggagagaaataatattggagaaatatgcaagaattatgaattagagaaaatagccgataacatatccaaggatgaaaatgaagatcagtttttggaagaaataactcaatatgagcatttgataaagggcataagagaatatgaagaatggcaaaaatccgttagcttgttaagctctgaatctaacattcctactttaatagagaaattgcaaggtttttccaaggatacatttgaattgatcaagacatttttagtagatttaacttcctctaatttcgcggattctgcagattatgaaatcttatatgagattagagccttatatactccatttttattgatggaattgcataaaaagttagtggaagccgcaaagttgttaaagatcccaaaatttatttctgaagccttggcatttacctctttggtcgctaatgagaacgacaagatttatttattattccaatctagtggaaagttaaaagagtatttggatctcgttgctcgcacagcaaccctttccaactga

SEQ ID NO: 1589 - DNA, 1062 bp, Saccharomyces cerevisiae
atgagcactattagtaccacaacggcacctgagtttatcagagtaaagagaagaagggatgaggattctgtgcaggcattattaattgatgaggggaaaagagtgaagaagcagaagttcatatttaaattatcaaagactgtgagctctgaaagctatcaatccgagcaagagtcttctacgccactcttaaaactggctcatgaagatcatcgacattttgtattggaacaaagaaaaaaaagtcgtagagactcagatgatgaaaaatcacaacagcggcttgcagcagaaggaagtactgtagatgacgatgggttaccgccagagatcaatcaaatggtgaatgactatttaaagttgaataaaggtgtagaaaagacagaaagaaaaaaaccaagtaggaaatattttactggggattctgcaaaaattgcatcactacccagtttagattacgtttttgacatctaccatttggagaaaattcatgacgatgaggttgctagatataacaacgagaaaaatatagggtttgtgaaaattattgagcatatagatttggctcttgatgaagaaagtgatcccaatgaagcccgttcagacgatgaggattctaatgacgaaaactattaccaaaatgattatccggaggatgaagatgatgatagatctattctatttggtagcgaaggagaggatatagctgcattgggtgaagagattgttataggggttaataagagcaggttttcctcttggaatgacgataaaattcagggatctaatgggtaccacgatgtggaggaagagtacggggatctttttaacaggcttggaggaaaaagtgatgtcttgaaatccataaattcctcgaatttcattgacttggatggccaagaaggtgaaatagagataagtgataacgaagatgattctgatgaaggagatgatattgaataccctagaaatgaattttttccgacggatgttgatgacccattggcgcatcatagggacagaatttttcatcagctacagaaaaaaattaatagaagctaa

SEQ ID NO: 1590 - DNA, 1062 bp, Artificial Sequence
  Description of Artificial Sequence: Synthetic polynucleotide
atgagcactattagtaccacaacggcacctgagtttatcagagtaaagagaagaagggatgaggattctgtgcaggcattattaattgatgaggggaaaagagtgaagaagcagaagttcatatttaaattatccaagactgtgagctctgaaagctatcaatccgagcaagagtcttctacgccactcttaaaattggctcatgaagatcatcgtcattttgtattggaacaaagaaaaaaaagtcgtagagacagtgatgatgaaaaatctcaacagagacttgcagcagaaggaagtactgtagatgacgatgggttaccgccagagatcaatcaaatggtgaatgactatttaaagttgaataaaggtgtagaaaagacagaaagaaaaaaaccaagtaggaaatattttactggggattctgcaaaaattgcatctttacccagtttagattacgtttttgacatctaccatttggagaaaattcatgacgatgaggttgctagatataacaacgagaaaaatatagggtttgtgaaaattattgagcatatagatttggctcttgatgaagaaagtgatcccaatgaagcccgttccgacgatgaggattctaatgacgaaaactattaccaaaatgattatccggaggatgaagatgatgatagatctattttatttggtagcgaaggagaggatatagctgcattgggtgaagagattgttataggggttaataagagcaggttttcctcttggaatgacgataaaattcagggatctaatgggtaccacgatgtggaggaagagtacggggatctttttaacaggcttggaggaaaaagtgatgtcttgaaatccataaattcctctaatttcattgacttggatggccaagaaggtgaaatagagataagtgataacgaagatgattctgatgaaggagatgatattgaataccctagaaatgaattttttccgacggatgttgatgacccattggcgcatcatagggacagaatttttcatcagttacagaaaaaaattaatagaagctga

SEQ ID NO: 1591 - DNA, 927 bp, Saccharomyces cerevisiae
atggtacgcaagaataaaataaatagagcgagtggaactacaaaacacctcaaggattttccatcagtcatcctaagtctgcccagctacaacccttccatcctttctaaaaatgcaactgcactaataaccggtggttctagtggactcggatttgaacttgcaaaggaactttccagaagaattaataaagttattgtggcagatattcaatcatttcctacttttgctcaggtagaatataataacattttctactatcaatgcgacataacaagtctagatgaaattaaaaatttgaaaaaagctattgaaagagatcatggcaacattaatataattataaataatgctggtgttgctcacatcaaaaagttagaacatatgacaaacaaggaggtagaacaattgatcgacataaacttaataggtgcttaccgaatcatcagtacatttgcagaagatatgatagacaatagggaaggctttataattaacattgcttcagtcctcggagaactgactcctgcaaggctgacatcgtatggtgcatcaaaaggagcaatgattggttttcacaagtgtatgagcaggcatttcagaagtttgtccacggaatgtaataaaactggaataaaaacactactggtgtgcccgggaaaaatcaaaactaatatgtttattgatgtccctacaccatctaagttattggctcctgacatcataccttcccaactggcactagcgataatctctgcgatggagcataatcatctgcaaacactaaatgccccatattatgtgaacctagttccctttttcaaaactttgagttggccatataggcatctcttaaaacatttcagtggaatggaccatgtaacgtcaaccagcccgcgagcaataaatccgaagagaagtgcataa

SEQ ID NO: 1592 - DNA, 927 bp, Artificial Sequence
  Description of Artificial Sequence: Synthetic polynucleotide
atggtacgcaagaataaaataaatagagcgagtggaactacaaaacacctcaaggattttccaagtgtcatcttaagtttacccagctacaacccttccatcctttctaaaaatgcaactgcattaataaccggtggttctagtggactcggatttgaacttgcaaaggaactttccagaagaattaataaagttattgtggcagatattcaaagttttcctacttttgctcaggtagaatataataacattttctactatcaatgcgacataacaagtttggatgaaattaaaaatttgaaaaaagctattgaaagagatcatggcaacattaatataattataaataatgctggtgttgctcacatcaaaaagttagaacatatgacaaacaaggaggtagaacaattgatcgacataaacttaataggtgcttacagaatcatcagtacatttgcagaagatatgatagacaatagggaaggctttataattaacattgcttctgtcctcggagaattgactcctgcaaggttgacatcttatggtgcatccaaaggagcaatgattggttttcacaagtgtatgagcaggcatttcagaagtttgtccacggaatgtaataaaactggaataaaaacattattggtgtgcccgggaaaaatcaaaactaatatgtttattgatgtccctacaccatctaagttattggctcctgacatcataccttcccaattggcattagcgataatctctgcgatggagcataatcatttacaaacattaaatgccccatattatgtgaacttggttccctttttcaaaactttgagttggccatataggcatctcttaaaacatttcagtggaatggaccatgtaacgtccaccagcccgagagcaataaatccgaagagaagtgcatga

SEQ ID NO: 1593 - DNA, 1923 bp, Saccharomyces cerevisiae
atgtcagacttaaatgatgtccaagaaaatgctaaattgaattcggaaactcggaatacaggaaaggctgaaccacctcatgggacaactgagtatgtggcagaggcagaaatttctaagaatggagttggatcgccaaaaaagagcccaaaaaagggtaaggttggaaagggggacaataacaaagtagaaactgagttagtacacacagccctgttagaaaaagacaacccattcatggaggaggggccaacaggattcacaaaatcagctttattagaaatacccggtatgagaagccataacctaaagaacccgaatgaagattacgaggatgactctgagggattattgcctttaaaccaagaatcgaatgcagaaacatgtagaacaagtcttagtggaagtattaactccatgaacggagagacctctgcgtcagaagaaccttctgtaagtaatagaaagaagtccgctaggatacacatacttgaagcgaaaagagtttccgaaggtcaaggaagagcctacatcgcctatgttattcagtttgaaaattctaccgttcagagacgttacagcgatttcgagagtttgagaagtatcttgataagattgtttcctatgacgttgataccgccgattccagaaaagcagtcaataaagaattatggtaagtcaataactggttcgagttcaaagtatttgctgccctcagaaggttctggttcagtagatctatcattgtctgtgatacatgcgtcggtcaataatagtgatgaaaagttaatacggcataggataagaatgctcactgagttcttgaacaaacttttgacgaacgaagaaatcacaaaaacatctataattaccgattttttggatcctaataaccataattggcatgaatttgttaacagttcgtccactttttcatctttaccgaagagcatcctccagtgtaatccactagatcccactaacaccactagaattcatgccatgttaccaataccgggctcctcgtcacagttattgttgaataaggagtccaacgacaaaaaaatggataaggaaagaagtaagtcgtttactaatattgaacaggattacaagcaatatgagaacttgttagataacgggatttataagtataatagacgaaccacgaagacttatcacgatttgaaatcggattacaatgaaatcggtgaggtatttgcacagtttgcccatgaacaggctcaagttggggaattggccgaacagctttcttacttaagcaatgccttttcggggtcctcgatttctttagaaaaattagttggaagactatactacaatataaatgagcctttaaatgaatctgttcatatggcaacttctgcaagagaattgatcaaatacagaaaattgaaatacctgcaaaatgaaatgattaaaaagtctctgaattccaaaagagcacagttggagaagctggaagcgcaaaacaatgaatataaggatgttgacaaaataattgacaacgaaatgtctaaaagtcatactattaatctggaacgccctaataataatacaggtagcggtgggaaatcatatggtggcaaactattcaatggatttaacaaattggcatcaatggtaaaagattctgtgaagtatcaagaaacagatccgcataccgcaagtatcaatttgaagaaagaaattgaacaactgtctgaatcattggaagttactgagaatgatttggaggtcatttcaaaagtcatcaaaaatgaccagctacctaaattttctaaagaaagggaagtagatttatcagaaattttaaagcattattccagatatatgagaaattatgcccgtcaaaatttagaaatttggaaagaagtcaaaagacatcaagattttgcatag

SEQ ID NO: 1594 - DNA, 1923 bp, Artificial Sequence
  Description of Artificial Sequence: Synthetic polynucleotide
atgtctgacttaaatgatgtccaagaaaatgctaaattgaattctgaaactagaaatacaggaaaggctgaaccacctcatgggacaactgagtatgtggcagaggcagaaatttctaagaatggagttggatctccaaaaaagagcccaaaaaagggtaaggttggaaagggggacaataacaaagtagaaactgagttagtacacacagccttattagaaaaagacaacccattcatggaggaggggccaacaggattcacaaaatctgctttattagaaatacccggtatgagaagccataacttgaagaacccgaatgaagattacgaggatgactctgagggattattgcctttaaaccaagaaagtaatgcagaaacatgtagaacaagtcttagtggaagtattaactccatgaacggagagacctctgcgtctgaagaaccttctgtaagtaatagaaagaagtccgctaggatacacatacttgaagcgaaaagagtttccgaaggtcaaggaagagcctacatcgcctatgttattcagtttgaaaattctaccgttcagagacgttacagcgatttcgagagtttgagaagtatcttgataagattgtttcctatgacgttgataccgccgattccagaaaagcagagtataaagaattatggtaagagtataactggtagtagttccaagtatttgttgcccagtgaaggttctggttctgtagatttatctttgtctgtgatacatgcgtctgtcaataatagtgatgaaaagttaataagacataggataagaatgctcactgagttcttgaacaaacttttgacgaacgaagaaatcacaaaaacatctataattaccgattttttggatcctaataaccataattggcatgaatttgttaacagttcttccactttttcttctttaccgaagagcatcctccagtgtaatccattagatcccactaacaccactagaattcatgccatgttaccaataccgggctcctcttctcagttattgttgaataaggagtccaacgacaaaaaaatggataaggaaagaagtaagagctttactaatattgaacaggattacaagcaatatgagaacttgttagataacgggatttataagtataatagaagaaccacgaagacttatcacgatttgaaatctgattacaatgaaatcggtgaggtatttgcacagtttgcccatgaacaggctcaagttggggaattggccgaacagctttcttacttaagcaatgccttttctgggtccagtatttctttagaaaaattagttggaagattatactacaatataaatgagcctttaaatgaatctgttcatatggcaacttctgcaagagaattgatcaaatacagaaaattgaaatacttacaaaatgaaatgattaaaaagtctttgaattccaaaagagcacagttggagaagttggaagcgcaaaacaatgaatataaggatgttgacaaaataattgacaacgaaatgtctaaaagtcatactattaatttggaacgccctaataataatacaggtagcggtgggaaaagttatggtggcaaattattcaatggatttaacaaattggcatctatggtaaaagattctgtgaagtatcaagaaacagatccgcataccgcaagtatcaatttgaagaaagaaattgaacaattatctgaatctttggaagttactgagaatgatttggaggtcatttccaaagtcatcaaaaatgaccagttgcctaaattttctaaagaaagggaagtagatttatctgaaattttaaagcattattccagatatatgagaaattatgcccgtcaaaatttagaaatttggaaagaagtcaaaagacatcaagattttgcatga

SEQ ID NO: 1595 - DNA, 4311 bp, Saccharomyces cerevisiae
atggttggaggtgctctcatctgcaaatatttaccacgcgaagagcaactaaagcttatatcagacttgattcagaatgacagcttagaagaggtgctggagttgattgaaacttcgccactggatataacgacggacagcaacattgaaacaccaatctttgaaaaaattactgagcaggtcattgcgtatgctagtatagacggtgaagccagggaaatgtttcgctcttcgagggctgaaatgaacaaggcgctaagaacttctgcacaattactatgttgtttacccagtgtatggcataaatttcaggtgtggatgagctaccggttaaatgacatcattagcgaaaactataaacatctcttcaatgacaactttggaaaaaagattgtacaaccatttttcgattcttttgctgaggaacaaaacgctaatatcaagcatgaaaatctgcacttagatatccttagcctgcttcactacttagaagttgtatatttatttgacgaatgtaagaatggtatatcgtccaaatgcctagattttatcattgttccattgttaggctgtaattcggaagagattgctgattcctgctccaagttaatgagatggcatatcaaatatttatcgaaatgctgcaataccgatagtaactttgataagctcatttggacatttatcaaacaattgtacgctgaaggctcccaacaagcttggaagcaaaagaacagtttatcttttctcctaagattccttttagcagcagagttgtctcctgaacttattacttatataaagaccgatgcttattggaggcacattcaaacagagctggataatgatgtgcacgaacacagaaaattggcactctcaattcttaaattaacaattcaaaaactgtcatctcatggtataacattgcaaacaacattttataaatgcaatgatctagcaaatatcgagatgctgggtagctggaagaaattcaccaccttatatgaaatgattgctctggacacatcattgaatcaaatacaagcggccaaacaagatataataaaaatttttgataacgagcatttacaccatagttggggccttatcttgctttctacgggattgaaatcatcaatggagagtgtcagaaaatacatgatgacgttaatgttctcgattacaaatatgtcagcattctcttcaaacttgccattattgacaaaaactcttcttccagctgcaatgtccgctcattattttgatgtaaaaggtgtcagttgtccccatggtgaaaaactttcattatttgtcaataacttactttcccaaacaacagaaggcatatcagatatattatttgaaattttgaaattattggtggaaaaagggacctcttttgacccttctaggatatacttgtcctacggtatcttagttttcttccagaataacaaacagaaaacaatcaactctgaccatttgagtctgatcaggaaattgtacgattttgcagccgaagaagaggttctcgaaactacaatccaaacaatttacttgaagttcttactgtacattgatccatctgtctccgcatctgaattattgtttacattagtttcacacattaagttaaagggagggacatacaaatatgttgagcctctttttgaagattatagggatcttgccgtttctcactttgacgatttgcaagcgaaagaaaacttgacgacaaacatcggaaaggatactatttttgacctcttagcatctatcatcttcgatttcaaggatattgatattactcccgattttttaattgaagttgcgaagtcgaagcaagatatacccgtttacacttcaaaggcagttacttttctaactcagctactttcaggcgaaccttcgaacggttatacctatgaaaatgcaaccgctttgttgtcttacccaaattttacaatatctacatggaaatccatcaatgtgaataatttatttaagtcggtaatggaaaaattttcgcttgataaattcaagttctttgctgaaatttaccagaagacttatgaatgtaggttcgatacaatcgagctaaattttaatgaccttctgagcctatatgaaatggttaaaaagtctgccaatcagtgttcaagagagagctttaaagtgaaggacagcgcttattcttcttactttgaacttttaaataccttcctgaaaacatacgccttaaatcgtgactcttctgaaggaaatgatgatgagcttcacatactactacgcttagttgacgagaatattaacaaagataatgggaattatctggggaacctggcagtctgtaaattattgtactttatcatagattcctacatccattgctccacatctgtttctgatgatgatattttcatagtgaaattcatttttgagaaattttcgtttatatgggaatgtattaatagtgaaagattagttttgaaggaaagggatctgcatttgatgctaattaagggattatttcatcctgtgatcctgtactttggatcaaatcagtatatcgatactttgacctcgaagttggaggaacatgcacaaacgattatatcattgagttattccagaagaagcctactccctcttctcggatcacaactcagagtatttatgaagttttatgggaaattgttaagagaagatgtcaactattggtggttgattaacattatagtaggtgttttcaaacagccgcaaatggatgtcaacctttacaagctcaaacctgttatttccagcctatttgaccacaaactgaacaattattacataaaaggcgatgaactttatgaaaaggtgtacggacccgacgaaatattggctagagtatctattattgattctattttatatgcaaatgatcagttgaaaattcgattaatcgaaaaagttactgaaaaaacaaacgcactttatgctataaagagaaccgacggtgccgaagcgttacagaggttgttgcagtggcaattgttattattatcactactaaccaccaatgaaaaaaaattaagcgaaactagcatgatcagaattctaaagagtatcgaggatgaaagttcaccactagtaagagtatataaagaatggttcatttcctcaaaggttgttgattattataaaactggcaatccaaaatttgctgaggattatctcttctcattgctggaggatcatagcaaaccggtgtttgtagttagcgcagaaaaaatatgctttatggtgttgaaagatttaagaaacgacgaaaagaaatatggatttacacagttactagacagattcatttgcacgttagttcctaacgcagcttcaaacaaacctctggtaaggcatttttctaattctctaataatttcattatggcctacattcaaagcctacctatcggatcacacactgagaaacatcattgagaacttatattccaatgccaaaaagactcaaatatttggtcaatatcgtgccggggatgccaacatatgggatctgaagggtgataggaaattaacgaacatgtttggtggtgtgctcaaaaaagttaccgaccatgattgcccgtacatttctgagtctgttttcgaaaaatatttgcaggagaaagatattgttcctataggtaccgatgaaaggtccttatggcttgataaaagagacaccaatacggaatctgttaacaacgcgaacatctcctgtgacacttctccactgcaaacaaaaagtggagcttgggaaaccgttctggatctggacaataaaaaatcgaatgatgtcgttacacgttctgaattgattgtggtatcttcattagttgataagccgccaaacctgggaggtatttgtaggttatgtgatgttttaggtgtgggactgcttactgtacaagacatcaaagtcaaaaaccatcctcaatttaaaaatgttgctgtgactgctgatagatggatgcccatggaggaagttgccctagatgagattgcaagtttcatgaaagagaaaaagaaggaagggtacacattaattgggctagagcaaacggataaatcagtgaagctagacaacaatttccaattccctaaaaaatcattgatcttgctaggaaccgaagcattcggtattccggggactttgttaagcgaattggatttatgtttagagattcaacaatttggtgtgatcagatcaatgaatattcaaacggcaaccgcagttatcgttcattcctatacagttcaacacatgtaa

SEQ ID NO: 1596 - DNA, 4311 bp, Artificial Sequence
  Description of Artificial Sequence: Synthetic polynucleotide
atggttggaggtgctctcatctgcaaatatttaccacgcgaagagcaattgaagcttatatctgacttgattcagaatgacagcttagaagaggtgttggagttgattgaaacttctccattagatataacgacggacagcaacattgaaacaccaatctttgaaaaaattactgagcaggtcattgcgtatgctagtatagacggtgaagccagggaaatgtttcgctcttccagggctgaaatgaacaaggcgttaagaacttctgcacaattattatgttgtttacccagtgtatggcataaatttcaggtgtggatgagctacagattaaatgacatcattagcgaaaactataaacatctcttcaatgacaactttggaaaaaagattgtacaaccatttttcgattcttttgctgaggaacaaaacgctaatatcaagcatgaaaatttacacttagatatccttagcttgcttcactacttagaagttgtatatttatttgacgaatgtaagaatggtatatcttccaaatgcttagattttatcattgttccattgttaggctgtaattctgaagagattgctgattcctgctccaagttaatgagatggcatatcaaatatttatccaaatgctgcaataccgatagtaactttgataagctcatttggacatttatcaaacaattgtacgctgaaggctcccaacaagcttggaagcaaaagaacagtttatcttttctcttgagattccttttagcagcagagttgtctcctgaacttattacttatataaagaccgatgcttattggaggcacattcaaacagagttagataatgatgtgcacgaacacagaaaattggcactctccattcttaaattaacaattcaaaaattatcttctcatggtataacattgcaaacaacattttataaatgcaatgatttggcaaatatcgagatgttgggtagctggaagaaattcaccaccttatatgaaatgattgctttggacacatctttgaatcaaatacaagcggccaaacaagatataataaaaatttttgataacgagcatttacaccatagttggggccttatcttgctttctacgggattgaaatcttctatggagagtgtcagaaaatacatgatgacgttaatgttctccattacaaatatgtctgcattctcttccaacttgccattattgacaaaaactcttcttccagctgcaatgtccgctcattattttgatgtaaaaggtgtcagttgtccccatggtgaaaaactttctttatttgtcaataacttactttcccaaacaacagaaggcatatctgatatattatttgaaattttgaaattattggtggaaaaagggacctcttttgacccttctaggatatacttgtcctacggtatcttagttttcttccagaataacaaacagaaaacaatcaactctgaccatttgagtttaatcaggaaattgtacgattttgcagccgaagaagaggttctcgaaactacaatccaaacaatttacttgaagttcttattgtacattgatccatctgtctccgcatctgaattattgtttacattagtttctcacattaagttaaagggagggacatacaaatatgttgagcctctttttgaagattatagggatcttgccgtttctcactttgacgatttgcaagcgaaagaaaacttgacgacaaacatcggaaaggatactatttttgacctcttagcatctatcatcttcgatttcaaggatattgatattactcccgattttttaattgaagttgcgaagtccaagcaagatatacccgtttacacttctaaggcagttacttttttaactcagttactttctggcgaaccttccaacggttatacctatgaaaatgcaaccgctttgttgtcttacccaaattttacaatatctacatggaaatccatcaatgtgaataatttatttaagagtgtaatggaaaaattttcccttgataaattcaagttctttgctgaaatttaccagaagacttatgaatgtaggttcgatacaatcgagttgaattttaatgaccttttgagcttgtatgaaatggttaaaaagtctgccaatcagtgttccagagagagctttaaagtgaaggacagcgcttattcttcttactttgaacttttaaataccttcttgaaaacatacgccttaaatcgtgactcttctgaaggaaatgatgatgagcttcacatattacttcgcttagttgacgagaatattaacaaagataatgggaattatttggggaacttggcagtctgtaaattattgtactttatcatagattcctacatccattgctccacatctgtttctgatgatgatattttcatagtgaaattcatttttgagaaattttcttttatatgggaatgtattaatagtgaaagattagttttgaaggaaagggatttgcatttgatgttgattaagggattatttcatcctgtgatcttgtactttggaagtaatcagtatatcgatactttgacctccaagttggaggaacatgcacaaacgattatatctttgagttattccagaagaagcttactccctcttctcggatctcaactcagagtatttatgaagttttatgggaaattgttaagagaagatgtcaactattggtggttgattaacattatagtaggtgttttcaaacagccgcaaatggatgtcaacctttacaagctcaaacctgttatttccagcttgtttgaccacaaattgaacaattattacataaaaggcgatgaactttatgaaaaggtgtacggacccgacgaaatattggctagagtatctattattgattctattttatatgcaaatgatcagttgaaaattagattaatcgaaaaagttactgaaaaaacaaacgcactttatgctataaagagaaccgacggtgccgaagcgttacagaggttgttgcagtggcaattgttattattaagtttattaaccaccaatgaaaaaaaattaagcgaaactagcatgatcagaattttgaagagtatcgaggatgaaagttctccattagtaagagtatataaagaatggttcatttcctccaaggttgttgattattataaaactggcaatccaaaatttgctgaggattatctcttcagtttgttggaggatcatagcaaaccggtgtttgtagttagcgcagaaaaaatatgctttatggtgttgaaagatttaagaaacgacgaaaagaaatatggatttacacagttattagacagattcatttgcacgttagttcctaacgcagcttctaacaaacctttggtaaggcatttttctaattctttgataatttctttatggcctacattcaaagcctacttaagtgatcacacattaagaaacatcattgagaacttatattccaatgccaaaaagactcaaatatttggtcaatatcgtgccggggatgccaacatatgggatttgaagggtgataggaaattaacgaacatgtttggtggtgtgctcaaaaaagttaccgaccatgattgcccgtacatttctgagtctgttttcgaaaaatatttgcaggagaaagatattgttcctataggtaccgatgaaaggtccttatggcttgataaaagagacaccaatacggaatctgttaacaacgcgaacatctcctgtgacacttctccattgcaaacaaaaagtggagcttgggaaaccgttttggatttggacaataaaaaatctaatgatgtcgttacacgttctgaattgattgtggtatcttctttagttgataagccgccaaacttgggaggtatttgtaggttatgtgatgttttaggtgtgggattgcttactgtacaagacatcaaagtcaaaaaccatcctcaatttaaaaatgttgctgtgactgctgatagatggatgcccatggaggaagttgccttggatgagattgcaagtttcatgaaagagaaaaagaaggaagggtacacattaattgggttagagcaaacggataaatctgtgaagttggacaacaatttccaattccctaaaaaatctttgatcttgttgggaaccgaagcattcggtattccggggactttgttaagcgaattggatttatgtttagagattcaacaatttggtgtgatcagaagtatgaatattcaaacggcaaccgcagttatcgttcattcctatacagttcaacacatgtga

SEQ ID NO: 1597 - DNA, 798 bp, Saccharomyces cerevisiae
atgtctctttcggtcgccgaaaagtcgtacctatacgattcactagcaagcacgccttcaattaggcccgatggaagactacctcatcaattcagacctatagaaatatttactgacttcctaccaagttccaatggatcgtccagaattatagctagtgatggaagtgaatgtatcgtgagcattaagtccaaagttgtggatcatcatgtggagaatgaactacttcaggtcgatgtagatatcgcaggccaaagagatgacgcgctggtagtagagacaatcacttctttactgaacaaggttttgaagtctggtagcggagtagattcctcaaagttgcaattgacaaaaaagtacagcttcaaaatatttgtcgatgttctggtcatttcatcacattcacacccagtttctttaatatcctttgctatttattcagcgttgaactccacatacctaccgaaacttatttcagcttttgacgacttagaggtggaagaacttcctacgtttcatgattacgacatggttaagcttgacattaatccgcctttagtgtttatattggccgttgtaggcaacaatatgctattggaccctgcagccaacgaaagcgaagtggccaataatggcctaatcatttcctggtctaatggtaagattacatcacctatcagatcagtagcattgaatgattcaaacgttaaaagctttaaacctcatttgttgaagcaaggtcttgcaatggtggagaaatacgcccccgacgtagtacgatcactggagaatttataa

SEQ ID NO: 1598 - DNA, 798 bp, Artificial Sequence
  Description of Artificial Sequence: Synthetic polynucleotide
atgtctctttctgtcgccgaaaagtcctacttgtacgattctttggcaagcacgccttctattaggcccgatggaagattacctcatcaattcagacctatagaaatatttactgacttcttaccaagttccaatggatcttccagaattatagctagtgatggaagtgaatgtatcgtgagcattaagtccaaagttgtggatcatcatgtggagaatgaattgcttcaggtcgatgtagatatcgcaggccaaagagatgacgcgttggtagtagagacaatcacttctttattaaacaaggttttgaagtctggtagcggagtagattcctccaagttgcaattgacaaaaaagtacagcttcaaaatatttgtcgatgttttggtcatttcttctcattctcacccagtttctttaatatcctttgctatttattctgcgttgaactccacatacttgccgaaacttatttctgcttttgacgacttagaggtggaagaacttcctacgtttcatgattacgacatggttaagcttgacattaatccgcctttagtgtttatattggccgttgtaggcaacaatatgcttttggaccctgcagccaacgaaagcgaagtggccaataatggcttaatcatttcctggtctaatggtaagattacatctcctatcagatctgtagcattgaatgattccaacgttaaaagctttaaacctcatttgttgaagcaaggtcttgcaatggtggagaaatacgcccccgacgtagtaagatctttggagaatttatga

SEQ ID NO: 1599 - DNA, 453 bp, Saccharomyces cerevisiae
atgtgctcagcaggcggtatcagaagaccaatccagatcgaagaatttaagacggcgataagcggcatgtccgacatggagttggcacagattaaaacagaaattgagaacagtatcaatcatttgcagaggtctaacgcccgcttgggtaaatacatagctaagttggagggtgctgacgaccgtcttgaagctgacgacagcgacgacttggagaacattgattcgggagacctggcgctgtacaaggactctgtcagggagaacgaaattgtgctaaacaattacaatgagagagtggacgcattggagcaagaaacggtatatagaaagacgggccatggcaagagtaagcacgaggtagaggcaaaggacaacaccaacaagggccctgacgttgacatggacaattcaaatgtggacgtcgtgacaccaaacagcatattcatttaa

SEQ ID NO: 1600 - DNA, 453 bp, Artificial Sequence
  Description of Artificial Sequence: Synthetic polynucleotide
atgtgctctgcaggcggtatcagaagaccaatccagatcgaagaatttaagacggcgataagcggcatgtccgacatggagttggcacagattaaaacagaaattgagaacagtatcaatcatttgcagaggtctaacgcccgcttgggtaaatacatagctaagttggagggtgctgacgaccgtcttgaagctgacgacagcgacgacttggagaacattgattctggagacttggcgttgtacaaggactctgtcagggagaacgaaattgtgttgaacaattacaatgagagagtggacgcattggagcaagaaacggtatatagaaagacgggccatggcaagagtaagcacgaggtagaggcaaaggacaacaccaacaagggccctgacgttgacatggacaatagtaatgtggacgtcgtgacaccaaacagcatattcatttga

SEQ ID NO: 1601 - DNA, 1944 bp, Saccharomyces cerevisiae
atggaagctggcaggagtgctgatgaagtgctataccacaatcagtcgtcagtaaagttaggtgagttagaaagatacgttattacatatgagctataccagggtgatagtattcccgctgatatcacactggattccctatgggtaaagatcaaaaataccacaaagctatcctataaaccagcctatctattgggcccatttatcttatattgtgacgtgcgagcaaaagattacgaaagctcgtataagatcatatgttcggcggataaaccagtatttcaatcaaacctacaggcacaacaaaagtttattgcagagttgtccttgcaccacattaagccacgctatgtatggatagtggatattgtcagtcaaatactatttaataaagaaactaaggtaacttttgagatagtagtcggcaattcaaaggcctctttgaaaagaaaaatacgatgtaatgattcattgcctgataaagcctgcaatattttacacacaggattatcggtgcatagacttaccaccgcagatatatggaaagtaccacgacccatagacatgtcgcaaaaatcccatttagtcattctcacgcatggttttcaatcaaacgtttcggcagatatggaatacttaatggaagaaatatacaaggctcaaatgaacaatccaaatgagcgactagttattaagggatatatgaagaatgcttgtgagactgagaagggtattaagtttttgggtgttggattggcaaactacatcatcgacgagttatatgatgactctgttgggaaaatttcatttattggtcattccctgggtggattaacacaaacttttgctatttgttacataaagaccaaatatccatatttctttaagaaagtggagccaatcaattttatctcactggcgtcaccattgctaggcattgctaccagcacgcccaattacgtaaaaatgtcattgtcgatgggtatcattggtactacggggcaagaactgggtcttaaggatggaaattatggtgataagcccctactttacctgctatccgaggaatccttaatcagtgtgcttgctcgattcaaaagaagaacactttatgctaatgccgtcaacgacggaatagttcccttgtactcctcttctttactttttttggactactctcaattacttcagaaactgggaggtcaaactacggcaccttgtgatcctctcttccagcctgaagtaagtcctattggggaacttccaaatcatagcgatgttgctaatgatgatgatggaatcaatgcatcgtcatggaacacgttttggaagagcaaggaaaataactgcgacaagaaatctaaacgcttgatgaatgcttccgtcatcaaatctatgaagtctgtgcttctatcaccatgccccgacgcaaagttcttctcagatcccgatgcaagggtcgcaacaatcatacatgataagatctacacagaaaagaatttaccgcctccatcaccaacactttatgaaggaacagcagccaaggaaggcgaaacgaggaagacgagaaaagagatggaggaaatcatagcacgccgctggcacaaggggatgcattggaggaaagtcgtggtattgctgaaaccagatgcccacaataacatcatcgtaagaagaaggttttccaacgcttacggctggccggtggttgaccaccttgttaccgcccatttccaaagagatgacccaatcgcctcaccaatgcaagataaacagtttgctgaggaagatataaacatggcaaccggaggggtggaaccaaacaagttctactcatggctcaccaagatcgaggatcctagtgtgtaccatggtggaatagtctccacagctagccagctcgccagctcctggattagcaagcattcctctgtgacagattga

SEQ ID NO: 1602 - DNA, 1944 bp, Artificial Sequence
  Description of Artificial Sequence: Synthetic polynucleotide
atggaagctggcaggagtgctgatgaagtgttataccacaatcagtcttctgtaaagttaggtgagttagaaagatacgttattacatatgagttataccagggtgatagtattcccgctgatatcacattagattccttatgggtaaagatcaaaaataccacaaagttatcctataaaccagcctatcttttgggcccatttatcttatattgtgacgtgagggcaaaagattacgaaagctcttataagatcatatgttctgcggataaaccagtatttcaaagtaacttacaggcacaacaaaagtttattgcagagttgtccttgcaccacattaagccacgctatgtatggatagtggatattgtcagtcaaatattgtttaataaagaaactaaggtaacttttgagatagtagtcggcaattctaaggcctctttgaaaagaaaaataagatgtaatgattctttgcctgataaagcctgcaatattttacacacaggattatctgtgcatagacttaccaccgcagatatatggaaagtaccaagacccatagacatgtctcaaaaatcccatttagtcattctcacgcatggttttcaaagtaacgtttctgcagatatggaatacttaatggaagaaatatacaaggctcaaatgaacaatccaaatgagagattggttattaagggatatatgaagaatgcttgtgagactgagaagggtattaagtttttgggtgttggattggcaaactacatcatcgacgagttatatgatgactctgttgggaaaatttcctttattggtcattccttgggtggattaacacaaacttttgctatttgttacataaagaccaaatatccatatttctttaagaaagtggagccaatcaattttatctctttagcgtctccattgttgggcattgctaccagcacgcccaattacgtaaaaatgtctttgtccatgggtatcattggtactacggggcaagaattgggtcttaaggatggaaattatggtgataagcccttgctttacttgttatccgaggaatccttaatcagtgtgcttgctagattcaaaagaagaacactttatgctaatgccgtcaacgacggaatagttcccttgtactcctcttctttactttttttggactactctcaattacttcagaaattaggaggtcaaactacggcaccttgtgatcctctcttccagcctgaagtaagtcctattggggaacttccaaatcatagcgatgttgctaatgatgatgatggaatcaatgcatcttcttggaacacgttttggaagagcaaggaaaataactgcgacaagaaatctaaacgcttgatgaatgcttccgtcatcaaatctatgaagtctgtgcttttatctccatgccccgacgcaaagttcttcagtgatcccgatgcaagggtcgcaacaatcatacatgataagatctacacagaaaagaatttaccgcctccatctccaacactttatgaaggaacagcagccaaggaaggcgaaacgaggaagacgagaaaagagatggaggaaatcatagcacgccgctggcacaaggggatgcattggaggaaagtcgtggtattgttgaaaccagatgcccacaataacatcatcgtaagaagaaggttttccaacgcttacggctggccggtggttgaccaccttgttaccgcccatttccaaagagatgacccaatcgcctctccaatgcaagataaacagtttgctgaggaagatataaacatggcaaccggaggggtggaaccaaacaagttctactcttggctcaccaagatcgaggatcctagtgtgtaccatggtggaatagtctccacagctagccagctcgccagctcctggattagcaagcattcctctgtgacagattga

SEQ ID NO: 1603 - DNA, 921 bp, Saccharomyces cerevisiae
atgaaagtgaatatggagtacacaaaggaaaagaaagttggtgagggtacttatgcggttgtttacttgggttgtcaacactctactggaagaaagattgctattaaggagatcaaaacatccgaatttaaagatggtttagatatgtcagctatccgtgaagttaagtacctccaagaaatgcagcatccgaacgtcatagaactaatagacatatttatggcttatgataatttaaatctcgttctggagttcctaccaactgatctagaggtggtaataaaagacaaatcaatactgtttacaccagcagatattaaggcatggatgcttatgactttgaggggcgtgtatcattgccacagaaatttcattttgcacagggatctgaaaccaaacaatttattattttcacctgatggccagataaaagtagcagatttcggtctagcaagggcgataccggccccacatgagatactgacaagtaacgtcgtaacaagatggtatagagcgccagaattgttgtttggagctaaacattacacatcggctattgatatctggtcagtaggcgttatattcgcggaattaatgctaaggataccttatttaccaggacagaatgatgtcgatcaaatggaagtaacgttcagggccttagggacacctacagatagagattggcccgaagtttcttcctttatgacgtataacaagttacaaatatatccgcccccttcaagagatgaattgaggaaaaggttcattgctgctagcgaatacgccttagattttatgtgtggaatgctaacgatgaacccacaaaagaggtggaccgctgttcagtgtttagaaagtgattatttcaaagaattaccaccaccaagtgacccgtcttcaataaaaatacgtaactga

SEQ ID NO: 1604 - DNA, 921 bp, Artificial Sequence
  Description of Artificial Sequence: Synthetic polynucleotide
atgaaagtgaatatggagtacacaaaggaaaagaaagttggtgagggtacttatgcggttgtttacttgggttgtcaacactctactggaagaaagattgctattaaggagatcaaaacatccgaatttaaagatggtttagatatgtctgctatccgtgaagttaagtacctccaagaaatgcagcatccgaacgtcatagaattgatagacatatttatggcttatgataatttaaatctcgttttggagttcttaccaactgatttagaggtggtaataaaagacaaatctatattgtttacaccagcagatattaaggcatggatgcttatgactttgaggggcgtgtatcattgccacagaaatttcattttgcacagggatttgaaaccaaacaatttattattttctcctgatggccagataaaagtagcagatttcggtttggcaagggcgataccggccccacatgagatattaacaagtaacgtcgtaacaagatggtatagagcgccagaattgttgtttggagctaaacattacacatctgctattgatatctggtctgtaggcgttatattcgcggaattaatgttaaggataccttatttaccaggacagaatgatgtcgatcaaatggaagtaacgttcagggccttagggacacctacagatagagattggcccgaagtttcttcctttatgacgtataacaagttacaaatatatccgcccccttccagagatgaattgaggaaaaggttcattgctgctagcgaatacgccttagattttatgtgtggaatgcttacgatgaacccacaaaagaggtggaccgctgttcagtgtttagaaagtgattatttcaaagaattaccaccaccaagtgacccgtcttctataaaaatacgtaactga

SEQ ID NO: 1605 - DNA, 1056 bp, Saccharomyces cerevisiae
atgcagaggtttgtcagtaagtttgtttccacaccaccagtacccaaaaagtttcaagagattttcccgaagaaacgtacggttaacaaaattttattccagttagatacaaggcttacataccatgaaatgtacccgatatttctgcaggtatcacaaaatactaatgaagagaatatcccatggaggaagaaatacccctatataaggagttcagacattatgcagatgcgaaacgtcttgataactctaaggacgcagaacaaattcgtccacaaagacttattagctatggaggataaattattgaatattgctgccgaacttggcaacaacgatgctatatccatcctaagcttcaacgtgatacatgaatataaaaaggaaaacgtcaaatccagttatgaaaaagacattgaaacggctaatgaattcataaagaagctgtatgcgcgtaaccatcatttaacggttaaattaataggggacctgtttttcgaaaacaaaacttacgataaggctgagaaatattaccaagagttcttgaaattggaaaatagtaccaaattggcaggcgaagttcacggaaaacttggggaaatccaaataaagcaagtcaatggttttttgaaggcagaaaagtcatggctgagttgtatagaactgctggaaattgaaagaagttcacgttggtactttctgttagcgaggttatatatgagttcagagcccatgaaagccaaagccttgctagaaaattgtgcatcaattggatttaaagaatgctttaaaacattaggatttcttgaattaaactatttcaataattatgaaagggcgaaagaatggttcaaaacgggtatggaaataatggacttggaatgtttctttggatttttcgattgctgtgtgaaagaagagaattttaaaggtgcacgagattgcctagaaagcgtaaaaaagctagggaatgataaagacaagaaaacaatgataaatgtctttcttgaaagtagaaaagattccataaagttgctggacaaagcacggctttaa

SEQ ID NO: 1606 - DNA, 1056 bp, Artificial Sequence
  Description of Artificial Sequence: Synthetic polynucleotide
atgcagaggtttgtcagtaagtttgtttccacaccaccagtacccaaaaagtttcaagagattttcccgaagaaacgtacggttaacaaaattttattccagttagatacaaggcttacataccatgaaatgtacccgatatttttgcaggtatctcaaaatactaatgaagagaatatcccatggaggaagaaatacccctatataaggagtagtgacattatgcagatgagaaacgtcttgataactttgaggacgcagaacaaattcgtccacaaagacttattagctatggaggataaattattgaatattgctgccgaacttggcaacaacgatgctatatccatcttaagcttcaacgtgatacatgaatataaaaaggaaaacgtcaaatccagttatgaaaaagacattgaaacggctaatgaattcataaagaagctttatgcgcgtaaccatcatttaacggttaaattaataggggacttatttttcgaaaacaaaacttacgataaggctgagaaatattaccaagagttcttgaaattggaaaatagtaccaaattggcaggcgaagttcacggaaaacttggggaaatccaaataaagcaagtcaatggttttttgaaggcagaaaagtcttggttgagttgtatagaattattggaaattgaaagaagttctcgttggtactttttattagcgaggttatatatgagtagtgagcccatgaaagccaaagccttgttggaaaattgtgcatctattggatttaaagaatgctttaaaacattaggatttcttgaattaaactatttcaataattatgaaagggcgaaagaatggttcaaaacgggtatggaaataatggacttggaatgtttctttggatttttcgattgctgtgtgaaagaagagaattttaaaggtgcaagagattgcttagaaagcgtaaaaaagttagggaatgataaagacaagaaaacaatgataaatgtctttcttgaaagtagaaaagattccataaagttgttggacaaagcaagactttga

SEQ ID NO: 1607 - DNA, 1680 bp, Saccharomyces cerevisiae
atgatggaagaattctcgtacgatcacgattttaacacacattttgctacagatttggattatttgcaacatgaccaacaacaacaacaacagcaacaacatgatcaacaacataatcaacagcaacaaccacaaccacaaccaattcaaactcaaaacctggagcacgaccacgaccaacatactaatgatatgagtgcttcatcgaatgcatcagatagtggacctcaaaggcccaagaggactcgcgcaaagggtgaagcactagatgtgctaaagcgtaaatttgaaataaatccaacaccctctttggtagaaagaaagaaaatatcagatctgataggaatgcctgaaaaaaacgtcagaatttggtttcagaacagaagagctaaattgaggaaaaagcagcatggaagtaataaggacacaatcccctcgtcacaatcccgtgatattgccaacgattacgatcgtgggagtacagacaacaatttggtcactacaacaagtacttcatccatatttcacgatgaagacctgacttttttcgaccgtattccgctgaacagcaacaacaactattatttttttgacatttgctcaattactgtgggaagttggaatagaatgaaaagcggcgcactgcaaagaaggaactttcagtctataaaggagttgagaaacctatcgccaataaagattaataacataatgtcgaatgccacagatttaatggttttgatatccaagaaaaactcagaaataaactatttttttagtgccatggcaaataatactaaaattctcttcaggatctttttcccattaagttcagtcacgaattgctctctaactttagaaactgacgacgatataataaatagtaacaacacaagcgataaaaacaatagtaatactaataatgatgatgataacgacgataacagtaatgaagacaatgataatagtagtgaggataagaggaatgctaaggataactttggagaattgaagctaacagtcaccagatcacccacttttgctgtttactttttaaataatgctcctgatgaagatccaaatttgaacaatcagtggtccatatgtgatgatttctcagaaggtagacaggtaaatgacgcatttgttggtggttcgaatattcctcacactttgaaaggtttacagaaatcattaagattcatgaattctctaattctagactataaatcatcgaatgaaatattacctacgatcaatacagcgatccccactgctgcagttccacaacagaatattgcccctccctttctgaatacaaattcaagtgcaacagactcaaatccaaatacaaatttagaagattctctcttcttcgatcatgatctgttatcgagttcgataaccaacaccaacaacggacaaggctctaataatggacgtcaagctagcaaggatgatacgctcaatttactggatactaccgtcaacagcaataacaatcataatgctaataatgaggagaatcatctagcgcaagaacatttatccaacgatgctgatattgttgcaaatccaaatgatcatttgttgtctttaccgactgatagtgaactcccaaatactccagattttttgaagaacactaacgaactaactgacgagcatagatggatatga

SEQ ID NO: 1608 - DNA, 1680 bp, Artificial Sequence
  Description of Artificial Sequence: Synthetic polynucleotide
atgatggaagaattctcttacgatcacgattttaacacacattttgctacagatttggattatttgcaacatgaccaacaacaacaacaacagcaacaacatgatcaacaacataatcaacagcaacaaccacaaccacaaccaattcaaactcaaaacttggagcacgaccacgaccaacatactaatgatatgagtgcttcttccaatgcatctgatagtggacctcaaaggcccaagaggactcgcgcaaagggtgaagcattggatgtgttgaagcgtaaatttgaaataaatccaacaccctctttggtagaaagaaagaaaatatctgatttgataggaatgcctgaaaaaaacgtcagaatttggtttcagaacagaagagctaaattgaggaaaaagcagcatggaagtaataaggacacaatcccctcttctcaatcccgtgatattgccaacgattacgatcgtgggagtacagacaacaatttggtcactacaacaagtacttcttccatatttcacgatgaagacttgacttttttcgaccgtattccgttgaacagcaacaacaactattatttttttgacatttgctccattactgtgggaagttggaatagaatgaaaagcggcgcattacaaagaaggaactttcagtctataaaggagttgagaaacttatctccaataaagattaataacataatgagtaatgccacagatttaatggttttgatatccaagaaaaactctgaaataaactatttttttagtgccatggcaaataatactaaaattctcttcaggatctttttcccattaagttctgtcacgaattgctctttgactttagaaactgacgacgatataataaatagtaacaacacaagcgataaaaacaatagtaatactaataatgatgatgataacgacgataacagtaatgaagacaatgataatagtagtgaggataagaggaatgctaaggataactttggagaattgaagttaacagtcaccagatctcccacttttgctgtttactttttaaataatgctcctgatgaagatccaaatttgaacaatcagtggtccatatgtgatgatttctctgaaggtagacaggtaaatgacgcatttgttggtggtagtaatattcctcacactttgaaaggtttacagaaatctttaagattcatgaattctttgattttggactataaaagcagtaatgaaatattacctacgatcaatacagcgatccccactgctgcagttccacaacagaatattgcccctccctttttgaatacaaatagtagtgcaacagactctaatccaaatacaaatttagaagattctctcttcttcgatcatgatttattatccagtagtataaccaacaccaacaacggacaaggctctaataatggacgtcaagctagcaaggatgatacgctcaatttattagatactaccgtcaacagcaataacaatcataatgctaataatgaggagaatcatttagcgcaagaacatttatccaacgatgctgatattgttgcaaatccaaatgatcatttgttgtctttaccgactgatagtgaactcccaaatactccagattttttgaagaacactaacgaattgactgacgagcatagatggatatga

SEQ ID NO: 1609 - DNA, 1209 bp, Saccharomyces cerevisiae
atgtctagtacagtaatatctagaaagaggagaaacagcactgttactgagcctgacagtagcggagaaacaagaaaacaaaagaagtcgagaagtgatgaaaagagctcatcttctaaggatggtgacccccagctagaatttaaagttttacagggatatagggacctggaaagtgaaatgcacaaaggcagagctcaggtgaccagaacaggagatataggtgttgctatggacaatctgaacgctgtggattccctattcaataaggttattggtataaagaataatggattgtttgctcatgatgctagagcaatggttagtataagtgaattggctcaaatttctgtgagaaatttgaagtttgatgattcgaggagtatggtcaatttagaaaacatagtaaattccttgaaaagatacatgctaaaagagcatttcaagcttaataatatcgccgaaaataggaatgatttgacgcttgccgctgatgaacaatccgcagcagaccagcaagaggaaagtgatggagatatcgataggacgcctgatgataatcatacagataaagctacttcctctttcaaagcgacatctatgaggcatagttatctacagcagttttctcactataatgagttttctcaatttaattggtttagaataggtgctctctacaatactataagtaaaaatgccccaattaccgaccatttaatgggacctttatccatagaaaagaagccacgagtgttaactcaacgaagaaggaataatgaccaagttggtgaaaagatcaccgctgagaaaatcactcagcattctttaaactccacacagcaagaaactacccctgaacaggtcaagaaatgtttcaaaaagctttcaaaaaaattaggcccagaaggttccattaatctttttaaatttattatagacccaaattcattctcgcgatccatcgaaaatcttttctataccagttttttgatcaaagagggaaaactattgatggaacacgatgaagaaggtttacccacaattaagataaaacaaagcataagtcacacagattcaagaagtaaagaaattgagagacaaaggcgtcgtgccgctcatcagaatcacattatttttcaaatggacatgcctacttggcgaaaactaataaagaaatacaacatcacttcaccattcttagactaa

SEQ ID NO: 1610 - DNA, 1209 bp, Artificial Sequence
  Description of Artificial Sequence: Synthetic polynucleotide
atgtctagtacagtaatatctagaaagaggagaaacagcactgttactgagcctgacagtagcggagaaacaagaaaacaaaagaagtctagaagtgatgaaaagagctcttcttctaaggatggtgacccccagttagaatttaaagttttacagggatatagggacttggaaagtgaaatgcacaaaggcagagctcaggtgaccagaacaggagatataggtgttgctatggacaatttgaacgctgtggattcccttttcaataaggttattggtataaagaataatggattgtttgctcatgatgctagagcaatggttagtataagtgaattggctcaaatttctgtgagaaatttgaagtttgatgatagtaggagtatggtcaatttagaaaacatagtaaattccttgaaaagatacatgttgaaagagcatttcaagcttaataatatcgccgaaaataggaatgatttgacgcttgccgctgatgaacaatccgcagcagaccagcaagaggaaagtgatggagatatcgataggacgcctgatgataatcatacagataaagctacttcctctttcaaagcgacatctatgaggcatagttatttacagcagttttctcactataatgagttttctcaatttaattggtttagaataggtgctctctacaatactataagtaaaaatgccccaattaccgaccatttaatgggacctttatccatagaaaagaagccaagagtgttaactcaaagaagaaggaataatgaccaagttggtgaaaagatcaccgctgagaaaatcactcagcattctttaaactccacacagcaagaaactacccctgaacaggtcaagaaatgtttcaaaaagctttctaaaaaattaggcccagaaggttccattaatctttttaaatttattatagacccaaattctttcagtagatccatcgaaaatcttttctataccagttttttgatcaaagagggaaaacttttgatggaacacgatgaagaaggtttacccacaattaagataaaacaaagcataagtcacacagattccagaagtaaagaaattgagagacaaaggcgtcgtgccgctcatcagaatcacattatttttcaaatggacatgcctacttggagaaaattgataaagaaatacaacatcacttctccattcttagactga

SEQ ID NO: 1611 - DNA, 1224 bp, Saccharomyces cerevisiae
atgatatcaataaaaggaaccggaagatttctcctcgataactatagaatttggcagaggcgtgcattcaacagaccaatacagttaagaaaaggctataaagttttagccattgagacttcttgcgatgatacatgcgtttcagttttggacaggttctcaaaaagtgcagctcctaatgtgctagccaatttgaaagatactttagatagtattgacgaaggaggtattataccaacaaaggctcatatccatcaccaagctcggataggacccttaaccgaaagagccctgatagaaagcaatgcgagagaaggaattgatctcatatgtgttacaagaggccctggtatgcctggttcattatcaggaggattagattttgcaaaaggtttagctgttgcctggaacaaaccactgattggtgtgcatcacatgctgggacacttgctgataccaagaatgggtacaaatggaaaagtgcctcaatttccctttgttagcctgctggttagtggtggtcatactacgtttgttttgtcacgagcaattgacgatcacgaaatattatgtgatactatcgatattgcagtgggtgactcattagataaatgtggcagagagcttggattcaagggaacaatgatcgctagagaaatggagaaatttattaatcaagatattaacgaccaagattttgctttaaaactagaaatgcccagtccgttaaaaaacagcgctagtaaaagaaacatgctttcgttttcgttttcagcatttatcacagcattaagaactaatttgacaaaactaggtaaaacagaaatccaggaactgccagaacgcgaaatacggtcaattgcatatcaagtacaggaatctgttttcgaccatataataaataaactgaagcacgtgctcaagtcacaaccggaaaagtttaaaaacgtgcgtgaatttgtatgttctggtggagtgagtagtaatcaaaggttgagaacaaaattagaaacggaattggggacgttgaactccacaagcttttttaatttttattatcctcctatggacctttgtagtgacaactctattatgatcggctgggcaggtatcgagatatgggaaagcttacgattagttagtgatttagatatatgtccaattaggcaatggccattgaatgacctattaagtgttgatggttggagaacggaccagctatga

SEQ ID NO: 1612 - DNA, 1224 bp, Artificial Sequence
  Description of Artificial Sequence: Synthetic polynucleotide
atgatatccataaaaggaaccggaagatttctcctcgataactatagaatttggcagaggcgtgcattcaacagaccaatacagttaagaaaaggctataaagttttagccattgagacttcttgcgatgatacatgcgtttctgttttggacaggttctccaaaagtgcagctcctaatgtgcttgccaatttgaaagatactttagatagtattgacgaaggaggtattataccaacaaaggctcatatccatcaccaagctagaataggacccttaaccgaaagagccttaatagaaagcaatgcgagagaaggaattgatctcatatgtgttacaagaggccctggtatgcctggttctttatctggaggattagattttgcaaaaggtttagctgttgcctggaacaaaccattgattggtgtgcatcacatgcttggacacttgttaataccaagaatgggtacaaatggaaaagtgcctcaatttccctttgttagcttattggttagtggtggtcatactacgtttgttttgagcagagcaattgacgatcacgaaatattatgtgatactatcgatattgcagtgggtgactctttagataaatgtggcagagagcttggattcaagggaacaatgatcgctagagaaatggagaaatttattaatcaagatattaacgaccaagattttgctttaaaattagaaatgcccagtccgttaaaaaacagcgctagtaaaagaaacatgctttctttttctttttctgcatttatcacagcattaagaactaatttgacaaaattgggtaaaacagaaatccaggaattaccagaacgcgaaataagatctattgcatatcaagtacaggaatctgttttcgaccatataataaataaattgaagcacgtgctcaagtctcaaccggaaaagtttaaaaacgtgcgtgaatttgtatgttctggtggagtgagtagtaatcaaaggttgagaacaaaattagaaacggaattggggacgttgaactccacaagcttttttaatttttattatcctcctatggacctttgtagtgacaactctattatgatcggctgggcaggtatcgagatatgggaaagcttaagattagttagtgatttagatatatgtccaattaggcaatggccattgaatgacttattaagtgttgatggttggagaacggaccagttatga

SEQ ID NO: 1613 - DNA, 1434 bp, Saccharomyces cerevisiae
atgactgacacaaaacagctattcattgaagccggacaaagtcaacttttccacaattgggaaagcttgtctcgcaaagaccaagaagaattgctttcaaacctggagcaaatatcttccaagaggtcccctgcaaaactactggaagactgtcaaaatgctattaaattctcactagctaactcttctaaggatactggcgtcgaaatttcaccattgccccctacttcgtacgagtcgcttattggcaacagtaagaaagaaaatgaatactggcgtttaggccttgaagctattggcaagggtgaagtcgcagtgattttaatggctggcggacaaggtacgcggttaggatcctctcaaccaaagggctgttacgacattggattgccttctaagaaatctctttttcaaattcaagctgaaaagttgatcaggttgcaagatatggtaaaggacaaaaaggtagaaattccttggtatattatgacatcaggccccactagagcggctactgaggcatactttcaagaacacaattattttggcttgaataaagaacaaattacgttcttcaaccagggaaccctgcctgcctttgatttaaccgggaagcatttcctaatgaaagacccagtaaacctatctcaatcaccagatggaaatggtggactctaccgtgccatcaaggaaaacaagttgaacgaagactttgataggagaggaatcaagcatgtttacatgtactgtgtcgataatgtcctatctaaaatcgcagaccctgtatttattggttttgccatcaagcatggcttcgaactggccaccaaagccgttagaaagagagatgcgcatgaatcagttgggttaattgctactaaaaacgagaaaccatgtgtcatagaatattctgaaatttccaatgaattggctgaagcaaaggataaagatggcttattaaaactacgcgcaggcaacattgtaaatcattattacctagtggatttactaaaacgtgatttggatcagtggtgtgagaatatgccatatcacattgcgaagaagaaaattccagcttatgatagtgttaccggcaagtacactaagcctaccgaaccaaacggtataaaattagagcaattcatatttgatgtctttgacactgtaccactgaacaagtttgggtgcttagaagtagatagatgcaaagaattttcacctttaaaaaacggtcctggttctaagaacgataatcctgagaccagcagactagcatatttgaaactaggaacctcgtggttggaagatgcaggcgctattgtaaaagatggggtactagtcgaagtttccagcaaattgagttatgcaggtgaaaatctatcccagttcaaaggtaaagtctttgacagaagtggtatagtattagaaaaataa

SEQ ID NO: 1614 - DNA, 1434 bp, Artificial Sequence
  Description of Artificial Sequence: Synthetic polynucleotide
atgactgacacaaaacagttattcattgaagccggacaaagtcaacttttccacaattgggaaagcttgtctcgcaaagaccaagaagaattgctttccaacttggagcaaatatcttccaagaggtcccctgcaaaattattggaagactgtcaaaatgctattaaattctctttggctaactcttctaaggatactggcgtcgaaatttctccattgccccctacttcttacgagtctcttattggcaacagtaagaaagaaaatgaatactggcgtttaggccttgaagctattggcaagggtgaagtcgcagtgattttaatggctggcggacaaggtacgagattaggatcctctcaaccaaagggctgttacgacattggattgccttctaagaaatctctttttcaaattcaagctgaaaagttgatcaggttgcaagatatggtaaaggacaaaaaggtagaaattccttggtatattatgacaagtggccccactagagcggctactgaggcatactttcaagaacacaattattttggcttgaataaagaacaaattacgttcttcaaccagggaaccttacctgcctttgatttaaccgggaagcatttcttaatgaaagacccagtaaacttatctcaatctccagatggaaatggtggactctaccgtgccatcaaggaaaacaagttgaacgaagactttgataggagaggaatcaagcatgtttacatgtactgtgtcgataatgtcttgtctaaaatcgcagaccctgtatttattggttttgccatcaagcatggcttcgaattggccaccaaagccgttagaaagagagatgcgcatgaatctgttgggttaattgctactaaaaacgagaaaccatgtgtcatagaatattctgaaatttccaatgaattggctgaagcaaaggataaagatggcttattaaaattgcgcgcaggcaacattgtaaatcattattacttggtggatttattgaaacgtgatttggatcagtggtgtgagaatatgccatatcacattgcgaagaagaaaattccagcttatgatagtgttaccggcaagtacactaagcctaccgaaccaaacggtataaaattagagcaattcatatttgatgtctttgacactgtaccattgaacaagtttgggtgcttagaagtagatagatgcaaagaattttctcctttaaaaaacggtcctggttctaagaacgataatcctgagaccagcagattagcatatttgaaattaggaaccagttggttggaagatgcaggcgctattgtaaaagatggggtattagtcgaagtttccagcaaattgagttatgcaggtgaaaatttatcccagttcaaaggtaaagtctttgacagaagtggtatagtattagaaaaatga

SEQ ID NO: 1615 - DNA, 3294 bp, Saccharomyces cerevisiae
atgagtgaaaaaagatcccttcccatggttgatgtgaagatcgatgacgaggatactccccagttggaaaagaaaatcaaacggcaatcaatagatcatggtgttggaagtgaacctgtttcaacaatagagattattccgagtgattcttttcgaaaatataatagtcaaggcttcaaagcaaaggatacagatttaatgggtacgcaattagagtctacttttgaacaagagctatcgcaaatggaacatgatatggccgaccaagaagagcatgacctgtcatcattcgagcgtaagaaacttccaaccgattttgacccaagtttgtatgatatttctttccaacaaattgatgcggaacagagcgtactgaatggtatcaaagatgaaaatacatctaccgtggtaaggttttttggtgtcactagtgaaggacactctgtactttgtaatgttacagggttcaagaactatctttacgtcccagcgcccaattcttccgacgctaacgatcaggagcaaatcaacaagtttgtgcactatttaaacgaaacatttgaccacgctattgattcgattgaagttgtatctaaacagtctatctggggttattccggagataccaaattaccattctggaaaatatacgtcacctatccgcatatggtcaacaaactgcgtactgcgtttgaaagaggtcatctttcattcaactcgtggttttctaacggcacgactacttatgataacattgcctacactttaaggttaatggtagattgtggaattgtcggtatgtcctggataacattaccaaaaggaaagtattcgatgattgagcctaataacagagtttcctcttgtcagttggaagtttcaattaattatcgtaacctaatagcacatcctgctgagggtgattggtctcatacagctccattgcgtatcatgtcctttgatatcgagtgtgctggtaggattggcgtctttccggaacctgaatacgatcccgtcatccaaattgccaacgttgtgagtattgctggcgctaagaaaccattcattcgtaatgtgtttactctgaatacatgctcacccataacaggttcaatgattttttcccacgccactgaagaggaaatgttgagcaattggcgtaactttatcatcaaagttgatcctgatgttatcattggttataatactacaaattttgatatcccttatcttttaaaccgtgcaaaggcgctaaaggtgaatgatttcccatattttggaaggttaaaaaccgttaagcaagaaattaaagagtctgtgttctcttcgaaggcttatggtacaagagaaaccaaaaatgtcaatattgacggccgattacagttggatcttttgcaatttattcagcgtgagtataaactaagatcctacacgttgaatgcagtctctgcgcactttttaggtgaacagaaggaggatgtacattatagcatcatttctgatctacaaaatggcgatagtgaaacaagaagaaggttggccgtttactgtttgaaagacgcctacctgcctttaaggcttatggaaaaactaatggcgttagttaactatacagaaatggctcgtgttacaggtgtgccattttcatatttactagctcgtggtcaacaaattaaagttgtttctcaactatttcgaaagtgcctggagattgatactgtgatacctaacatgcaatctcaggcctctgatgaccaatatgagggtgccactgttattgagcctattcgtggttattacgatgtaccgattgcaactttggatttcaattctttatatccaagtattatgatggcgcacaacctatgttatacaacactttgtaacaaagctactgtagagagattgaatcttaaaattgacgaagactacgtcataacacctaatggagattattttgttaccacaaaaagaaggcgtggtatattaccaattattctggatgaattaataagtgctagaaaacgcgctaaaaaagatctgagagatgagaaggatccattcaaaagagatgttttaaatggtagacaattggctttgaagatttcagctaactctgtctatggttttacaggagcgacggtgggtaaattgccatgtttagccatttcttcatctgttactgcttatggtcgtaccatgattttaaaaactaaaaccgcagtccaagaaaaatattgtataaagaatggttataagcacgatgccgttgtggtttacggtgacactgattccgttatggtaaagtttggtacaacagatttaaaggaagctatggatcttggtaccgaagctgccaaatatgtctccactctattcaaacatccgattaacttagaatttgaaaaagcatacttcccttaccttttgataaataaaaagcgttatgcaggtttattctggactaatcctgacaagtttgacaagttggaccaaaaaggccttgcttctgtccgtcgtgattcctgttccttggtttctattgttatgaataaagttttaaagaaaattttaattgaaagaaatgtagatggtgctttagcttttgtcagagaaactatcaatgatattctgcataatagagtagatatttcaaagttgattatatcaaagacgttagccccaaattacacaaatccacagccgcacgccgttttggctgaacgtatgaagaggagagagggcgttggtccaaatgttggtgatcgtgtggactatgtcattatcggtggtaatgataaactttacaatagagcagaagatccattatttgtactagaaaacaatattcaagtggattcgcgctattatttaactaatcaattacaaaatccaatcattagtattgttgcacctattattggcgacaaacaggcgaacggtatgttcgttgtgaaatccattaaaattaacacaggctctcaaaaaggaggcttgatgagctttattaaaaaagttgaggcttgtaaaagttgtaaaggtccgttgaggaaaggtgaaggccctctttgttcaaactgtctagcaaggtctggagaattatacataaaggcattatacgatgtcagagatttagaggaaaaatactcaagattatggacacaatgccaaaggtgcgctggtaacttacatagtgaagttttgtgttcaaataagaactgtgacattttttatatgcgggttaaggttaaaaaagagctgcaggagaaagtagaacaattaagcaaatggtaa

SEQ ID NO: 1616 - DNA, 3294 bp, Artificial Sequence
  Description of Artificial Sequence: Synthetic polynucleotide
atgagtgaaaaaagatcccttcccatggttgatgtgaagatcgatgacgaggatactccccagttggaaaagaaaatcaaaagacaaagtatagatcatggtgttggaagtgaacctgtttctacaatagagattattccgagtgattcttttagaaaatataatagtcaaggcttcaaagcaaaggatacagatttaatgggtacgcaattagagtctacttttgaacaagagttatctcaaatggaacatgatatggccgaccaagaagagcatgacttatcttctttcgagcgtaagaaacttccaaccgattttgacccaagtttgtatgatatttctttccaacaaattgatgcggaacagagcgtattgaatggtatcaaagatgaaaatacatctaccgtggtaaggttttttggtgtcactagtgaaggacactctgtactttgtaatgttacagggttcaagaactatctttacgtcccagcgcccaattcttccgacgctaacgatcaggagcaaatcaacaagtttgtgcactatttaaacgaaacatttgaccacgctattgattctattgaagttgtatctaaacagtctatctggggttattccggagataccaaattaccattctggaaaatatacgtcacctatccgcatatggtcaacaaattacgtactgcgtttgaaagaggtcatctttctttcaacagttggttttctaacggcacgactacttatgataacattgcctacactttaaggttaatggtagattgtggaattgtcggtatgtcctggataacattaccaaaaggaaagtattccatgattgagcctaataacagagtttcctcttgtcagttggaagtttctattaattatcgtaacttgatagcacatcctgctgagggtgattggtctcatacagctccattgcgtatcatgtcctttgatatcgagtgtgctggtaggattggcgtctttccggaacctgaatacgatcccgtcatccaaattgccaacgttgtgagtattgctggcgctaagaaaccattcattcgtaatgtgtttactttgaatacatgctcccccataacaggttctatgattttttcccacgccactgaagaggaaatgttgagcaattggcgtaactttatcatcaaagttgatcctgatgttatcattggttataatactacaaattttgatatcccttatcttttaaaccgtgcaaaggcgttaaaggtgaatgatttcccatattttggaaggttaaaaaccgttaagcaagaaattaaagagtctgtgttctcttccaaggcttatggtacaagagaaaccaaaaatgtcaatattgacggcagattacagttggatcttttgcaatttattcagcgtgagtataaattgagatcctacacgttgaatgcagtctctgcgcactttttaggtgaacagaaggaggatgtacattatagcatcatttctgatttgcaaaatggcgatagtgaaacaagaagaaggttggccgtttactgtttgaaagacgcctacttacctttaaggcttatggaaaaattaatggcgttagttaactatacagaaatggctcgtgttacaggtgtgccattttcttatttattagctcgtggtcaacaaattaaagttgtttctcaattatttagaaagtgcttagagattgatactgtgatacctaacatgcaatctcaggcctctgatgaccaatatgagggtgccactgttattgagcctattcgtggttattacgatgtaccgattgcaactttggatttcaattctttatatccaagtattatgatggcgcacaacttgtgttatacaacactttgtaacaaagctactgtagagagattgaatcttaaaattgacgaagactacgtcataacacctaatggagattattttgttaccacaaaaagaaggcgtggtatattaccaattattttagatgaattaataagtgctagaaaacgcgctaaaaaagatttgagagatgagaaggatccattcaaaagagatgttttaaatggtagacaattggctttgaagatttctgctaactctgtctatggttttacaggagcgacggtgggtaaattgccatgtttagccatttcttcttctgttactgcttatggtcgtaccatgattttaaaaactaaaaccgcagtccaagaaaaatattgtataaagaatggttataagcacgatgccgttgtggtttacggtgacactgattccgttatggtaaagtttggtacaacagatttaaaggaagctatggatcttggtaccgaagctgccaaatatgtctccactttattcaaacatccgattaacttagaatttgaaaaagcatacttcccttaccttttgataaataaaaagcgttatgcaggtttattctggactaatcctgacaagtttgacaagttggaccaaaaaggccttgcttctgtccgtcgtgattcctgttccttggtttctattgttatgaataaagttttaaagaaaattttaattgaaagaaatgtagatggtgctttagcttttgtcagagaaactatcaatgatattttgcataatagagtagatatttccaagttgattatatccaagacgttagccccaaattacacaaatccacagccgcacgccgttttggctgaacgtatgaagaggagagagggcgttggtccaaatgttggtgatcgtgtggactatgtcattatcggtggtaatgataaactttacaatagagcagaagatccattatttgtattggaaaacaatattcaagtggattctcgctattatttaactaatcaattacaaaatccaatcattagtattgttgcacctattattggcgacaaacaggcgaacggtatgttcgttgtgaaatccattaaaattaacacaggctctcaaaaaggaggcttgatgagctttattaaaaaagttgaggcttgtaaaagttgtaaaggtccgttgaggaaaggtgaaggccctctttgttctaactgtttggcaaggtctggagaattatacataaaggcattatacgatgtcagagatttagaggaaaaatactctagattatggacacaatgccaaaggtgcgctggtaacttacatagtgaagttttgtgttctaataagaactgtgacattttttatatgagagttaaggttaaaaaagagttacaggagaaagtagaacaattaagcaaatggtga

SEQ ID NO: 1617 - DNA, 1542 bp, Saccharomyces cerevisiae
atgagtttgtccacgaaaagagagcactctggtgatgtaactgactcttcattcaaaagacagcaacgaagtaataagcccagctcagaatacacttgtctgggccatctggtgaacttaatacccggaaaggagcaaaaagtggaaataacaaatagaaacgttactacaatcggtagaagtaggtcgtgcgacgttatattgagtgagcctgacatctcgactttccatgctgagtttcatctactgcaaatggatgtggataatttccaaagaaatttgattaatgttatcgataagagcagaaacggaacttttattaatggtaatcgtttggtgaagaaagactacatccttaagaatggtgacagaattgtctttggcaaaagttgctcctttttgttcaagtacgcatcttcatcttctactgacatcgaaaatgacgatgaaaaggtaagttcagaaagtcgttcatataagaacgacgacgaagttttcaagaaaccgcaaataagtgctacaagtagccaaaatgctacaacgagtgccgcaattagaaaactgaataagacaaggcctgtgtcgttctttgataaatatttattaggtaaagaattaggtgcagggcactacgccctggtgaaagaagccaaaaacaaaaaaactggtcagcaagtagctgtgaaaatattccacgctcagcaaaatgacgaccaaaaaaagaataaacaatttagggaggaaactaacatcctaatgagagtgcaacatccaaacattgtcaacttactagatagttttgtagagccaatcagcaaatctcagattcaaaaatatttggtactggaaaagatcgacgatggcgaactatttgaaagaatcgtcagaaaaacatgtttgagacaggatgaatccaaagctctattcaaacagttacttaccggattgaagtatctgcatgagcaaaacatcattcacagagacatcaagccagaaaatatcttattaaatataacaaggcgcgaaaatccaagtcaagtccaacttggcccatgggatgaagatgaaattgatattcaagttaaaatagcggattttggcctagcaaaatttacaggagaaatgcaattcacaaacacactttgtggtacgccttcttatgtagcgcccgaagtcctcacaaagaaaggatacacatcaaaagtagatctttggagtgctggtgtcatattatatgtctgtttatgtggttttcctccattcagtgatcaattggggccaccttcattgaaggaacagatcttacaagctaagtatgcgttttactctccgtactgggataaaatcgatgactcagtactacatttaatatccaatcttttggtcctaaatcctgatgaaaggtacaatatagatgaagctttgaaccacccttggttcaatgacatacagcaacaaagctcggtctcattagaattgcagcgtttacaaattactgacaataaaatacccaaaacatactcagaattatcttgcctctaa

SEQ ID NO: 1618 - DNA, 1542 bp, Artificial Sequence
  Description of Artificial Sequence: Synthetic polynucleotide
atgagtttgtccacgaaaagagagcactctggtgatgtaactgactcttctttcaaaagacagcaaagaagtaataagcccagctctgaatacacttgtttgggccatttggtgaacttaatacccggaaaggagcaaaaagtggaaataacaaatagaaacgttactacaatcggtagaagtaggagttgcgacgttatattgagtgagcctgacatctctactttccatgctgagtttcatttattacaaatggatgtggataatttccaaagaaatttgattaatgttatcgataagagcagaaacggaacttttattaatggtaatcgtttggtgaagaaagactacatccttaagaatggtgacagaattgtctttggcaaaagttgctcctttttgttcaagtacgcatcttcttcttctactgacatcgaaaatgacgatgaaaaggtaagttctgaaagtcgttcttataagaacgacgacgaagttttcaagaaaccgcaaataagtgctacaagtagccaaaatgctacaacgagtgccgcaattagaaaattgaataagacaaggcctgtgtctttctttgataaatatttattaggtaaagaattaggtgcagggcactacgccttagtgaaagaagccaaaaacaaaaaaactggtcagcaagtagctgtgaaaatattccacgctcagcaaaatgacgaccaaaaaaagaataaacaatttagggaggaaactaacatcttgatgagagtgcaacatccaaacattgtcaacttattagatagttttgtagagccaatcagcaaatctcagattcaaaaatatttggtattggaaaagatcgacgatggcgaattatttgaaagaatcgtcagaaaaacatgtttgagacaggatgaatccaaagctttattcaaacagttacttaccggattgaagtatttgcatgagcaaaacatcattcacagagacatcaagccagaaaatatcttattaaatataacaaggcgcgaaaatccaagtcaagtccaacttggcccatgggatgaagatgaaattgatattcaagttaaaatagcggattttggcttggcaaaatttacaggagaaatgcaattcacaaacacactttgtggtacgccttcttatgtagcgcccgaagtcctcacaaagaaaggatacacaagtaaagtagatctttggagtgctggtgtcatattatatgtctgtttatgtggttttcctccattcagtgatcaattggggccaccttctttgaaggaacagatcttacaagctaagtatgcgttttactctccgtactgggataaaatcgatgactctgtattacatttaatatccaatcttttggtcttgaatcctgatgaaaggtacaatatagatgaagctttgaaccacccttggttcaatgacatacagcaacaaagctctgtctctttagaattgcagcgtttacaaattactgacaataaaatacccaaaacatactctgaattatcttgcctctga

SEQ ID NO: 1619 - DNA, 1065 bp, Saccharomyces cerevisiae
atggatttaaccgtggaacctaatttgcactctttaattacctctaccactcataagtggattttcgttggtggtaaaggtggtgttggtaagactacttcatcatgttccattgctatccaaatggctttgagtcaaccaaacaaacagttcctactgatctctactgatcctgcccataacttaagtgatgcattcggtgagaaatttggtaaagacgccagaaaggtgacaggcatgaataatctatcatgtatggaaatcgatccatccgctgctttgaaggatatgaacgacatggcagtttcacgcgctaacaataacggaagtgacggtcaaggtgacgatctaggaagcttgcttcaaggtggtgctcttgctgatttgaccggttccatccctggtatcgacgaagctttatccttcatggaagtcatgaagcacattaaaaggcaagaacagggcgaaggtgaaaccttcgatactgttatttttgacactgctccaactggccacacattaagatttctacaactaccaaatactttatccaagcttttggaaaagttcggtgaaattaccaacaaattgggcccaatgctaaactcttttatgggcgcaggtaatgtcgatatctctggaaaattgaacgagttaaaggctaatgtcgagaccatcagacaacaattcacggatcctgacctaacgacttttgtttgcgtttgtatcagtgaattcttatccttatatgaaactgaaagactaattcaggaattgatttcctacgatatggacgttaattccatcattgtcaaccaattattatttgctgaaaacgatcaagagcacaactgtaagagatgtcaggcaagatggaagatgcaaaagaagtacttggaccaaatcgacgaattgtacgaagatttccatgtcgttaaaatgccattatgtgctggagaaatcagaggcttaaataacttaacaaagttctcacagttcctaaacaaagaatataaccctattactgatggcaaagtcatttatgagttagaagataaggaatag

SEQ ID NO: 1620 - DNA, 1065 bp, Artificial Sequence
  Description of Artificial Sequence: Synthetic polynucleotide
atggatttaaccgtggaacctaatttgcactctttaattacctctaccactcataagtggattttcgttggtggtaaaggtggtgttggtaagactacttcttcttgttccattgctatccaaatggctttgagtcaaccaaacaaacagttcttattgatctctactgatcctgcccataacttaagtgatgcattcggtgagaaatttggtaaagacgccagaaaggtgacaggcatgaataatttaagttgtatggaaatcgatccatccgctgctttgaaggatatgaacgacatggcagtttctcgcgctaacaataacggaagtgacggtcaaggtgacgatttgggaagcttgcttcaaggtggtgctcttgctgatttgaccggttccatccctggtatcgacgaagctttatccttcatggaagtcatgaagcacattaaaaggcaagaacagggcgaaggtgaaaccttcgatactgttatttttgacactgctccaactggccacacattaagatttttgcaattaccaaatactttatccaagcttttggaaaagttcggtgaaattaccaacaaattgggcccaatgttgaactcttttatgggcgcaggtaatgtcgatatctctggaaaattgaacgagttaaaggctaatgtcgagaccatcagacaacaattcacggatcctgacttaacgacttttgtttgcgtttgtatcagtgaattcttatccttatatgaaactgaaagattgattcaggaattgatttcctacgatatggacgttaattccatcattgtcaaccaattattatttgctgaaaacgatcaagagcacaactgtaagagatgtcaggcaagatggaagatgcaaaagaagtacttggaccaaatcgacgaattgtacgaagatttccatgtcgttaaaatgccattatgtgctggagaaatcagaggcttaaataacttaacaaagttctctcagttcttgaacaaagaatataaccctattactgatggcaaagtcatttatgagttagaagataaggaatga

SEQ ID NO: 1621 - DNA, 1026 bp, Saccharomyces cerevisiae
atgtctgaacaggagtctgatgaagttaagcgtatgaaacaattggaagaggctagaaagagagtagaagaattgaagaaaaagaaaaataaaaagaataaaggtaagaagaataaaaatagcagtgccacaggctctataggatctgaaactcctgatttagagggcacaccaggcgaagagtccacacaggaggagactgtgaaagcaaattccaccaaaagtgaaaacaacgatcaaaatgacgtggatgaggagagtgaagaaaaagaaatagaacaggttaaatcagatccttcgggcacaacagaaaaagatattgaggaaataaatagtacttcatcaaatgtgggaaaggatgatgcagaaaacacaaaaaaagaggaagttcaagaagttataaaaaataacaacgatgagcaaacagcagatgccggaaagaccatagaaccacaagaggaaaagaaaattgtacaaactcaagaaggaaacgaaccttcaaatacatcagaagcagcagacgatttatttgccaatgacggcaatgaagaatctgactttctcaccacgattaaaaagcaaaaagaagaagatgagttgaccaaactaagggcggaaaatgagaaactcacacaggaaaataaacaactgaaatttttgaatatggaaaatgaaactactgtcgatgacctacaggatcaattgcaggaaaaagaagacatcattaatggtttacaaaacgatttgcaaaccgcaagggatgaattaattgccgcagtagaaaaattaaaattagcagaagctaaggcagcaagaaataccacagcaactcctattcaatttgcggatttcaacacttcaagcaataatctaactccctcacaatctgtaaccaattctggtacgcaggtggcccacgggaataatatggaagtggatcgcgttatgctgaacaaatggcgccagtggaacgtagacatgaccacttggagaagtattggttctggcccaataatggaattttga

SEQ ID NO: 1622 - DNA, 1026 bp, Artificial Sequence
  Description of Artificial Sequence: Synthetic polynucleotide
atgtctgaacaggagtctgatgaagttaagcgtatgaaacaattggaagaggctagaaagagagtagaagaattgaagaaaaagaaaaataaaaagaataaaggtaagaagaataaaaatagcagtgccacaggctctataggatctgaaactcctgatttagagggcacaccaggcgaagagtccacacaggaggagactgtgaaagcaaattccaccaaaagtgaaaacaacgatcaaaatgacgtggatgaggagagtgaagaaaaagaaatagaacaggttaaatctgatccttccggcacaacagaaaaagatattgaggaaataaatagtacttcttccaatgtgggaaaggatgatgcagaaaacacaaaaaaagaggaagttcaagaagttataaaaaataacaacgatgagcaaacagcagatgccggaaagaccatagaaccacaagaggaaaagaaaattgtacaaactcaagaaggaaacgaaccttccaatacaagtgaagcagcagacgatttatttgccaatgacggcaatgaagaatctgactttctcaccacgattaaaaagcaaaaagaagaagatgagttgaccaaattgagggcggaaaatgagaaactcacacaggaaaataaacaattgaaatttttgaatatggaaaatgaaactactgtcgatgacttacaggatcaattgcaggaaaaagaagacatcattaatggtttacaaaacgatttgcaaaccgcaagggatgaattaattgccgcagtagaaaaattaaaattagcagaagctaaggcagcaagaaataccacagcaactcctattcaatttgcggatttcaacacttccagcaataatttaactccctctcaatctgtaaccaattctggtacgcaggtggcccacgggaataatatggaagtggatcgcgttatgttgaacaaatggcgccagtggaacgtagacatgaccacttggagaagtattggttctggcccaataatggaattttga

SEQ ID NO: 1623 - DNA, 585 bp, Saccharomyces cerevisiae
atgtcgaattttggcagaagaacttgggatagagaggagtatgctgagcaggctagaagcggctatgacgatcgatccttaaaggctacgctaacaccgattgaattacaagctttaaaatccaaatatacaaattacgatcatttaatcaagggctcgctaaaagacctaaataaaaggaaactaacagcaaatacagagagcttatcgtctttcaagaggggaaagaagttcggattttactgcgatatttgtaacctaaccttcaaagacactttacaatacattgatcatctcaaccacaaggtccatgcaataaaatttgaaaatttgtttgatgaaccgttaattatagatataagagataatgatgacgtaccgcaagaggagtttgagttgtgctatcataacttgataaaggattttgtagaggtgcgttctatggagactcagtccaagaggaaaaggcttttggacacagatgtggagaaagcaaagaaagtggctactaagccttctattgagagtgaatcaaaagtcagtcaaatgatgggattttccaattttgccacctctaaaaaatga

SEQ ID NO: 1624 - DNA, 585 bp, Artificial Sequence
  Description of Artificial Sequence: Synthetic polynucleotide
atgagtaattttggcagaagaacttgggatagagaggagtatgctgagcaggctagaagcggctatgacgatagatccttaaaggctacgttgacaccgattgaattacaagctttaaaatccaaatatacaaattacgatcatttaatcaagggctccttgaaagacttgaataaaaggaaattaacagcaaatacagagagcttatcttctttcaagaggggaaagaagttcggattttactgcgatatttgtaacttgaccttcaaagacactttacaatacattgatcatctcaaccacaaggtccatgcaataaaatttgaaaatttgtttgatgaaccgttaattatagatataagagataatgatgacgtaccgcaagaggagtttgagttgtgctatcataacttgataaaggattttgtagaggtgcgttctatggagactcagtccaagaggaaaaggcttttggacacagatgtggagaaagcaaagaaagtggctactaagccttctattgagagtgaaagtaaagtcagtcaaatgatgggattttccaattttgccacctctaaaaaatga

SEQ ID NO: 1625 - DNA, 1305 bp, Saccharomyces cerevisiae
atgtctctgccaggttcgaaattagaagaggccaggagactggttaatgaaaaacagtataatgaggcagaacaagtctatttgagcctgctggataaagacagctcacagagcagcgccgctgccggtgccagtgtggatgacaagcgtagaaatgaacaggagacaagcatattggaattaggacagttatacgtgactatgggtgcaaaggacaaattgcgcgagtttattcctcattctacggagtatatgatgcaatttgccaaatccaaaacggtaaaggtattgaaaacgttgattgaaaaattcgagcaagtgccggactccttggacgatcagatctttgtgtgcgagaaaagcatcgaatttgccaagagagaaaaaagggtgtttttgaagcattcactctcgatcaaattggccaccttacattatcaaaagaaacagtacaaggactcattagcattgattaacgatcttttgagggagttcaaaaagctggacgacaagccctctttggttgatgtacatctattggaaagtaaagtttaccataaactgaggaatctagccaagtccaaggcctcgttgactgcagcaaggacggccgctaactccatatactgtcctacacaaacagttgcggagctggacttgatgagtggtatcctgcactgtgaagataaagactacaaaactgcattttcgtatttcttcgaaagttttgaaagctaccacaatttgactacgcataattcctacgaaaaggcatgtcaagtgttgaaatacatgctattgtctaagatcatgctgaaccttattgatgacgtaaaaaacatcctaaacgcaaaatacacaaaggaaacgtaccagtcccgaggcattgatgccatgaaagctgtcgctgaggcttataacaacagatcgcttttagacttcaacacggcgctaaagcaatacgagaaggaactaatgggcgatgaactaacaagatcccatttcaatgcattatacgacacgttattagagtccaatttgtgtaagattattgagccatttgaatgtgtggaaatatcccacatttccaaaataatcggtctggatactcaacaagttgaaggaaagctctcccaaatgatactagataagatattctacggtgttctggatcaaggtaatggttggctttacgtttacgaaactccgaatcaggatgccacgtacgactctgcattggaattagtcgggcaactaaataaagtcgtcgatcaactatttgaaaaggcaagtgtcttgtattag

SEQ ID NO: 1626 - DNA, 1305 bp, Artificial Sequence
  Description of Artificial Sequence: Synthetic polynucleotide
atgtctttaccaggttccaaattagaagaggccaggagattggttaatgaaaaacagtataatgaggcagaacaagtctatttgagcttattagataaagacagctctcagagcagcgccgctgccggtgccagtgtggatgacaagcgtagaaatgaacaggagacaagcatattggaattaggacagttatacgtgactatgggtgcaaaggacaaattgcgcgagtttattcctcattctacggagtatatgatgcaatttgccaaatccaaaacggtaaaggtattgaaaacgttgattgaaaaattcgagcaagtgccggactccttggacgatcagatctttgtgtgcgagaaaagcatcgaatttgccaagagagaaaaaagggtgtttttgaagcattctctctccatcaaattggccaccttacattatcaaaagaaacagtacaaggactctttagcattgattaacgatcttttgagggagttcaaaaagttggacgacaagccctctttggttgatgtacatcttttggaaagtaaagtttaccataaattgaggaatttggccaagtccaaggcctctttgactgcagcaaggacggccgctaactccatatactgtcctacacaaacagttgcggagttggacttgatgagtggtatcttgcactgtgaagataaagactacaaaactgcattttcttatttcttcgaaagttttgaaagctaccacaatttgactacgcataattcctacgaaaaggcatgtcaagtgttgaaatacatgcttttgtctaagatcatgttgaaccttattgatgacgtaaaaaacatcttgaacgcaaaatacacaaaggaaacgtaccagtccagaggcattgatgccatgaaagctgtcgctgaggcttataacaacagatctcttttagacttcaacacggcgttaaagcaatacgagaaggaattgatgggcgatgaattaacaagatcccatttcaatgcattatacgacacgttattagagtccaatttgtgtaagattattgagccatttgaatgtgtggaaatatcccacatttccaaaataatcggtttggatactcaacaagttgaaggaaagctctcccaaatgatattggataagatattctacggtgttttggatcaaggtaatggttggctttacgtttacgaaactccgaatcaggatgccacgtacgactctgcattggaattagtcgggcaattgaataaagtcgtcgatcaattatttgaaaaggcaagtgtcttgtattga

SEQ ID NO: 1627 - DNA, 2454 bp, Saccharomyces cerevisiae
atgtcggaagagaaaacgtacaaacgtgtagagcaggatgatcccgtgcccgaactggatatcaagcagggccccgtaagaccctttattgttaccgatccgagtgccgaattggcctcgttacgaaccatggtcactcttaaagagaagctgttagtggcctgtcttgctgtctttacagcggtcattagattgcatggcttggcatggcctgacagcgtggtgtttgatgaagtacatttcggtgggtttgcctcgcaatacattagggggacttacttcatggatgtgcatcctcctcttgcaaagatgttgtatgctggtgtggcatcgcttggtgggttccagggtgattttgacttcgaaaatattggtgacagctttccatctacgacgccatacgtgttgatgagatttttctctgcttctttgggggctcttactgttattttgatgtacatgactttacgttattctggtgttcgtatgtgggttgctttgatgagcgctatctgctttgccgttgaaaactcgtacgtcactatttctcgttacattctgttggacgccccattgatgtttttcattgcagctgcagtctactctttcaagaaatacgaaatgtaccctgccaactcgctcaatgcttacaagtccttgcttgctactggtattgctcttggtatggcatcttcatccaaatgggttggtcttttcacggttacatgggtgggtcttttatgtatctggagactatggttcatgattggggatttgactaagtcttccaagtccatcttcaaagtagcatttgccaaattggccttcttgttgggtgtgccttttgccctttatctggtcttcttttatatccacttccaatcattaactttggacggggatggcgcaagcttcttttcgcctgaatttagatctacactaaagaacaataagatcccccaaaatgtcgttgctgatgtcggcattggctccattatcagcttgcgtcatctctctaccatgggcggttatttgcattctcattcacacaattatccagctggttcggaacaacaacaaagcactttatatcctcacatggatgccaataacgattggttgttggaactttacaacgcacccggcgaatctttaacaacattccaaaacctaaccgatggtaccaaggtcagactattccacactgttacaagatgtagattacactctcatgaccataagccacccgtttcagaaagcagcgactggcagaaggaggtttcttgttatggttacagcggattcgacggtgatgctaatgatgactgggttgttgagattgataaaaagaattctgctcctggagttgcccaagaacgggtcatagctttggacacaaagtttagattgagacatgctatgacaggctgttatttgttttcccacgaagtcaagttgccagcttgggggttcgaacaacaagaagttacctgtgcctcctccggtagacatgatttaacattgtggtacgttgagaacaacagtaacccattgttaccagaagataccaagcgtatttcctataaacctgcaagcttcatttctaaatttattgaatcccataaaaagatgtggcatatcaataaaaatttggtcgaacctcatgtttatgaatcacaaccaacttcatggccattcttgctacgtggtataagttactggggtgaaaataacagaaacgtctatctattaggtaatgcgatcgtatggtgggctgtcaccgctttcatcggtattttcggattgattgttatcactgagctgttctcgtggcagttaggtaaaccaattttgaaggactccaaggttgttaacttccacgttcaggttattcactacttattgggttttgccgtccattatgctccatctttcttaatgcaacgtcaaatgtttttgcatcactacttacctgcttattatttcggtattcttgcccttggccacgccttggacataatagtttcttatgttttccgcagcaagagacaaatgggctacgcggtagtgatcactttccttgctgcttctgtgtatttcttcaagagcttcagtccaattatttacggtacaccatggactcaagaattgtgtcaaaaatcgcagtggttgtctggttgggactacaattgtaacacatacttttcttcattagaagagtacaaaaaccaaaccttgactaaacgtgaatctcaacctgccgccactagtacagttgaagaaatcactatagaaggggacggtccgtcgtatgaagatctcatgaacgaggatggcaagaaaatctttaaagacacagaaggtaatgaactagatccagaagttgtcaaaaaaatgttggaagaggagggagctaacattttaaaagtagaaaaaagggctgttttggaataa

SEQ ID NO: 1628 - DNA, 2454 bp, Artificial Sequence
  Description of Artificial Sequence: Synthetic polynucleotide
atgtctgaagagaaaacgtacaaacgtgtagagcaggatgatcccgtgcccgaattagatatcaagcagggccccgtaagaccctttattgttaccgatccgagtgccgaattggcctctttaagaaccatggtcactcttaaagagaagcttttagtggcctgtcttgctgtctttacagcggtcattagattgcatggcttggcatggcctgacagcgtggtgtttgatgaagtacatttcggtgggtttgcctctcaatacattagggggacttacttcatggatgtgcatcctcctcttgcaaagatgttgtatgctggtgtggcatctcttggtgggttccagggtgattttgacttcgaaaatattggtgacagctttccatctacgacgccatacgtgttgatgagatttttctctgcttctttgggggctcttactgttattttgatgtacatgactttacgttattctggtgttcgtatgtgggttgctttgatgagcgctatctgctttgccgttgaaaactcttacgtcactatttctcgttacattttattggacgccccattgatgtttttcattgcagctgcagtctactctttcaagaaatacgaaatgtaccctgccaactctctcaatgcttacaagtccttgcttgctactggtattgctcttggtatggcatcttcttccaaatgggttggtcttttcacggttacatgggtgggtcttttatgtatctggagattatggttcatgattggggatttgactaagtcttccaagtccatcttcaaagtagcatttgccaaattggccttcttgttgggtgtgccttttgccctttatttagtcttcttttatatccacttccaatctttaactttggacggggatggcgcaagcttcttttctcctgaatttagatctacattgaagaacaataagatcccccaaaatgtcgttgctgatgtcggcattggctccattatcagcttgcgtcatctctctaccatgggcggttatttgcattctcattctcacaattatccagctggttctgaacaacaacaaagcactttatatcctcacatggatgccaataacgattggttgttggaactttacaacgcacccggcgaatctttaacaacattccaaaacttgaccgatggtaccaaggtcagattattccacactgttacaagatgtagattacactctcatgaccataagccacccgtttctgaaagcagcgactggcagaaggaggtttcttgttatggttacagcggattcgacggtgatgctaatgatgactgggttgttgagattgataaaaagaattctgctcctggagttgcccaagaaagagtcatagctttggacacaaagtttagattgagacatgctatgacaggctgttatttgttttcccacgaagtcaagttgccagcttgggggttcgaacaacaagaagttacctgtgcctcctccggtagacatgatttaacattgtggtacgttgagaacaacagtaacccattgttaccagaagataccaagcgtatttcctataaacctgcaagcttcatttctaaatttattgaatcccataaaaagatgtggcatatcaataaaaatttggtcgaacctcatgtttatgaatctcaaccaacttcttggccattcttgttacgtggtataagttactggggtgaaaataacagaaacgtctatcttttaggtaatgcgatcgtatggtgggctgtcaccgctttcatcggtattttcggattgattgttatcactgagcttttcagttggcagttaggtaaaccaattttgaaggactccaaggttgttaacttccacgttcaggttattcactacttattgggttttgccgtccattatgctccatctttcttaatgcaacgtcaaatgtttttgcatcactacttacctgcttattatttcggtattcttgcccttggccacgccttggacataatagtttcttatgttttccgcagcaagagacaaatgggctacgcggtagtgatcactttccttgctgcttctgtgtatttcttcaagagcttcagtccaattatttacggtacaccatggactcaagaattgtgtcaaaaatctcagtggttgtctggttgggactacaattgtaacacatacttttcttctttagaagagtacaaaaaccaaaccttgactaaacgtgaatctcaacctgccgccactagtacagttgaagaaatcactatagaaggggacggtccgagctatgaagatctcatgaacgaggatggcaagaaaatctttaaagacacagaaggtaatgaattagatccagaagttgtcaaaaaaatgttggaagaggagggagctaacattttaaaagtagaaaaaagggctgttttggaatga

SEQ ID NO: 1629 - DNA, 2232 bp, Saccharomyces cerevisiae
atgaataaagagcatttgctgaaggtggatcccatccccgatgtgactattaaacgcggccctttgaggtcttttctcataacaaaaccctgtgataatttgagttcattacgaacagttacttcatctaaggaaaagcttctagttggctgtttgctgatatttactgccatcgtaaggctacacaatatctccctgccaaatagtgttgtttttggtgaaaatgaagttggtacatttgtttctcaatacgtgaacaacatattcttcaccgatgttcatcctcctttagtggcaatgctatatgcaaccgtgtcctctgtttttggttataaagggcttttcaattatgggaacattggtactgaatacacggcaaacgttccatacgtcgcgatgaggttcttttctgctactttgggcatcgtgtccgttttggtattatacttaacgttacgagtttctggcgtgaaaattgcggtagctgccatttgtgcagtatgttttgcaattgaaaactcctttgtaacgttgtctcgtttcaccttgatagagggaccctttgtttttttcatggcatgtgcagtttatttctttagaagatcggaactttatttgccaaattcatgtaaagcaaacaagtcattacttgctgcgagcattgcattgggatttgcagtttcttcaaaatgggctggcctcttcaccatcgcatgggctggtattattgtcctttggagagtatggttcatgattggtgatttgtcaagacccattggttcttctatcaaatatatggcgttccagtttacctgtctattagctattcctgccttcatctattttctcattttcagcgtgcatattaagacattaaacgtgaatggtattagtagtagcttttttcccgctgagtttagaaaaactttaaaatacaacaacgttattaaagagactgtggcagaagttgcagtgggttccgctgtttcactgaatcatgttggaacggcaggtggttacttgcattctcatcttcacaattatccggctggttccatgcaacaacaagttactttgtatcctcacatcgaccaaaataacaaatggattattgagctggctgaacatccaaatgaaaatgtcacaagtttccaaaatttaaccgacggtaccataattaaattaagacagcttaagaacggctgcaggttacactcacatgaccacaaacctccagtttctcaaaatgcggattggcaaaaagaggtgtcatgttatggatacgagggcttcgaaggtgatataaatgatgattggataattgaaatcgataaaaagagatcagagccgggacctgcccaggaacatattagggctattgaaaccaaatttaggctgaagcattatctaactggttgttacttattttcacatcctgaaaagctacctgagtggggattcgggcagcaggaagttacgtgtgcatactttgcaagggaagacttaacttcatggtatattgaagaaaacgaaaacgaaatttctttgccaaatccagagaaggtttcttataagaaaatgagcttttggcagaagtttgttgctatccacaagttcatgttctaccttaacaattatatggatactagtcatgcctactcatctgaaccaaagacttggcctcttatgttgcgtggtattgatttttggaatgaaaatggcagagaggtgtactttttaggtaacgctgttttgtggtggtctgtcacagcatttatttgcacgttcatcattggagtggctgttgagcttcttgcttggaaattaggtgtgaatattctacgggataagcacatcataaatttccactatcaggtctttcagtacttattaggctttgccgcccactatttcccttacttctttgtggggcaaaagttatttttgtacgattatttgccggcctattattttggtatcctagcatttggtcatgctttagacctgatttcaacctatatttctaacaaaagaaacaatactggatatatagtggtggctattttcatggttgtatgtttctatttcttcagcgagcattctccacttatttatgctactggatggtcgagtaacctgtgtaagaggtccaagtggttaggaagctgggacttttattgcaattcactattactatccgatagccactatgaattaaacgctgaatcatga

SEQ ID NO: 1630 - DNA, 2232 bp, Artificial Sequence
  Description of Artificial Sequence: Synthetic polynucleotide
atgaataaagagcatttgttgaaggtggatcccatccccgatgtgactattaaacgcggccctttgaggtcttttctcataacaaaaccctgtgataatttgagttctttaagaacagttacttcttctaaggaaaagcttttggttggctgtttgttaatatttactgccatcgtaaggttacacaatatctccttgccaaatagtgttgtttttggtgaaaatgaagttggtacatttgtttctcaatacgtgaacaacatattcttcaccgatgttcatcctcctttagtggcaatgctttatgcaaccgtgtcctctgtttttggttataaagggcttttcaattatgggaacattggtactgaatacacggcaaacgttccatacgtcgcgatgaggttcttttctgctactttgggcatcgtgtccgttttggtattatacttaacgttaagagtttctggcgtgaaaattgcggtagctgccatttgtgcagtatgttttgcaattgaaaactcctttgtaacgttgtctcgtttcaccttgatagagggaccctttgtttttttcatggcatgtgcagtttatttctttagaagaagtgaactttatttgccaaattcttgtaaagcaaacaagtctttacttgctgcgagcattgcattgggatttgcagtttcttctaaatgggctggcctcttcaccatcgcatgggctggtattattgtcctttggagagtatggttcatgattggtgatttgtccagacccattggttcttctatcaaatatatggcgttccagtttacctgtcttttagctattcctgccttcatctattttctcattttcagcgtgcatattaagacattaaacgtgaatggtattagtagtagcttttttcccgctgagtttagaaaaactttaaaatacaacaacgttattaaagagactgtggcagaagttgcagtgggttccgctgtttctttgaatcatgttggaacggcaggtggttacttgcattctcatcttcacaattatccggctggttccatgcaacaacaagttactttgtatcctcacatcgaccaaaataacaaatggattattgagttggctgaacatccaaatgaaaatgtcacaagtttccaaaatttaaccgacggtaccataattaaattaagacagcttaagaacggctgcaggttacactctcatgaccacaaacctccagtttctcaaaatgcggattggcaaaaagaggtgagctgttatggatacgagggcttcgaaggtgatataaatgatgattggataattgaaatcgataaaaagagaagtgagccgggacctgcccaggaacatattagggctattgaaaccaaatttaggttaaagcattatttgactggttgttacttattttctcatcctgaaaagttacctgagtggggattcgggcagcaggaagttacgtgtgcatactttgcaagggaagacttaacttcttggtatattgaagaaaacgaaaacgaaatttctttgccaaatccagagaaggtttcttataagaaaatgagcttttggcagaagtttgttgctatccacaagttcatgttctaccttaacaattatatggatactagtcatgcctactcttctgaaccaaagacttggcctcttatgttgcgtggtattgatttttggaatgaaaatggcagagaggtgtactttttaggtaacgctgttttgtggtggtctgtcacagcatttatttgcacgttcatcattggagtggctgttgagcttcttgcttggaaattaggtgtgaatattttaagagataagcacatcataaatttccactatcaggtctttcagtacttattaggctttgccgcccactatttcccttacttctttgtggggcaaaagttatttttgtacgattatttgccggcctattattttggtatcttggcatttggtcatgctttagacttgatttctacctatatttctaacaaaagaaacaatactggatatatagtggtggctattttcatggttgtatgtttctatttcttcagcgagcattctccacttatttatgctactggatggtctagtaacttgtgtaagaggtccaagtggttaggaagctgggacttttattgcaattctttattattatccgatagccactatgaattaaacgctgaaagttga

SEQ ID NO: 1631 - DNA, 441 bp, Saccharomyces cerevisiae
atggcaaatactggctgtttatcaccaggtgcatttttatcaaaggttccagaatttttccagactgcgaatgaaaaacatataactgtgcgtctaacggccaaaagactcatagaacacgatcctgtggaagggaatcttgaatttgattctaccaaccatcctgactatgatgtatctaaaaaggcttctgaaatttcagttagctcaagatctgacagagaatacccactattaatcagaatgtcttatggctcgcatgacaagaaaacaaaatgctcaacagtggtaaaagcaagtgagttagatcaattttggcaagagtattcatctgtatttaaggggggcatgcagaatttgatcaagaagaagaaaaagaagagtaagaacggtaccatcagtaagacaggaaagaaaaacaaggtagcgaagaaaaactga

SEQ ID NO: 1632 - DNA, 441 bp, Artificial Sequence
  Description of Artificial Sequence: Synthetic polynucleotide
atggcaaatactggctgtttatctccaggtgcatttttatccaaggttccagaatttttccagactgcgaatgaaaaacatataactgtgcgtctcacggccaaaagactcatagaacacgatcctgtggaagggaatcttgaatttgattctaccaaccatcctgactatgatgtatctaaaaaggcttctgaaatttctgttagcagcagatctgacagagaatacccattattaatcagaatgtcttatggctctcatgacaagaaaacaaaatgctccacagtggtaaaagcaagtgagttagatcaattttggcaagagtattcttctgtatttaaggggggcatgcagaatttgatcaagaagaagaaaaagaagagtaagaacggtaccatcagtaagacaggaaagaaaaacaaggtagcgaagaaaaactga

SEQ ID NO: 1633 - DNA, 1368 bp, Saccharomyces cerevisiae
atggatatatttaggcatacttttggaaataatgatgattcctttattcgaatcccaggtgcttttagagaagaaccacctgctgatttgaatggaaggacagaagatcaaaacagcaatacaaatgaacccacacagagccgggatggacgcttaaaatcaatactccattttttatttcaagctcccctaatagttctttattatttattgaatttcattgtccgaagttcacgtcttttaaaacctctattaagacttcacggattctaccagaggaagcacaaccgtttactagaccacagttcccaattacaccgtcttttagaaaatctagaaaacgaagctcaagctgtaacgtgttctgaaggtaacgggaataatgatgatggcagcaatactgacagtacgagcaacaatgagagcagtggggtccagtttagttttggttctttatacaaccctgaaaatggaacattttccaaaagcattatgcaaaatagttacactgaattattggatgcttgtagcgaacaagtgaaatttggagtcatttatttacatgacccattgttggataatcatatggattacgttaataaaatattgtgctcagaagcctttgttaacatgataaggaagtaccaggtattactatggtatggtgacgttactacatccgaggggttgcaagtttccaatgcattaaaaattaggcaatatcccctacttggaataatttctttaaaggctgagaaaaaaatagagttaatagcaagagttgaaggttctatttctaactacaaagcccaagatttggaggccatattctccaagaattattctcgattaattcaattgcgtcagcaaagacaaaatattgaaatgcagagattaataagacaacaacaggattcaagataccaggattccttaagacgtgatcaacaaagagaatcagaaagattggaacagacccaaagagaacaaatggaaagagagcaccaaagaatagaaaaccaatggctattgtggagaaaaagccaactaaaacccgaaccctcttctgataaagatgcaagcaaagttgcgatcagactagaaaatgggcagagattagtgagaaagtttgacgcatctctaccaacggaggagatatatgccttcgtagaattacagttgcatgacatgttgaactcagaaaacgatactttacccgtataccaacctgctaattatcagcaccagtatagcttcaaattgatcacgccggtaccaagaagagagcttgatttatctaccaaaatatctgacgttagcggcatatatccatcaggaaatattgtaatggaacgcctggacgaatga

SEQ ID NO: 1634 - DNA, 1368 bp, Artificial Sequence
  Description of Artificial Sequence: Synthetic polynucleotide
atggatatatttaggcatacttttggaaataatgatgattcctttattagaatcccaggtgcttttagagaagaaccacctgctgatttgaatggaaggacagaagatcaaaacagcaatacaaatgaacccacacagagcagagatggacgcttaaaatctatactccattttttatttcaagctcccttgatagttctttattatttattgaatttcattgtcagaagttctcgtcttttaaaacctttattaagacttcacggattctaccagaggaagcacaaccgtttattagaccacagttcccaattacaccgtcttttagaaaatttggaaaacgaagctcaagctgtaacgtgttctgaaggtaacgggaataatgatgatggcagcaatactgacagtacgagcaacaatgagagcagtggggtccagtttagttttggttctttatacaaccctgaaaatggaacattttccaaaagcattatgcaaaatagttacactgaattattggatgcttgtagcgaacaagtgaaatttggagtcatttatttacatgacccattgttggataatcatatggattacgttaataaaatattgtgcagtgaagcctttgttaacatgataaggaagtaccaggtattattatggtatggtgacgttactacatccgaggggttgcaagtttccaatgcattaaaaattaggcaatatcccttgcttggaataatttctttaaaggctgagaaaaaaatagagttaatagcaagagttgaaggttctatttctaactacaaagcccaagatttggaggccatattctccaagaattattctagattaattcaattgcgtcagcaaagacaaaatattgaaatgcagagattaataagacaacaacaggattccagataccaggattccttaagacgtgatcaacaaagagaaagtgaaagattggaacagacccaaagagaacaaatggaaagagagcaccaaagaatagaaaaccaatggttattgtggagaaaaagccaattgaaacccgaaccctcttctgataaagatgcaagcaaagttgcgatcagattagaaaatgggcagagattagtgagaaagtttgacgcatctttaccaacggaggagatatatgccttcgtagaattacagttgcatgacatgttgaactctgaaaacgatactttacccgtataccaacctgctaattatcagcaccagtatagcttcaaattgatcacgccggtaccaagaagagagcttgatttatctaccaaaatatctgacgttagcggcatatatccatctggaaatattgtaatggaacgcttggacgaatga

SEQ ID NO: 1635 - DNA, 1296 bp, Saccharomyces cerevisiae
atgcgacagagagtaggaaggtccatagctagggctaaatttataaatactgccttattaggaagaaagagaccagttatggaaagagtcgtcgatatagcgcatgtagattcaagtaaagcaatccaaccattgatgaaggaactagaaaccgacactacagaagcacgatacaaagtactacaaagtgtattagagatatacgatgatgaaaagaatatagaacctgctctcacgaaagagtttcacaaaatgtacttggatgtcgcttttgagatatcgttacctccacaaatgacagcactagatgcttcacaaccgtggatgctatattggattgctaactcattgaaggtaatggacagagactggctttcagatgacaccaaaagaaaaattgtagataagctctttactattagtccttcaggaggaccctttggtggaggtcctggccaattatctcatttggccagcacttatgctgcaattaatgctctctccctttgcgataacatagatggatgctgggacagaattgatcgaaaaggaatttaccaatggctgatatcgttgaaagagcctaatggaggattcaagacctgtttagaagtcggagaagtggatacaagaggtatatactgtgccttgagcatagcaaccttattaaatattcttacagaagagcttacagaaggtgtgttaaactatttgaaaaattgtcaaaattatgaaggtggattcggcagttgtcctcacgtagatgaggcacacggaggctatactttctgtgctacagctagtctagcaattttaaggtccatggaccaaataaatgttgaaaagcttttagaatggtctagtgctcgtcaattgcaagaagaacgaggattttgcggaaggagcaacaaacttgttgacggttgctatagtttttgggttggaggttcggctgccattcttgaagcttttggatatggccaatgcttcaacaaacatgctcttcgggactacatattgtactgttgccaagaaaaagagcaacctggtttgagagataaaccaggggcccactcagacttttaccatacaaattattgcctattaggactggctgttgcggaaagttcatacagttgcactcctaatgattctccacataatattaagtgtactccagaccgcctaattggatcatcgaaacttactgatgtcaaccctgtctatggtttaccaatagaaaatgtaagaaaaattatccactactttaaatccaatttatcttctccaagttaa

SEQ ID NO: 1636 - DNA, 1296 bp, Artificial Sequence
  Description of Artificial Sequence: Synthetic polynucleotide
atgaggcagagagtaggaaggtccatagctagggctaaatttataaatactgccttattaggaagaaagagaccagttatggaaagagtcgtcgatatagcgcatgtagattctagtaaagcaatccaaccattgatgaaggaattggaaaccgacactacagaagcaagatacaaagtattacaaagtgtattagagatatacgatgatgaaaagaatatagaacctgctctcacgaaagagtttcacaaaatgtacttggatgtcgcttttgagatatctttacctccacaaatgacagcattggatgcttctcaaccgtggatgctttattggattgctaactctttgaaggtaatggacagagactggctttctgatgacaccaaaagaaaaattgtagataagctctttactattagtccttctggaggaccctttggtggaggtcctggccaattatctcatttggccagcacttatgctgcaattaatgctctctccctttgcgataacatagatggatgctgggacagaattgataggaaaggaatttaccaatggttgatatctttgaaagagcctaatggaggattcaagacctgtttagaagtcggagaagtggatacaagaggtatatactgtgccttgagcatagcaaccttattaaatattcttacagaagagcttacagaaggtgtgttaaactatttgaaaaattgtcaaaattatgaaggtggattcggcagttgtcctcacgtagatgaggcacacggaggctatactttctgtgctacagctagtttagcaattttaaggtccatggaccaaataaatgttgaaaagcttttagaatggtctagtgctcgtcaattgcaagaagaaagaggattttgcggaaggagcaacaaacttgttgacggttgctatagtttttgggttggaggttctgctgccattcttgaagcttttggatatggccaatgcttcaacaaacatgctcttcgtgactacatattgtactgttgccaagaaaaagagcaacctggtttgagagataaaccaggggcccactctgacttttaccatacaaattattgccttttaggattggctgttgcggaaagtagttacagttgcactcctaatgattctccacataatattaagtgtactccagaccgcttaattggatcttctaaacttactgatgtcaaccctgtctatggtttaccaatagaaaatgtaagaaaaattatccactactttaaatccaatttatcttctccaagttga

SEQ ID NO: 1637 - DNA, 1455 bp, Saccharomyces cerevisiae
atgggttcaaatgatttgataaatgaagcatatgacgactcggaagtagttggtgaggaaagagaatcaaaatctgcatggatgaagaggtggtatcagctacttacttctcctttagacttgcagttggtaataaatgaaaagttagaaatgatcaactgggatgcttatgctaaaagtctagctaagccattagggaattttttaacaatacttttttttatcataagactcttgcaggacaatttgatcaagcccaactattacaaactaaacgtcaagtctggcgctttcgatctttctaaatccaataaattaaaagagtttgattatctatgggagatatcatccagctttcaaaacaataatcaattttatgcatttcaatcttggtattttgttaccttaaggtttttgaataatcttttcaggtttactattttcatactgctgtccctgaacctgtacgtaagctgtaaattcatgtttggatactttaagacttacaatctcttccatttgaaaaaagagttcaactccccaaacctcactaaacacaacttgaaggatctaagcaaagaatactatgaagatatttataagcagtccttgtggtctatgttgaagcattttttcagaggatctcgtgatgacggtcctcatgttaatcaaaatgaagatgagatattttttcagttaagaaaatggatccccactaacttcatgattaatctttttgtgtctttttcaccaacggcaattgtttttttaagcttttctgatgtttcgtttacttcagcaattgctatagtattccatcaatatattctggattatatcataactaagagatttcaaagaagcgtggacgacgacttgattttatcaagtgcagctttgcaagaatatgaggacaagcatataatggcacgaattaaccaatgcagcaatatagatactctatcatctgcaatgggtactagatctaaaacaccgagaatattcaccactcactccctatgtggcgaagaaatcagagaggtttataattatgaaaaaagggaatttgaggcattaccgaaaatgacagaaagtgtgccaggatcccgtgaaaccagaataaaggattatggaggcatttctcaagtatctgaccatcaaagtcatcccattggttttcattattctcctagaatgtccccatattatagggataaagttttggataacaatttggctcaatcatcgtcaaatgaaaatttagagaagggcggagcttacctgccgaatcaagaccaaaatagaccatcgaaatccctgagcccattgagaaaaacgcctttaagcgcacgacagaaaaggtttgaaggctcagagttcaatgtattgaataagaatgatattaattccattcttcgctctccaaagaaaaagaagaactatcacaaaagataa

SEQ ID NO: 1638 - DNA, 1455 bp, Artificial Sequence
  Description of Artificial Sequence: Synthetic polynucleotide
atgggtagtaatgatttgataaatgaagcatatgacgactctgaagtagttggtgaggaaagagaaagtaaatctgcatggatgaagaggtggtatcagttacttacttctcctttagacttgcagttggtaataaatgaaaagttagaaatgatcaactgggatgcttatgctaaaagtttggctaagccattagggaattttttaacaatacttttttttatcataagactcttgcaggacaatttgatcaagcccaactattacaaattgaacgtcaagtctggcgctttcgatctttctaaatccaataaattaaaagagtttgattatttatgggagatatcttccagctttcaaaacaataatcaattttatgcatttcaatcttggtattttgttaccttaaggtttttgaataatcttttcaggtttactattttcatattattatccttgaacctttacgtaagctgtaaattcatgtttggatactttaagacttacaatctcttccatttgaaaaaagagttcaactccccaaacctcactaaacacaacttgaaggatttgagcaaagaatactatgaagatatttataagcagtccttgtggtctatgttgaagcattttttcagaggatctcgtgatgacggtcctcatgttaatcaaaatgaagatgagatattttttcagttaagaaaatggatccccactaacttcatgattaatctttttgtgtctttttctccaacggcaattgtttttttaagcttttctgatgtttcttttacttctgcaattgctatagtattccatcaatatattttagattatatcataactaagagatttcaaagaagcgtggacgacgacttgattttatccagtgcagctttgcaagaatatgaggacaagcatataatggcaagaattaaccaatgcagcaatatagatactttatcttctgcaatgggtactagatctaaaacaccgagaatattcaccactcactccttatgtggcgaagaaatcagagaggtttataattatgaaaaaagggaatttgaggcattaccgaaaatgacagaaagtgtgccaggatcccgtgaaaccagaataaaggattatggaggcatttctcaagtatctgaccatcaaagtcatcccattggttttcattattctcctagaatgtccccatattatagggataaagttttggataacaatttggctcaatcttcttccaatgaaaatttagagaagggcggagcttacttgccgaatcaagaccaaaatagaccatctaaatccttaagcccattgagaaaaacgcctttaagcgcaagacagaaaaggtttgaaggcagtgagttcaatgtattgaataagaatgatattaattccattcttcgctctccaaagaaaaagaagaactatcacaaaagatga

SEQ ID NO: 1639 - DNA, 1587 bp, Saccharomyces cerevisiae
atgtttggaatacgttcaggcaataataacggtggatttactaacctcacgtcgcaagcaccacagacaacccagatgtttcaatcgcaatcacagttgcagccacaaccgcaaccgcaaccacaacaacagcagcaacacttgcaattcaatggatcatccgatgcaagttctttacgatttggaaactcactttccaatactgtaaacgccaataactatagtagtaatatcggtaacaatagcatcaacaacaacaacattaaaaacggcacaaataacataagccaacatggccaagggaataatcctagctgggtgaataatcctaaaaagagattcactcctcatacggtgataagaaggaagacaacaaagcaaaattcttcttctgacatcaaccagaatgatgattcatcttctatgaacgctactatgagaaatttcagtaagcaaaatcaagattccaagcataatgaaagaaataagtctgcggcaaataatgacatcaattctctgttgtcaaattttaacgatattccaccctccgttactttacaggattggcaacgcgaggatgaattcggttctattccatcattaacaactcagtttgttaccgacaaatacacggcgaagaaaacaaataggtcagcttatgattccaaaaatactccaaatgtttttgataaagactcttatgttagaatagcaaacattgaacagaaccatttagataataattacaacaccgccgaaacaaacaataaagtccatgaaacatcttccaagtcttctagtttgagcgcaattatcgtatttggctatcctgaatcaatttccaatgaattgattgaacacttctcccatttcggtcatattatggaagactttcaagtattgcgattgggtcgcgggattaaccccaacaccttcagaatattccataatcatgatacaggctgtgatgaaaacgattctactgttaataaatctattactttaaaaggcagaaataatgagtcgaataacaaaaaatatccaatatttactggtgaaagttgggtcaaactcacttataattctccatcttctgctttgagagcactgcaggaaaatggaaccatatttcgcggttctttgattggttgcatcccatattcaaaaaatgcggtggagcaattagctggctgcaaaattgataatgtcgacgacattggagaattcaacgtttctatgtatcaaaattcctccacatcgtcgacatctaatacaccatccccaccaaacgtaataataactgatggcactcttctgagggaagacgataatactcctgccggtcatgctggtaatccaacaaatatttcaagtccaatagtagcaaattctccgaataagcggctggatgtaatagatggcaaattgccattcatgcaaaatgcaggaccgaattcgaatattcctaatctgttgcgaaacctagaatcgaaaatgcgtcagcaagaagcgaaatacagaaataatgaacctgctggttttacgcacaaactgagtaattggttatttggttggaatgacctataa

SEQ ID NO: 1640 - DNA, 1587 bp, Artificial Sequence
  Description of Artificial Sequence: Synthetic polynucleotide
atgtttggaatacgtagcggcaataataacggtggatttactaacctcacgtctcaagcaccacagacaacccagatgtttcaatctcaatctcagttgcagccacaaccgcaaccgcaaccacaacaacagcagcaacacttgcaattcaatggatcttccgatgcaagttctttaagatttggaaactctctttccaatactgtaaacgccaataactatagtagtaatatcggtaacaatagcatcaacaacaacaacattaaaaacggcacaaataacataagccaacatggccaagggaataatcctagctgggtgaataatcctaaaaagagattcactcctcatacggtgataagaaggaagacaacaaagcaaaattcttcttctgacatcaaccagaatgatgattcttcttctatgaacgctactatgagaaatttcagtaagcaaaatcaagattccaagcataatgaaagaaataagtctgcggcaaataatgacatcaattctttgttgagcaattttaacgatattccaccctccgttactttacaggattggcaacgcgaggatgaattcggttctattccatctttaacaactcagtttgttaccgacaaatacacggcgaagaaaacaaataggtctgcttatgattccaaaaatactccaaatgtttttgataaagactcttatgttagaatagcaaacattgaacagaaccatttagataataattacaacaccgccgaaacaaacaataaagtccatgaaacatcttccaagtcttctagtttgagcgcaattatcgtatttggctatcctgaaagtatttccaatgaattgattgaacacttctcccatttcggtcatattatggaagactttcaagtattgagattgggtcgcgggattaaccccaacaccttcagaatattccataatcatgatacaggctgtgatgaaaacgattctactgttaataaatctattactttaaaaggcagaaataatgagagcaataacaaaaaatatccaatatttactggtgaaagttgggtcaaactcacttataattctccatcttctgctttgagagcattacaggaaaatggaaccatatttcgcggttctttgattggttgcatcccatattctaaaaatgcggtggagcaattagctggctgcaaaattgataatgtcgacgacattggagaattcaacgtttctatgtatcaaaattcctccacatcttctacatctaatacaccatccccaccaaacgtaataataactgatggcactcttttgagggaagacgataatactcctgccggtcatgctggtaatccaacaaatatttccagtccaatagtagcaaattctccgaataagagattagatgtaatagatggcaaattgccattcatgcaaaatgcaggaccgaatagtaatattcctaatttattgagaaacttggaaagtaaaatgcgtcagcaagaagcgaaatacagaaataatgaacctgctggttttacgcacaaattaagtaattggttatttggttggaatgacttgtga

SEQ ID NO: 1641 - DNA, 786 bp, Saccharomyces cerevisiae
atgtcaactatgtcaacgcctgccgcagaacaacgcaaactcgtcgaacagctgatgggcagggacttcagtttccgccacaacaggtattcgcatcaaaaaagagacctcggactacacgatcccaagatctgcaagtcataccttgttggcgagtgcccctacgacctgtttcagggcaccaagcagagcctgggaaaatgcccgcagatgcatcttaccaagcataaaattcagtacgagagagaggtcaagcagggcaaaacgtttcccgaattcgaaagagaatatctggccattctatctcggtttgttaatgagtgtaatggccagatatccgtagcactacaaaatctaaaacacaccgctgaggaacgaatgaagattcagcaggttaccgaagaactagatgtcttggacgtgcggataggcctaatgggacaagagattgattctttaattcgtgcagatgaagtcagtatgggtatgctacagtcagtcaaattacaagaactgattagtaaaaggaaagaagttgcaaaacgtgtacgaaacattacagaaaacgtgggccagagcgcccagcaaaagttacaggtttgcgaggtgtgtggggcatacctatcgcgtttagatacagacagaaggcttgctgaccacttcttggggaagattcatctgggatatgtcaagatgagagaggattatgatcggctaatgaagaataaccggacaactaacgccagcaagacagctactacactacccggaagacgctttgtgtag

SEQ ID NO: 1642 - DNA, 786 bp, Artificial Sequence
  Description of Artificial Sequence: Synthetic polynucleotide
atgtctactatgtctacgcctgccgcagaacaacgcaaactcgtcgaacagttgatgggcagggacttcagtttccgccacaacaggtattctcatcaaaaaagagacctcggattgcacgatcccaagatctgcaagtcctaccttgttggcgagtgcccctacgacttatttcagggcaccaagcagagcttgggaaaatgcccgcagatgcatcttaccaagcataaaattcagtacgagagagaggtcaagcagggcaaaacgtttcccgaattcgaaagagaatatttggccattttatctagatttgttaatgagtgtaatggccagatatccgtagcattacaaaatttgaaacacaccgctgaggaaagaatgaagattcagcaggttaccgaagaattagatgtcttggacgtgagaataggcttaatgggacaagagattgattctttaattcgtgcagatgaagtcagtatgggtatgttacagtctgtcaaattacaagaattgattagtaaaaggaaagaagttgcaaaacgtgtaagaaacattacagaaaacgtgggccagagcgcccagcaaaagttacaggtttgcgaggtgtgtggggcatacttatctcgtttagatacagacagaaggcttgctgaccacttcttggggaagattcatttaggatatgtcaagatgagagaggattatgatagattaatgaagaataacagaacaactaacgccagcaagacagctactacattacccggaagacgctttgtgtga

SEQ ID NO: 1643 - DNA, 822 bp, Saccharomyces cerevisiae
atgttgattactgagacctttcatgatgtgcagacatcatacggcaccactctgcgtatatacgtatattctcctaagattgcaggctatccacaagctaagtttcctggggtgattctgtacagtgaaatttaccaagtgacgggtccggttcgtcgttttggtcaaagaattgcgtctgaaggttacgttgtggtggcacctgccatataccacaactttatgggccctgaagcgttgccctatgacgtgcagggtaccgatattggtaacgagtacaagatcaagaagccgttagaatcatacgatgaggacaacaaactgtgttgcgatctacttttccagttaccccaattcgatggtaagagaattggttccacaggaatgtgtttaggtggccatttggcttttagagcgctcctggacaaaagggttacctgcgcaacctgcttcttccctaccgacatccattccagaaccttaggtcttggccagaacgataactctttggaacgtgtttcgaaggagttgggtaataaccaagaaatggttttgatcttcggaactgcggacacccatgtcgacccgcaaggccgcgatctaatcagaaagaccctcagagaccacggagtaaagtttacgttcttggaaatcctggctgcccagcatgcgttcatccgtgacgagttcagcaagggcaggttcgactccgctatcactcaaagttgtctcggcttcttgttcgagcagttcaacagaaaattgagaatcgatttgggtgaatttgtcgatgacaatacacctttggagcacgtttgttaa

SEQ ID NO: 1644 - DNA, 822 bp, Artificial Sequence
  Description of Artificial Sequence: Synthetic polynucleotide
atgttgattactgagacctttcatgatgtgcagacatcttacggcaccactttacgtatatacgtatattctcctaagattgcaggctatccacaagctaagtttcctggggtgattttatacagtgaaatttaccaagtgacgggtccggttcgtcgttttggtcaaagaattgcgtctgaaggttacgttgtggtggcacctgccatataccacaactttatgggccctgaagcgttgccctatgacgtgcagggtaccgatattggtaacgagtacaagatcaagaagccgttagaatcttacgatgaggacaacaaattatgttgcgatttacttttccagttaccccaattcgatggtaagagaattggttccacaggaatgtgtttaggtggccatttggcttttagagcgctcttggacaaaagggttacctgcgcaacctgcttcttccctaccgacatccattccagaaccttaggtcttggccagaacgataactctttggaacgtgtttccaaggagttgggtaataaccaagaaatggttttgatcttcggaactgcggacacccatgtcgacccgcaaggccgcgatttgatcagaaagaccctcagagaccacggagtaaagtttacgttcttggaaatcttggctgcccagcatgcgttcatccgtgacgagttcagcaagggcaggttcgactccgctatcactcaaagttgtctcggcttcttgttcgagcagttcaacagaaaattgagaatcgatttgggtgaatttgtcgatgacaatacacctttggagcacgtttgttga

SEQ ID NO: 1645 - DNA, 207 bp, Saccharomyces cerevisiae
atggctagaggtaatcaaagagacttggcaagacaaaaaaacttgaaaaaacaaaaggacatggctaagaaccagaaaaagagtggtgatcctaagaaaagaatggagtcagacgccgaaatcttgagacaaaagcaggccgccgcagatgctagaagagaggctgaaaagcttgagaagttaaaagccgaaaagacgagaagataa

SEQ ID NO: 1646 - DNA, 207 bp, Artificial Sequence
  Description of Artificial Sequence: Synthetic polynucleotide
atggctagaggtaatcaaagagacttggcaagacaaaaaaacttgaaaaaacaaaaggacatggctaagaaccagaaaaagagtggtgatcctaagaaaagaatggagagtgacgccgaaatcttgagacaaaagcaggccgccgcagatgctagaagagaggctgaaaagcttgagaagttaaaagccgaaaagacgagaagatga

SEQ ID NO: 1647 - DNA, 1638 bp, Saccharomyces cerevisiae
atgctgcccagacttggttttgcgaggactgctaggtccatacaccgtttcaagatgacccagatctctaaaccttttttccattccactgaagttggtaagcccggaccacagcagaagctatcgaaatcttacactgcggtattcaagaaatggtttgtcagaggtttaaagttaaccttttacacgacgttggccggcacattgtatgtgtcatacgagctgtacaaagaatcgaacccacccaaacaggttccccaatcgaccgcttttgctaatggtttgaaaaagaaggagctggttattttgggtacaggctggggcgccatatctcttttgaagaaattagacacgtctttgtataacgtgaccgtggtgtcgccaagaagcttctttttgttcacaccgttattaccctcaacgcctgtgggtacgatagagatgaagtctattgtcgaaccggttagatcgatcgctagaagaacgcctggagaagttcactacattgaggcggaagcgttggacgttgatccaaaggccaaaaaagtaatggtgcaatcggtgtcagaggacgaatatttcgtttcgagcttaagttacgattatcttgttgttagtgtaggcgctaaaaccactacttttaacattcccggggtctatggcaatgctaacttcttgaaagagattgaagatgctcaaaatattcgtatgaagttaatgaaaaccatagaacaggcaagttcatttcctgtgaacgatccggaaaggaagcgattattaacgttcgtggttgttggagggggccctacgggggttgaatttgccgccgaactgcaagattacatcaatcaagatttgaggaagtggatgcccgacttaagtaaagaaatgaaggttatcttaattgaagccctgcctaatatcctaaacatgttcgataagacgttgatcaagtatgccgaggacctttttgccagagatgaaattgacttgcaagtgaatactgccgtgaaagtcgtagagccaacctatatacgcactctgcaaaacggccaaacaaacacggatatcgaatacgggatgctggtttgggccacgggaaatgaaccaatcgatttttcaaagacactgatgagtagaataccggagcaaactaataggcgtggtctgttaattaatgacaagttggagcttctcggttctgagaattcgatttatgcaattggtgattgtaccgcacacacgggtttctttcccacggcacaagttgcacatcaggaaggcgaatacttggccaagatcttggataaaaaattacagatagaacaattggaatgggacatgctcaacagtaccgatgaaactgaggtatcacgtctacaaaaagaggttaatttgaggaaatctaagttggataagttcaactacaagcatatgggtgcccttgcgtacatcggctctgaaaccgcaattgcagatttgcatatgggcgactcatcataccagttgaaaggtatgtttgccttcttgttttggaaatccgcttatttggccatgtgtctctctatcaggaataggattttaattgccatggactggaccaaagtttactttcttggaagggattcctccgtgtag

SEQ ID NO: 1648 - DNA, 1638 bp, Artificial Sequence
  Description of Artificial Sequence: Synthetic polynucleotide
atgttgcccagacttggttttgcgaggactgctaggtccatacaccgtttcaagatgacccagatctctaaaccttttttccattccactgaagttggtaagcccggaccacagcagaagctttctaaatcttacactgcggtattcaagaaatggtttgtcagaggtttaaagttaaccttttacacgacgttggccggcacattgtatgtgtcttacgagttatacaaagaatctaacccacccaaacaggttccccaatccaccgcttttgctaatggtttgaaaaagaaggagttagttattttgggtacaggctggggcgccatatctcttttgaagaaattagacacgtctttgtataacgtgaccgtggtgtctccaagaagcttctttttgttcacaccgttattacccagtacgcctgtgggtacgatagagatgaagtctattgtcgaaccggttagatctatcgctagaagaacgcctggagaagttcactacattgaggcggaagcgttggacgttgatccaaaggccaaaaaagtaatggtgcaatctgtgtctgaggacgaatatttcgtttccagcttaagttacgattatcttgttgttagtgtaggcgctaaaaccactacttttaacattcccggggtctatggcaatgctaacttcttgaaagagattgaagatgctcaaaatattcgtatgaagttaatgaaaaccatagaacaggcaagttcttttcctgtgaacgatccggaaaggaagagattattaacgttcgtggttgttggagggggccctacgggggttgaatttgccgccgaattacaagattacatcaatcaagatttgaggaagtggatgcccgacttaagtaaagaaatgaaggttatcttaattgaagccttgcctaatatcttgaacatgttcgataagacgttgatcaagtatgccgaggacctttttgccagagatgaaattgacttgcaagtgaatactgccgtgaaagtcgtagagccaacctatatacgcactttacaaaacggccaaacaaacacggatatcgaatacgggatgcttgtttgggccacgggaaatgaaccaatcgatttttccaagacattgatgagtagaataccggagcaaactaataggcgtggtttattaattaatgacaagttggagcttctcggttctgagaattctatttatgcaattggtgattgtaccgcacacacgggtttctttcccacggcacaagttgcacatcaggaaggcgaatacttggccaagatcttggataaaaaattacagatagaacaattggaatgggacatgctcaacagtaccgatgaaactgaggtatcccgtttacaaaaagaggttaatttgaggaaatctaagttggataagttcaactacaagcatatgggtgcccttgcgtacatcggctctgaaaccgcaattgcagatttgcatatgggcgactcttcctaccagttgaaaggtatgtttgccttcttgttttggaaatccgcttatttggccatgtgtctctctatcaggaataggattttaattgccatggactggaccaaagtttactttcttggaagggattcctccgtgtga

SEQ ID NO: 1649 - DNA, 1341 bp, Saccharomyces cerevisiae
atgtcacacgaaggtgaagaagatttattggagtactccgataacgaacaagaaattcaaattgatgcctctaaggccgctgaagctggagaaactggcgccgccacttctgcaactgaaggtgataataataacaacactgcagctggcgacaagaaaggttcctatgttggtatccattccaccggtttcaaagatttcttgctaaagccagaactatcaagagccatcattgactgtggttttgaacatccttctgaggtccagcaacataccattcctcagtcaattcatggtaccgatgtcttgtgtcaagcaaagtctggtttaggtaagacagctgtctttgtcttatccactctgcaacaattggaccctgttccaggtgaagttgccgttgttgtcatttgtaatgctagagaactggcctatcaaattcgtaacgagtatttgagattttccaaatatatgccagacgttaagacagcagtcttttacggtggtactccaatttctaaggatgctgaacttttaaagaataaagatactgctcctcacattgttgttgcaactccaggtcgtttaaaagcgttagtgagagaaaaatacattgatttgtcacacgtcaagaactttgtcatagatgaatgtgataaggttttagaagaattagacatgagaagagatgtgcaagaaattttcagagctactccaagagacaaacaagtcatgatgttttcagccacactttctcaagaaattagaccaatttgtagacgcttcttacagaatccattggaaattttcgtcgatgatgaagctaagctaaccttgcacgggttgcaacaatattatatcaaattagaagaacgtgaaaagaaccgtaaattggctcaattattagatgatttggagttcaatcaagtcattattttcgttaaatctaccacaagagctaatgagttgaccaaactattaaacgcctctaactttccggctatcaccgttcatggtcatatgaaacaagaagaacgtattgctcgttacaaggctttcaaagattttgaaaaacgtatttgcgtgtccacagatgtttttggtagaggtatcgatattgaacgtattaatttagccatcaattacgatttgactaatgaagctgaccaatatttacatcgtgtcggtagagctggtagatttggtactaagggtttggctatttcattcgtttcttcaaaggaagatgaggaagtcttggctaagatccaagagcgtttcgatgtcaaaatcgctgaattcccagaagaaggcattgatccgtccacttatttgaataattaa

SEQ ID NO: 1650 - DNA, 1341 bp, Artificial Sequence
  Description of Artificial Sequence: Synthetic polynucleotide
atgtctcacgaaggtgaagaagatttattggagtactccgataacgaacaagaaattcaaattgatgcctctaaggccgctgaagctggagaaactggcgccgccacttctgcaactgaaggtgataataataacaacactgcagctggcgacaagaaaggttcctatgttggtatccattccaccggtttcaaagatttcttgttgaagccagaattatctagagccatcattgactgtggttttgaacatccttctgaggtccagcaacataccattcctcagagtattcatggtaccgatgtcttgtgtcaagcaaagtctggtttaggtaagacagctgtctttgtcttatccactttacaacaattggaccctgttccaggtgaagttgccgttgttgtcatttgtaatgctagagaattggcctatcaaattcgtaacgagtatttgagattttccaaatatatgccagacgttaagacagcagtcttttacggtggtactccaatttctaaggatgctgaacttttaaagaataaagatactgctcctcacattgttgttgcaactccaggtcgtttaaaagcgttagtgagagaaaaatacattgatttgtctcacgtcaagaactttgtcatagatgaatgtgataaggttttagaagaattagacatgagaagagatgtgcaagaaattttcagagctactccaagagacaaacaagtcatgatgttttctgccacactttctcaagaaattagaccaatttgtagacgcttcttacagaatccattggaaattttcgtcgatgatgaagctaagttgaccttgcacgggttgcaacaatattatatcaaattagaagaacgtgaaaagaaccgtaaattggctcaattattagatgatttggagttcaatcaagtcattattttcgttaaatctaccacaagagctaatgagttgaccaaattattaaacgcctctaactttccggctatcaccgttcatggtcatatgaaacaagaagaacgtattgctcgttacaaggctttcaaagattttgaaaaacgtatttgcgtgtccacagatgtttttggtagaggtatcgatattgaacgtattaatttagccatcaattacgatttgactaatgaagctgaccaatatttacatcgtgtcggtagagctggtagatttggtactaagggtttggctatttctttcgtttcttccaaggaagatgaggaagtcttggctaagatccaagagcgtttcgatgtcaaaatcgctgaattcccagaagaaggcattgatccgtccacttatttgaataattga

SEQ ID NO: 1651 - DNA, 432 bp, Saccharomyces cerevisiae
atgtctgccgtcccaagtgtccaaacttttggtaagaagaaatcagctaccgctgttgcccacgtcaaggccggtaagggtttgattaaggtcaacggttctccaatcactttggttgaaccagaaatcctaagattcaaggtctacgaaccattattgttggttggtttggacaagttctccaacatcgatatcagagttagagtcactggtggtggtcatgtttctcaagtctacgccatcagacaagctattgctaagggtttagtcgcttaccaccaaaagtacgttgacgaacaatccaagaacgaattgaagaaggccttcacctcttacgacagaactttgttgatcgctgattctagaagaccagaaccaaagaaattcggtggtaagggtgctcgttctagattccaaaaatcttaccgttaa

SEQ ID NO: 1652 - DNA, 432 bp, Artificial Sequence
  Description of Artificial Sequence: Synthetic polynucleotide
atgtctgccgtcccaagtgtccaaacttttggtaagaagaaatctgctaccgctgttgcccacgtcaaggccggtaagggtttgattaaggtcaacggttctccaatcactttggttgaaccagaaatcttaagattcaaggtctacgaaccattattgttggttggtttggacaagttctccaacatcgatatcagagttagagtcactggtggtggtcatgtttctcaagtctacgccatcagacaagctattgctaagggtttagtcgcttaccaccaaaagtacgttgacgaacaatccaagaacgaattgaagaaggccttcacctcttacgacagaactttgttgatcgctgattctagaagaccagaaccaaagaaattcggtggtaagggtgctcgttctagattccaaaaatcttaccgttga

SEQ ID NO: 1653 - DNA, 600 bp, Saccharomyces cerevisiae
atggccatttccaagaatttaccaatcttaaagaatcatttcagaaagcactggcaagaacgtgttaaagtgcacttcgaccaagctggtaagaaggtttctagacgtaatgctagagctaccagagccgctaagattgctccaagacctctagatctcttgagacctgttgttagagccccaactgttaagtataacagaaaggtcagagctggcagaggtttcaccttggctgaagttaaggccgctggtttgactgctgcttatgccagaactatcggtatcgccgttgaccacagacgtcaaaacagaaaccaagaaatctttgatgctaacgttcaaagattaaaggaataccaatctaagattattgttttcccaagaaatggtaaggccccagaagctgaacaagttttgtctgctgctgctactttcccaattgctcaaccagctaccgatgttgaagctagagctgtccaagacaatggtgaatctgctttcagaaccttgagattagccagatctgagaagaaattcagaggtatcagagaaaagagagctagagaaaaggctgaagctgaagctgaaaagaagaaatag

SEQ ID NO: 1654 - DNA, 600 bp, Artificial Sequence
  Description of Artificial Sequence: Synthetic polynucleotide
atggccatttccaagaatttaccaatcttaaagaatcatttcagaaagcactggcaagaacgtgttaaagtgcacttcgaccaagctggtaagaaggtttctagacgtaatgctagagctaccagagccgctaagattgctccaagacctttggatctcttgagacctgttgttagagccccaactgttaagtataacagaaaggtcagagctggcagaggtttcaccttggctgaagttaaggccgctggtttgactgctgcttatgccagaactatcggtatcgccgttgaccacagacgtcaaaacagaaaccaagaaatctttgatgctaacgttcaaagattaaaggaataccaatctaagattattgttttcccaagaaatggtaaggccccagaagctgaacaagttttgtctgctgctgctactttcccaattgctcaaccagctaccgatgttgaagctagagctgtccaagacaatggtgaatctgctttcagaaccttgagattagccagatctgagaagaaattcagaggtatcagagaaaagagagctagagaaaaggctgaagctgaagctgaaaagaagaaatga

SEQ ID NO: 1655 - DNA, 321 bp, Saccharomyces cerevisiae
atgtctactgaatccgctttgtcttacgccgccttgattttggctgactctgaaatcgaaatctcttctgaaaagttgttgactttgactaacgctgccaatgtcccagttgaaaatatctgggctgatatttttgctaaggctttggacggccaaaacttgaaggacttattggtcaacttcagcgctggtgctgctgccccagctggtgtcgctggtggtgtcgctggtggtgaagccggtgaagccgaagctgaaaaggaagaagaagaagctaaagaagaatccgatgacgacatgggtttcggtttatttgattag

SEQ ID NO: 1656 - DNA, 321 bp, Artificial Sequence
  Description of Artificial Sequence: Synthetic polynucleotide
atgtctactgaatccgctttgtcttacgccgccttgattttggctgactctgaaatcgaaatctcttctgaaaagttgttgactttgactaacgctgccaatgtcccagttgaaaatatctgggctgatatttttgctaaggctttggacggccaaaacttgaaggacttattggtcaacttcagcgctggtgctgctgccccagctggtgtcgctggtggtgtcgctggtggtgaagccggtgaagccgaagctgaaaaggaagaagaagaagctaaagaagaatccgatgacgacatgggtttcggtttatttgattga

SEQ ID NO: 1657 - DNA, 1830 bp, Saccharomyces cerevisiae
atgaattctagctatacacagagatatgcactgccgaagtgtatagcaatatcagattatcttttccatcggctcaaccagctgaacatacataccatatttggactctccggagaatttagcatgccgttgctggataaactatacaacattccgaacttacgatgggccggtaattctaatgagttaaatgctgcctacgcagcagatggatactcacgactaaaaggcttgggatgtctcataacaacctttggtgtaggcgaattatcggcaatcaatggcgtggccggatcttacgctgaacatgtaggaatacttcacatagtgggtatgccgccaacaagtgcacaaacgaaacaactactactgcatcatactctgggcaatggtgatttcacggtatttcatagaatagccagtgatgtagcatgctatacaacattgattattgactctgaattatgtgccgacgaagtcgataagtgcatcaaaaaggcttggatagaacagaggccagtatacatgggcatgcctgtcaaccaggtaaatctcccgattgaatcagcaaggcttaatacacctctggatttacaattgcataaaaacgacccagacgtagagaaagaagttatttctcgaatattgagttttatatacaaaagccagaatccggcaatcatcgtagatgcatgtactagtcgacagaatttaatcgaggagactaaagagctttgtaataggcttaaatttccagtttttgttacacctatgggtaagggtacagtaaacgaaacagacccgcaatttgggggcgtattcacgggctcgatatcagccccagaagtaagagaagtagttgattttgccgattttatcatcgtcattggttgcatgctctccgaattcagcacgtcaactttccacttccaatataaaactaagaattgtgcgctactatattctacatctgtgaaattgaaaaatgccacatatcctgacttgagcattaaattactactacagaaaatattagcaaatcttgatgaatctaaactgtcttaccaaccaagcgaacaacccagtatgatggttccaagaccttacccagcaggaaatgtcctcttgagacaagaatgggtctggaatgaaatatcccattggttccaaccaggtgacataatcataacagaaactggtgcttctgcatttggagttaaccagaccagatttccggtaaatacactaggtatttcgcaagctctttggggatctgtcggatatacaatgggggcgtgtcttggggcagaatttgctgttcaagagataaacaaggataaattccccgcaactaaacatagagttattctgtttatgggtgacggtgctttccaattgacagttcaagaattatccacaattgttaagtggggattgacaccttatatttttgtgatgaataaccaaggttactctgtggacaggtttttgcatcacaggtcagatgctagttattacgatatccaaccttggaactacttgggattattgcgagtatttggttgcacgaactacgaaacgaaaaaaattattactgttggagaattcagatccatgatcagtgacccaaactttgcgaccaatgacaaaattcggatgatagagattatgctaccaccaagggatgttccacaggctctgcttgacaggtgggtggtagaaaaagaacagagcaaacaagtgcaagaggagaacgaaaattctagcgcagtaaatacgccaactccagaattccaaccacttctaaaaaaaaatcaagttggatactga

SEQ ID NO: 1658 - DNA, 1830 bp, Artificial Sequence
  Description of Artificial Sequence: Synthetic polynucleotide
atgaattctagctatacacagagatatgcattaccgaagtgtatagcaatatctgattatcttttccatcgtctcaaccagttgaacatacataccatatttggactctccggagaatttagcatgccgttgttggataaactttacaacattccgaacttaagatgggccggtaattctaatgagttaaatgctgcctacgcagcagatggatacagcaggttgaaaggcttgggatgtctcataacaacctttggtgtaggcgaattaagtgcaatcaatggcgtggccggatcttacgctgaacatgtaggaatacttcacatagtgggtatgccgccaacaagtgcacaaacgaaacaattattattacatcatactttgggcaatggtgatttcacggtatttcatagaatagccagtgatgtagcatgctatacaacattgattattgactctgaattatgtgccgacgaagtcgataagtgcatcaaaaaggcttggatagaacagaggccagtatacatgggcatgcctgtcaaccaggtaaatctcccgattgaaagtgcaaggcttaatacacctttggatttacaattgcataaaaacgacccagacgtagagaaagaagttatttctagaatattgagttttatatacaaaagccagaatccggcaatcatcgtagatgcatgtactagtaggcagaatttaatcgaggagactaaagagctttgtaataggcttaaatttccagtttttgttacacctatgggtaagggtacagtaaacgaaacagacccgcaatttgggggcgtattcacgggctctatatctgccccagaagtaagagaagtagttgattttgccgattttatcatcgtcattggttgcatgctctccgaattcagcacgtctactttccacttccaatataaaactaagaattgtgcgttattatattctacatctgtgaaattgaaaaatgccacatatcctgacttgagcattaaattattattgcagaaaatattagcaaatcttgatgaatctaaattatcttaccaaccaagcgaacaacccagtatgatggttccaagaccttacccagcaggaaatgtcctcttgagacaagaatgggtctggaatgaaatatcccattggttccaaccaggtgacataatcataacagaaactggtgcttctgcatttggagttaaccagaccagatttccggtaaatacattaggtatttctcaagctctttggggatctgtcggatatacaatgggggcgtgtcttggggcagaatttgctgttcaagagataaacaaggataaattccccgcaactaaacatagagttattttatttatgggtgacggtgctttccaattgacagttcaagaattatccacaattgttaagtggggattgacaccttatatttttgtgatgaataaccaaggttactctgtggacaggtttttgcatcacaggtctgatgctagttattacgatatccaaccttggaactacttgggattattgagagtatttggttgcacgaactacgaaacgaaaaaaattattactgttggagaattcagatccatgatcagtgacccaaactttgcgaccaatgacaaaattagaatgatagagattatgcttccaccaagggatgttccacaggctttacttgacaggtgggtggtagaaaaagaacagagcaaacaagtgcaagaggagaacgaaaattctagcgcagtaaatacgccaactccagaattccaaccacttttgaaaaaaaatcaagttggatactga

SEQ ID NO: 1659 - DNA, 1506 bp, Saccharomyces cerevisiae
atgaccgatgtgttgagaagcctagtgcgaaagatttccttcaataactcagataaccttcagctaaaacacaagacatctatacagagtaatactgccctagaaaagaagaagagaaagcctgatacaatcaaaaaggtaagcgacgttcaagttcaccatactgtacctaatttcaataacagttcagagtacatcaacgacatagagaatcttataatatctaaactgatagacgggggaaaggagggtattgcagttgatcacattgaacacgccaatatctcggacagtaaaacagatggaaaagttgccaataagcacgaaaatattagtagcaagcttagtaaagagaaggttgagaaaatgattaattttgattataggtatattaaaaccaaggaaaggactattcataaacgggtttataaacatgaccgcaaaactgatgtcgaccgaaaaaatcatggaggaactatcgacatcagttatcctacgacagaagtggttggccatggttcatttggtgttgtagtcacgactgtaataattgagaccaatcaaaaagttgccataaagaaagtactacaagatagaagatataaaaatagggagctcgaaactatgaagatgttgtgccatccaaatactgtgggtctacagtactacttttacgaaaaggacgaagaagatgaagtatacctcaatctggttttggactacatgcctcagtcgttataccaaaggcttcgtcattttgttaatttgaaaatgcagatgccgcgtgttgaaattaaattctatgcataccaactattcaaagctttaaactatttgcataacgttcctcgaatctgtcacagagatataaaaccgcaaaacctactggtggatccgacaactttttctttcaagatttgcgattttggcagtgccaaatgcttgaaaccggatcagcctaatgtgtcttacatctgttcaaggtactatagggctcccgaactcatgtttggtgccactaattactcaaaccaggtcgacgtgtggtcaagcgcttgtgtcattgctgagttgcttttgggcaagcccttgttctctggtgaaagcggtatagatcagttggtggaaattattaagataatgggcatacccacaaaggatgaaatttcaggaatgaacccaaattatgaagaccatgttttccccaatatcaagcccattactttggctgaaatattcaaagccgaagatcccgatactcttgacttgttaacaaaaactctgaagtatcacccttgcgaaagattggtacctctacaatgtctattatcaagctattttgacgaaaccaaacgttgtgataccgacacttacgtaaaagcacaaaacctgcgtatatttgacttcgacgtggaaactgagttgggccatgttccacttgtggaacggcccgccattgaagaacggttgaaacattttgtttctgcaccttcatcgtctttgtga

SEQ ID NO: 1660 - DNA, 1506 bp, Artificial Sequence
  Description of Artificial Sequence: Synthetic polynucleotide
atgaccgatgtgttgagaagcttggtgagaaagatttccttcaataacagtgataaccttcagttgaaacacaagacatctatacagagtaatactgccttggaaaagaagaagagaaagcctgatacaatcaaaaaggtaagcgacgttcaagttcaccatactgtacctaatttcaataacagtagtgagtacatcaacgacatagagaatcttataatatctaaattgatagacgggggaaaggagggtattgcagttgatcacattgaacacgccaatatcagtgacagtaaaacagatggaaaagttgccaataagcacgaaaatattagtagcaagcttagtaaagagaaggttgagaaaatgattaattttgattataggtatattaaaaccaaggaaaggactattcataaaagagtttataaacatgaccgcaaaactgatgtcgacagaaaaaatcatggaggaactatcgacatcagttatcctacgacagaagtggttggccatggttcttttggtgttgtagtcacgactgtaataattgagaccaatcaaaaagttgccataaagaaagtattacaagatagaagatataaaaatagggagctcgaaactatgaagatgttgtgccatccaaatactgtgggtttacagtactacttttacgaaaaggacgaagaagatgaagtatacctcaatttggttttggactacatgcctcagtctttataccaaaggcttcgtcattttgttaatttgaaaatgcagatgccgcgtgttgaaattaaattctatgcataccaattattcaaagctttaaactatttgcataacgttcctagaatctgtcacagagatataaaaccgcaaaacttattggtggatccgacaactttttctttcaagatttgcgattttggcagtgccaaatgcttgaaaccggatcagcctaatgtgtcttacatctgttctaggtactatagggctcccgaactcatgtttggtgccactaattactctaaccaggtcgacgtgtggtctagcgcttgtgtcattgctgagttgcttttgggcaagcccttgttctctggtgaaagcggtatagatcagttggtggaaattattaagataatgggcatacccacaaaggatgaaatttctggaatgaacccaaattatgaagaccatgttttccccaatatcaagcccattactttggctgaaatattcaaagccgaagatcccgatactcttgacttgttaacaaaaactttgaagtatcacccttgcgaaagattggtacctttacaatgtcttttatccagctattttgacgaaaccaaacgttgtgataccgacacttacgtaaaagcacaaaacttgcgtatatttgacttcgacgtggaaactgagttgggccatgttccacttgtggaaaggcccgccattgaagaaagattgaaacattttgtttctgcaccttcttcttctttgtga

SEQ ID NO: 1661 - DNA, 1032 bp, Saccharomyces cerevisiae
atggtcaaagtcgcaattcttggcgcttctggtggcgtgggacaaccgctatcattactgctaaaattaagcccttacgtttccgagctggcgttgtacgatatccgagctgcggaaggcattggtaaggatttatctcacatcaacaccaactcaagttgtgtcggttatgataaggatagtattgagaacaccttgtcaaatgctcaggtggtgctaataccggctggtgttcccagaaagcccggtttaactagagatgatttgttcaagatgaacgccggtattgtcaaaagcctggtaaccgctgttggaaagttcgcaccaaatgcgaggattttagtcatttcaaaccctgtaaacagtttggtccctattgctgtggaaactttgaagaaaatgggtaagttcaaacctggaaacgttatgggtgtgacgaaccttgacctggtacgtgcagaaacctttttggtagattatttgatgctaaaaaaccccaaaattggacaagaacaagacaaaactacaatgcacagaaaggtcactgttattgggggtcattcaggggaaaccattatcccaataatcaccgacaaatcgctggtatttcaacttgataagcagtacgagcacttcattcatagggtccagttcggaggtgatgaaattgtcaaagctaaacagggcgccggttccgccacgttgtccatggcgttcgcgggggccaagtttgctgaagaagttttgaggagcttccataatgagaaaccagaaacggagtcactttccgcattcgtttatttaccaggcttaaaaaacggtaagaaagcgcagcaattagttggcgacaactctattgagtatttttccttgccaattgttttgagaaatggtagcgtagtatccatcgataccagtgttctggaaaaactgtctccgagagaggaacaactcgttaatactgcggtcaaagagctacgcaagaatattgaaaaaggcaagagtttcatcctagactcttccaagctatga

SEQ ID NO: 1662 - DNA, 1032 bp, Artificial Sequence
  Description of Artificial Sequence: Synthetic polynucleotide
atggtcaaagtcgcaattcttggcgcttctggtggcgtgggacaaccgttatctttattattgaaattaagcccttacgtttccgagttagcgttgtacgatatcagagctgcggaaggcattggtaaggatttatctcacatcaacaccaacagtagttgtgtcggttatgataaggatagtattgagaacaccttgagcaatgctcaggtggtgttgataccggctggtgttcccagaaagcccggtttaactagagatgatttgttcaagatgaacgccggtattgtcaaaagcttagtaaccgctgttggaaagttcgcaccaaatgcgaggattttagtcatttccaaccctgtaaacagtttggtccctattgctgtggaaactttgaagaaaatgggtaagttcaaacctggaaacgttatgggtgtgacgaaccttgacttggtacgtgcagaaacctttttggtagattatttgatgttgaaaaaccccaaaattggacaagaacaagacaaaactacaatgcacagaaaggtcactgttattgggggtcattctggggaaaccattatcccaataatcaccgacaaatctttagtatttcaacttgataagcagtacgagcacttcattcatagggtccagttcggaggtgatgaaattgtcaaagctaaacagggcgccggttccgccacgttgtccatggcgttcgcgggggccaagtttgctgaagaagttttgaggagcttccataatgagaaaccagaaacggagtctctttccgcattcgtttatttaccaggcttaaaaaacggtaagaaagcgcagcaattagttggcgacaactctattgagtatttttccttgccaattgttttgagaaatggtagcgtagtatccatcgataccagtgttttggaaaaattatctccgagagaggaacaactcgttaatactgcggtcaaagagttacgcaagaatattgaaaaaggcaagagtttcatcttggactcttccaagttatga

SEQ ID NO: 1663 - DNA, 3150 bp, Saccharomyces cerevisiae
atgttaagagctcaaaagctacactcgctgaaatcatcggatatcactgcgattttgcccactgaacagtcacaaaaattagttttagcaaagaaaaatggtgacgttgaagtttactctcgagatggcaatacactcaaattatttcaagtatatcctgatctcttacaaaacgccaaaaatgatcctttgcctccagtgattgaaaacttttattttgccaacgagctttcaactatctttgcacaatgtaaagaaaccttaattttattgagcactacaaatttacacgaatatgatcgaataattgacagaagaggtataaaccattgctggctctttgaaaggtcacacaaaaataaagaagaaaagaatacttacctaatatattcaaccatcaatactgccaagatgagagtattaatatgggagggtaggacttacaaaaatatgatggaagcatcgttatcgtatagaaaggaaaccattcggtccatatatcctggtgaaacaggaatcaccttagcgacagatttaggtatctatcattggccatataataaaccctctctaatcagaatagaaaaaacagtgaaaaacaaattcccaaaagatatgatatcagcattaaccgaactcaaagagcaggcggagaaagtcattgaaaagaagcccaaaaagaatagccattttgatgctcaatccttttcttctatggatagaatgtccaggaagtcgagcatgtcaagcttatggtataggaccataagaaacgagcgtggcaacaaaatacgatatacttttgaattggacggcaatgacgctaccccaatgataattgatggtgctacaaaaaaaattttcaaggtagagttaatgcataacaatgaggaaccatttttgatcgccactgaccatgctacattttccgaatcaaattccgaattcgatcacatgcaatatttgtcgtccaacctcctgatgttatataattcaagtaccatcaagtttgttgattatgaaaatggatttacttttttgcaacaaaaaataccagaaggtataaaatgggtcaaaaatctctcgggaacctactttttagtatggacttcaaacgacgaagtacagttattctcttatcatgtagatgatggctctgaagatgatgatcaagagtctatttgtggtgacattaatgatcctgatttttatcaactatggagaaaagtgcttttctataagttcttcattgattctcctcattctaaggagttatgtgtttcggacaatccagaagaatccttggatatatgtgctatgaaactaagggatttaacagtgatgtggtgtctaagaatcttcgataagtttcaaaattatatggtacaactagaaaggagtagaaactcgagaatgattcgttctaaatgtgaagaaatgatcatcaagagtatttttgacctatttataaaattttgggctccacctcaattagttattttgaaagtttttccctcagccatttcaagcttggtattggaaattacgggccaagagcatcactgcttgttgaaggaagccgaggaggttaaggaaacttatgacatcccgccacacttattgaacagatggtgtttaccttatttgactgacacaaggcgacatttgcaaaacttattaagcaaggaaaacgatgacgaaagccgcataacttggtgctatcgcgaccgtgaaatcaagcaaagttttgatttctttctgatcagcaaccacgatgatgttgaccttaacacaatgttaactctgatagatacagttttattcaaatgttatctttactataacccccccatggtgggtccattcattcgtgtagaaaaccactgcgattcccatgttatagtgaccgaattaaaaatacgccatatgttcaaagatttaattgatttttactataaacgtggtaatcatgaagaagctttgaaatttctcacggatttggtcgatgagttggaaaatgataatactgaccagaaacaacgccaaaaaatcgatcacggtgtcaaaatattagttatttattatttgaaaaaattatcaaacccgcagttagacgttatattcacttatactgattggctactaaatcgacacaacgactcaattaaagaaatcctttcctcgatttttttttatgattctcaagcctgtagcagtagggaccatttgaaagtgtatgggtacatcaaaaagttcgacaagttacttgccatacaatacttagaatttgcaattagtacttttagattagagggaaataaattgcatactgtcctgatcaagttatatcttgaaaacttagatattccctccacaagaatcaaattaaagtctttattagaaacaacatctgtctatgagcctagaacaattttaaagttattgaacgatgctattgagagtggctctgaccagttgccaaccaatcaactaaatttcgtaaagtacctaaagattttccccttatcaaaattagaaaaccataaggaagctgtgcatatattacttgatgagatagatgattacaaagcggcgacaagttactgtaacgacgtgtaccaaagtgattcgacaaagggagaagagcttctattgtacttgtacagcaagttagtctccatatacgattccaataggaactccaagctgattctgaattttttgcaagaccatggttcaaaattgaattcagcggaaatatacaaaaatttacctcaagatatttccttgtacgatattggtagggtggtgtcgcaattattaaagaagcacacatcaaagatggatgagaccagattagaaaaggcactcctccaggttgagcttgtggccaccacatacaaactcaatgaacgcatgtcatcgtatggagtcttatcagatagccataaatgtcctatttgcaagaaagtaatttcaaattttggaacagattcgatttcctggttcaccagggaaggcagaaatatcatcacccattataactgtgggaaagtactacaggagcggtttaacgctaaaaatgaaaagtcctcgagaattaaacagaagactttgggagaagttataaatgagctaaataataagtaa

SEQ ID NO: 1664 - DNA, 3150 bp, Artificial Sequence
  Description of Artificial Sequence: Synthetic polynucleotide
atgttaagagctcaaaagttgcactctttgaaaagcagtgatatcactgcgattttgcccactgaacagtctcaaaaattagttttagcaaagaaaaatggtgacgttgaagtttactctagagatggcaatacactcaaattatttcaagtatatcctgatctcttacaaaacgccaaaaatgatcctttgcctccagtgattgaaaacttttattttgccaacgagctttctactatctttgcacaatgtaaagaaaccttaattttattgagcactacaaatttacacgaatatgatagaataattgacagaagaggtataaaccattgctggctctttgaaaggtctcacaaaaataaagaagaaaagaatacttacttgatatattctaccatcaatactgccaagatgagagtattaatatgggagggtaggacttacaaaaatatgatggaagcatctttatcttatagaaaggaaaccattagatccatatatcctggtgaaacaggaatcaccttagcgacagatttaggtatctatcattggccatataataaaccctctttgatcagaatagaaaaaacagtgaaaaacaaattcccaaaagatatgatatctgcattaaccgaactcaaagagcaggcggagaaagtcattgaaaagaagcccaaaaagaatagccattttgatgctcaatccttttcttctatggatagaatgtccaggaagagcagcatgtctagcttatggtataggaccataagaaacgagcgtggcaacaaaataagatatacttttgaattggacggcaatgacgctaccccaatgataattgatggtgctacaaaaaaaattttcaaggtagagttaatgcataacaatgaggaaccatttttgatcgccactgaccatgctacattttccgaaagtaattccgaattcgatcacatgcaatatttgtcttccaacctcttaatgttatataatagtagtaccatcaagtttgttgattatgaaaatggatttacttttttgcaacaaaaaataccagaaggtataaaatgggtcaaaaatctctctggaacctactttttagtatggacttctaacgacgaagtacagttattctcttatcatgtagatgatggctctgaagatgatgatcaagagtctatttgtggtgacattaatgatcctgatttttatcaattatggagaaaagtgcttttctataagttcttcattgattctcctcattctaaggagttatgtgtttctgacaatccagaagaatccttggatatatgtgctatgaaattgagggatttaacagtgatgtggtgtttgagaatcttcgataagtttcaaaattatatggtacaattggaaaggagtagaaactctagaatgattcgttctaaatgtgaagaaatgatcatcaagagtatttttgacttatttataaaattttgggctccacctcaattagttattttgaaagtttttccctctgccatttctagcttggtattggaaattacgggccaagagcatcactgcttgttgaaggaagccgaggaggttaaggaaacttatgacatcccgccacacttattgaacagatggtgtttaccttatttgactgacacaaggagacatttgcaaaacttattaagcaaggaaaacgatgacgaaagccgcataacttggtgctatcgcgaccgtgaaatcaagcaaagttttgatttctttttgatcagcaaccacgatgatgttgaccttaacacaatgttaactttgatagatacagttttattcaaatgttatctttactataacccccccatggtgggtccattcattcgtgtagaaaaccactgcgattcccatgttatagtgaccgaattaaaaatacgccatatgttcaaagatttaattgatttttactataaacgtggtaatcatgaagaagctttgaaatttctcacggatttggtcgatgagttggaaaatgataatactgaccagaaacaacgccaaaaaatcgatcacggtgtcaaaatattagttatttattatttgaaaaaattatctaacccgcagttagacgttatattcacttatactgattggttgttgaatagacacaacgacagtattaaagaaatcctttccagtatttttttttatgattctcaagcctgtagcagtagggaccatttgaaagtgtatgggtacatcaaaaagttcgacaagttacttgccatacaatacttagaatttgcaattagtacttttagattagagggaaataaattgcatactgtcttgatcaagttatatcttgaaaacttagatattccctccacaagaatcaaattaaagtctttattagaaacaacatctgtctatgagcctagaacaattttaaagttattgaacgatgctattgagagtggctctgaccagttgccaaccaatcaattgaatttcgtaaagtacttgaagattttccccttatccaaattagaaaaccataaggaagctgtgcatatattacttgatgagatagatgattacaaagcggcgacaagttactgtaacgacgtgtaccaaagtgattctacaaagggagaagagcttttattgtacttgtacagcaagttagtctccatatacgattccaataggaactccaagttgattttgaattttttgcaagaccatggttccaaattgaattctgcggaaatatacaaaaatttacctcaagatatttccttgtacgatattggtagggtggtgagtcaattattaaagaagcacacatccaagatggatgagaccagattagaaaaggcactcctccaggttgagcttgtggccaccacatacaaactcaatgaacgcatgtcttcttatggagtcttaagtgatagccataaatgtcctatttgcaagaaagtaatttctaattttggaacagattctatttcctggttcaccagggaaggcagaaatatcatcacccattataactgtgggaaagtattacaggagagatttaacgctaaaaatgaaaagtccagcagaattaaacagaagactttgggagaagttataaatgagttgaataataagtga

SEQ ID NO: 1665 - DNA, 885 bp, Saccharomyces cerevisiae
atgtcggtaagcgaacaagatcctaatagggcgtacagagagactcaatcccagatatataaactacaggaaacactactaaattcggcgagaacaaaaaataagcaagaggagggacaagaaagcaacacccattcttttccagagcagtatatgcattaccaaaacggcagaaattcggcctacgacctgcctaatgtaagttcacagtcggttcttgctttcactgagaaacactatccaaacaagttaaaaaacttgggtacactttattacaatcgtttcaaagaagggtcttttgatgaagactccacaagttactcagacaggcacagttttccatacaacctttatgacaacactcttccaccaccgttccttccagctatcggtattcaaaatatcaataatattgcaacgctaaaaataacatatgaagatattcaggcaagtttcaataatatagaatctcctagaaagagaaataatgagatatggggatgtgatatctattctgatgactcagacccaatactagttttaagacattgcgggttcaaaattggagcgccttctggtggctcatttcacaaattgagaagaacccctgtaaatgtaactaatcaagataatgttacaggtaaccttcccctactggaaggcacaccttttgatctagaggtggagttgttgtttttgcctactctacaaaagtatcctagcgtaaaaagatttgatataacatcgcgggaatggggatcggaagccaccgttatacacgatggactgagttacggtatctatagtattgtcattaagcaaagactagatagagataaacctcatgaaccaaacgggtatattaaaaatttaaaatggacctaa

SEQ ID NO: 1666 - DNA, 885 bp, Artificial Sequence
  Description of Artificial Sequence: Synthetic polynucleotide
atgtctgtaagcgaacaagatcctaatagggcgtacagagagactcaatcccagatatataaattacaggaaacattgttgaattctgcgagaacaaaaaataagcaagaggagggacaagaaagcaacacccattcttttccagagcagtatatgcattaccaaaacggcagaaattctgcctacgacttgcctaatgtaagttctcagtctgttcttgctttcactgagaaacactatccaaacaagttaaaaaacttgggtacactttattacaatcgtttcaaagaagggtcttttgatgaagactccacaagttacagtgacaggcacagttttccatacaacctttatgacaacactcttccaccaccgttccttccagctatcggtattcaaaatatcaataatattgcaacgttgaaaataacatatgaagatattcaggcaagtttcaataatatagaatctcctagaaagagaaataatgagatatggggatgtgatatctattctgatgacagtgacccaatattagttttaagacattgcgggttcaaaattggagcgccttctggtggctcttttcacaaattgagaagaacccctgtaaatgtaactaatcaagataatgttacaggtaaccttcccttattggaaggcacaccttttgatttagaggtggagttgttgtttttgcctactttacaaaagtatcctagcgtaaaaagatttgatataacatctagagaatggggatctgaagccaccgttatacacgatggattgagttacggtatctatagtattgtcattaagcaaagattagatagagataaacctcatgaaccaaacgggtatattaaaaatttaaaatggacctga

SEQ ID NO: 1667 - DNA, 342 bp, Saccharomyces cerevisiae
atggccggtttgaaagacgttgtcactcgtgaatacaccattaacttgcacaaaagattgcacggtgtctccttcaagaagagagctccaagagctgtcaaggaaattaagaagttcgccaagttacacatgggtactgatgatgtccgtctagctccagaattgaaccaagctatctggaagagaggtgtcaagggtgttgaatacagattaagattgagaatttccagaaagagaaacgaagaagaagacgccaagaacccattgttctcctacgttgaacctgtcttagttgcttctgccaagggtctacaaactgttgttgtcgaagaagatgcttaa

SEQ ID NO: 1668 - DNA, 342 bp, Artificial Sequence
  Description of Artificial Sequence: Synthetic polynucleotide
atggccggtttgaaagacgttgtcactcgtgaatacaccattaacttgcacaaaagattgcacggtgtctccttcaagaagagagctccaagagctgtcaaggaaattaagaagttcgccaagttacacatgggtactgatgatgtccgtttggctccagaattgaaccaagctatctggaagagaggtgtcaagggtgttgaatacagattaagattgagaatttccagaaagagaaacgaagaagaagacgccaagaacccattgttctcctacgttgaacctgtcttagttgcttctgccaagggtttacaaactgttgttgtcgaagaagatgcttga

SEQ ID NO: 1669 - DNA, 2103 bp, Saccharomyces cerevisiae
atgacggccgagcctgctactaagaagatcaagctagaattaagcgatcctagtgaaccgcttactcaatctgatgtgatagcgtttcaaaaagaagctttgtttagatgtataaatcgtcgaagagtcgactttgaagccttgcgaaagcaatatgaactttcaagaagggagtgcatagatgtttcccgcaagttggcaaatattatggcgctgatagtaactttagctaggtttatcgaaacattctgcacagacgccaacgagaagcaactatgtagggaaatagcccaaggcgatgagacgttgatagttcagcgcagtgattctttcatgaagctactgactaaatatgggaagccaaacacgacagatagtaatactaatagtaatgcttcggatcatattcaagaattaacaacggagttaaaaaacttgcggaaaagtaaagaggagctcttttatgaaaattcgcaattgacagaggagatttctgctttgaaggaatattatacaaatataattcgcaagtatgatagagatgaatcctttactataaaacgtgtttttaaggaagataagactgatgctgtaaaggaattacgggaagatgaaaaagaatctaatgaaaacaatataaaatctggaaataaagactcctctgcaattaatggtgataatacatccaaaaaatccgagaaaggtgatgaacttgtgcaggcggaggatgaacgaaaagaagatgctgagaatgaaaaattagaattggatctgaaattttctgatttacgggcagagataaactccttgagttccactataaaagaccttgaaaatatcagaagggaaaacgaggaagagctcatcaaaacacgttctgaggtatccaatttaaaaaagcaacagatagcagcagcagaccaagacccagatttcaagtcatatgaccatgagtccctgttagcaaaaattcaacatttgactgaacaaaacgcagaattatctgagatcaatagttcctttttatcaaaatttcaagttttagccaaagagaaagaaatatatacgaagaaggtccgagaagaattccagaaaagtctcgactccctagtagaaatgaacagttcattggaaaaggacgttgtaagaataagaacggctcgtgatgatttactaagcaaaatcgccattttggaagctgaaaaatccaagactgaagtgttgagcgatttacaacatgcaattgatattttgaaggagcaatggacaaaaattgatcaaagatcaaacgatacaaaatcctcgtcgactcaagatgcattaataaaggaaattcaagacttagagaagggttttagagagttatccgacttaactcataaaaagtactctgagattattaatcacgaatctgttatatccaagcttaccgtagaaaaaactaaggctgatcagaaatattttgccgcgatgaggtccaaagattcaattttaattgaaatcaaaactctttctaaaagcctcagtaaatcaaatgagcttattctacagttaaaggactctgatagattgctacagcaaaaaataggaaatttacataaacaactggatctttctcaaaataatgaacgcaggttaattgattccagtaaaacagagacactaaaaataattgatttaaataatacatccactaaactgaaaaggtcattagaaaagctacaagaagaaagtaacaaaagcattgcagatatgacgcatctagaaactaaattaaatgatacagaaatagaattgaagcacttcaagcagaaggcatctcatctagaatccaagtgtgaaaaactacatgatacattgttccgtggtaacaacaaaaataagggctcgagcgatgaagcactcgtagaagaactagcaaatttccgtacacttgtttattgttccctgtgttctaaaaattggaaaaacatggctattaaaacctgtggccatgtcttttgtgagaattgctgtaaggaacgattggcagcgagaatgagaaaatgccctacatgcaacaaagcattcagttccaatgatttattgacagtgcacttgtaa

SEQ ID NO: 1670 - DNA, 2103 bp, Artificial Sequence
  Description of Artificial Sequence: Synthetic polynucleotide
atgacggccgagcctgctactaagaagatcaagttggaattaagcgatcctagtgaaccgcttactcaatctgatgtgatagcgtttcaaaaagaagctttgtttagatgtataaatcgtagaagagtcgactttgaagccttgagaaagcaatatgaactttctagaagggagtgcatagatgtttcccgcaagttggcaaatattatggcgttaatagtaactttagctaggtttatcgaaacattctgcacagacgccaacgagaagcaattatgtagggaaatagcccaaggcgatgagacgttgatagttcagcgcagtgattctttcatgaagttattaactaaatatgggaagccaaacacgacagatagtaatactaatagtaatgcttctgatcatattcaagaattaacaacggagttaaaaaacttgagaaaaagtaaagaggagctcttttatgaaaattctcaattgacagaggagatttctgctttgaaggaatattatacaaatataattcgcaagtatgatagagatgaatcctttactataaaacgtgtttttaaggaagataagactgatgctgtaaaggaattaagagaagatgaaaaagaatctaatgaaaacaatataaaatctggaaataaagactcctctgcaattaatggtgataatacatccaaaaaatccgagaaaggtgatgaacttgtgcaggcggaggatgaaagaaaagaagatgctgagaatgaaaaattagaattggatttgaaattttctgatttaagagcagagataaactccttgagttccactataaaagaccttgaaaatatcagaagggaaaacgaggaagagctcatcaaaacacgttctgaggtatccaatttaaaaaagcaacagatagcagcagcagaccaagacccagatttcaagagttatgaccatgagtccttattagcaaaaattcaacatttgactgaacaaaacgcagaattatctgagatcaatagttcctttttatccaaatttcaagttttagccaaagagaaagaaatatatacgaagaaggtcagagaagaattccagaaaagtctcgactccttagtagaaatgaacagttctttggaaaaggacgttgtaagaataagaacggctcgtgatgatttattaagcaaaatcgccattttggaagctgaaaaatccaagactgaagtgttgagcgatttacaacatgcaattgatattttgaaggagcaatggacaaaaattgatcaaagatctaacgatacaaaatcctcttctactcaagatgcattaataaaggaaattcaagacttagagaagggttttagagagttatccgacttaactcataaaaagtactctgagattattaatcacgaatctgttatatccaagcttaccgtagaaaaaactaaggctgatcagaaatattttgccgcgatgaggtccaaagattctattttaattgaaatcaaaactctttctaaaagcctcagtaaatctaatgagcttattttacagttaaaggactctgatagattgttacagcaaaaaataggaaatttacataaacaattggatctttctcaaaataatgaacgcaggttaattgattccagtaaaacagagacattaaaaataattgatttaaataatacatccactaaattgaaaaggtctttagaaaagttacaagaagaaagtaacaaaagcattgcagatatgacgcatttggaaactaaattaaatgatacagaaatagaattgaagcacttcaagcagaaggcatctcatttggaatccaagtgtgaaaaattgcatgatacattgttccgtggtaacaacaaaaataagggcagtagcgatgaagcactcgtagaagaattggcaaatttccgtacacttgtttattgttccttatgttctaaaaattggaaaaacatggctattaaaacctgtggccatgtcttttgtgagaattgctgtaaggaaagattggcagcgagaatgagaaaatgccctacatgcaacaaagcattcagttccaatgatttattgacagtgcacttgtga

SEQ ID NO: 1671 - DNA, 2955 bp, Saccharomyces cerevisiae
atgggtcctgccatacataatcaactatatgaatgtggattaaagactacgtctcaagatggcttcttgatggacaattatgaaactcaattatttcaatcgttgaacaggtttatcaatttcataaacaatgctaatcagtcagctagtaataaagaacaaaatacaaaattttgcaaatcctcctcaaattttttacgcttgaaactactaacggttctaagacaatggtgtgattcttcacgaagcaactgtacactggaggttagagatgttttgacccaatggtgggtcacacttttaaactttctaaattctgacacctcgcttcaaatagatactgcccttgaattgagcttgagcatagaactaacttccgtgtgtctcgagtgcctcagcaaaattatgaccatactaataatattgcctttccattcatccagagacatggaaatatactcacatcatcttttgctgaccattcattgcataacaaacaagttgattttgatttctaaaaactccaaaaaacttaaacgtacaaatagtgatgacaagtgctctataaacgacaagaagctgcaataccttaacaaatattcttccttgctgcgagcattcatcgggaagttaaatgcttacgcatttttttatctaccagaagactttcatttcgatacaattttgttattgacagtttctcctcaaatctcttcaagtattcaaacatctttgttttcatggaagaagagacaatataaattcaccgacgatcagggacaaatgatccgcactgaagcttttgaaaataaagatactaaattttttaagatcattgtttcttatattaaaaatgattttgtacttatgtcattttattggcactattggtatatcatacttcaatttatgaaattctctgattcagatgtaggaattaaaaaatcgacattgtcatgcatacctggctcagaaattttattgacgcatgtaaccactagattcttgaattcagatttgaataaattcacgcggattattaaacaaacgccgaatccaaggatagcaaatgagaatgtgacagagtcacatccaaatttcaagagtttgaatagtagcaatgctttaattacatctgaaaggattaatgattacgtattttctaattttaagacaatcaaattatgggaatgtcttagaagcctttcaggatgcattcttaaagaaaatcatccggaatacctggaaaatatgctttccttacatgagtctctattgatagactatgtctccactatttcagcgtacgattatattgcagcgaacgtcatttacaataaggttctccagtttattattttccagtttgaaagtttaccttctctgaaattcattcaatggaggtcgtggtacaatgggcttttgagtatgttaaggaccaaaaatgttaactgccagactgtttctttattatgccttttcaatatttggaagcacgtaaccattgaggaccgcgatgaaatagtaaaagtgctgttaagtgatttttgggagtcattgatttttgaaaacgaatttcctttgattagaattttatttatgaaggtattagtttttaaaatcattccaagtgttcaaaattcttcttcattacgattcttgccacatgatagaattaaacaactatatgaagagctactggtaaacaaggaggagttatttgagatgcaaaaacacgattcaaatgatatagtggcgcatagaaagaatgctctcgtttttaatggtaactcacgtttgatgatgattccaaaaaaaccaaatacagaggaccacttagtttataagattaatcatgataaaaatttaactacagaaagatttccctctgtcagctcagtggcaaatacaagacctaacgttatcttgaaaaatggtaaatacgcttatgatattttggacgaaatgacaagtaaagctgcctttcttcttgcagaaaagaagacccgactaaatcccaaaaaaaatcacaaaattatggatggctacgaaggaggtcaggaaaacgaagataatgatgaagactcagaagatagtggctcgcataaaaataagagaaaggaaggtaatagttctttatcggcaacactgaacacttggctttcaaaattttcaagtacttctgaagattcacagaagaagaaggaacaggcaaatgaattaggcaacgattttgaatatgatgaagatgtggctgattttgcagaaattttgccgaagcagtcatctagtaatattgaaaaaatttttaagcatggtaacaattcaggatcaatggtatcatataattcaagtatcaagctcaataggagggagaatatattgataggtccaccagagttgagattttctaatgaaatcaaggaacacaatagtattgctacaatattcaaactggtatttattcaaaccaatagaagagtcgtcgaaaaaatagatttggcgaacatgaaatgggggacaatccacggaggcagtaagtacatgaagcctttacccgtcccgaaagatttggttgcgagtgttgctaagaacgaaagtgagacgagaaacttagctaccttatgcggtaatggtctagattttgagataccggtgcctgattttaatatttttggcaaatgtatggaagatgagcaagatgtagccaaaattggtaatcagaatgtggaagatttgaaagttactggggggcgggaggtgacaatttggaagcagatccaagatatgaagttgagaacaaggatacaaaaaatctgtgttttaattgagacgttcaatgctacagtaagagaatattttgagttttccaatcgattagagcatgacggtatatttatagattttgaagtgaggaaacctagtagtaataattctattaatatcaaagtctga

SEQ ID NO: 1672 - DNA, 2955 bp, Artificial Sequence
  Description of Artificial Sequence: Synthetic polynucleotide
atgggtcctgccatacataatcaattatatgaatgtggattaaagactacgtctcaagatggcttcttgatggacaattatgaaactcaattatttcaatctttgaacaggtttatcaatttcataaacaatgctaatcagtctgctagtaataaagaacaaaatacaaaattttgcaaatcctcctctaattttttacgcttgaaattattgacggttttgagacaatggtgtgattcttctagaagcaactgtacattagaggttagagatgttttgacccaatggtgggtcacacttttaaactttttgaattctgacacctctcttcaaatagatactgcccttgaattgagcttgagcatagaattgacttccgtgtgtctcgagtgcctcagcaaaattatgaccatattaataatattgcctttccattcttccagagacatggaaatatactctcatcatcttttgttgaccattcattgcataacaaacaagttgattttgatttctaaaaactccaaaaaacttaaacgtacaaatagtgatgacaagtgctctataaacgacaagaagttacaataccttaacaaatattcttccttgttaagagcattcatcgggaagttaaatgcttacgcatttttttatttaccagaagactttcatttcgatacaattttgttattgacagtttctcctcaaatctcttccagtattcaaacatctttgttttcttggaagaagagacaatataaattcaccgacgatcagggacaaatgatccgcactgaagcttttgaaaataaagatactaaattttttaagatcattgtttcttatattaaaaatgattttgtacttatgagtttttattggcactattggtatatcatacttcaatttatgaaattctctgattctgatgtaggaattaaaaaatctacattgtcttgcatacctggctctgaaattttattgacgcatgtaaccactagattcttgaattctgatttgaataaattcacgagaattattaaacaaacgccgaatccaaggatagcaaatgagaatgtgacagagtctcatccaaatttcaagagtttgaatagtagcaatgctttaattacatctgaaaggattaatgattacgtattttctaattttaagacaatcaaattatgggaatgtcttagaagcctttctggatgcattcttaaagaaaatcatccggaatacttggaaaatatgctttccttacatgagtctttgttgatagactatgtctccactattagtgcgtacgattatattgcagcgaacgtcatttacaataaggttctccagtttattattttccagtttgaaagtttaccttctttgaaattcattcaatggaggagttggtacaatgggcttttgagtatgttaaggaccaaaaatgttaactgccagactgtttctttattatgccttttcaatatttggaagcacgtaaccattgaggaccgcgatgaaatagtaaaagtgttattaagtgatttttgggagtctttgatttttgaaaacgaatttcctttgattagaattttatttatgaaggtattagtttttaaaatcattccaagtgttcaaaattcttcttctttaagattcttgccacatgatagaattaaacaattatatgaagagttattggtaaacaaggaggagttatttgagatgcaaaaacacgattctaatgatatagtggcgcatagaaagaatgctctcgtttttaatggtaactctcgtttgatgatgattccaaaaaaaccaaatacagaggaccacttagtttataagattaatcatgataaaaatttaactacagaaagatttccctctgtcagctctgtggcaaatacaagacctaacgttatcttgaaaaatggtaaatacgcttatgatattttggacgaaatgacaagtaaagctgcctttcttcttgcagaaaagaagaccagattgaatcccaaaaaaaatcacaaaattatggatggctacgaaggaggtcaggaaaacgaagataatgatgaagactctgaagatagtggctctcataaaaataagagaaaggaaggtaatagttctttaagtgcaacattgaacacttggctttctaaattttctagtacttctgaagattctcagaagaagaaggaacaggcaaatgaattaggcaacgattttgaatatgatgaagatgtggctgattttgcagaaattttgccgaagcagtcttctagtaatattgaaaaaatttttaagcatggtaacaattctggatccatggtatcttataatagtagtatcaagctcaataggagggagaatatattgataggtccaccagagttgagattttctaatgaaatcaaggaacacaatagtattgctacaatattcaaattagtatttattcaaaccaatagaagagtcgtcgaaaaaatagatttggcgaacatgaaatgggggacaatccacggaggcagtaagtacatgaagcctttacccgtcccgaaagatttggttgcgagtgttgctaagaacgaaagtgagacgagaaacttagctaccttatgcggtaatggtttggattttgagataccggtgcctgattttaatatttttggcaaatgtatggaagatgagcaagatgtagccaaaattggtaatcagaatgtggaagatttgaaagttactggggggcgtgaggtgacaatttggaagcagatccaagatatgaagttgagaacaaggatacaaaaaatctgtgttttaattgagacgttcaatgctacagtaagagaatattttgagttttccaatagattagagcatgacggtatatttatagattttgaagtgaggaaacctagtagtaataattctattaatatcaaagtctga

SEQ ID NO: 1673 - DNA, 612 bp, Saccharomyces cerevisiae
atgtcattatattacaccttggtttttgccattctagtggtggagattttcatgttctccattctagccctaccaatcccttctagataccgtaggcctctcaccttactgttattaaagccgttcaaatcctccacagtgcaagttgcgatcaagtgtgtacttgggttcattcttttgcttttcatcgattgtatcaacagagtgtacagcatcgacaaagagctgcagttaagtagcgcctctcaaaataatggcgctataatcgctcaagatagaattgaggttctttctaggaaattctttgcccaaaggaatatgtatttgacaggtataactttgtttttgacctttgtcgtcgttaggacttttgggctagtcatagaacttttaaccatgaaagacatatacagagcatcgcctccagtagcctccagcgatgtcaagaagaacgactctgttactgccgaagctgctgctcaatccggcgcttccaaggatgaccacggcgatgagaaaaattttgaactattgaagaaaattcaggacatcgatgacgaaattgcacgtttaaaggagaagtcggaatcgttgcaagaagaaataaattag

SEQ ID NO: 1674 - DNA, 612 bp, Artificial Sequence
  Description of Artificial Sequence: Synthetic polynucleotide
atgtctttatattacaccttggtttttgccattttggtggtggagattttcatgttctccattttagccttaccaatcccttctagataccgtaggcctctcaccttattattattaaagccgttcaaatcctccacagtgcaagttgcgatcaagtgtgtacttgggttcattcttttgcttttcatcgattgtatcaacagagtgtacagcatcgacaaagagttacagttaagtagcgcctctcaaaataatggcgctataatcgctcaagatagaattgaggttctttctaggaaattctttgcccaaaggaatatgtatttgacaggtataactttgtttttgacctttgtcgtcgttaggacttttgggttagtcatagaacttttaaccatgaaagacatatacagagcatctcctccagtagcctccagcgatgtcaagaagaacgactctgttactgccgaagctgctgctcaatccggcgcttccaaggatgaccacggcgatgagaaaaattttgaattattgaagaaaattcaggacatcgatgacgaaattgcacgtttaaaggagaagtctgaatctttgcaagaagaaataaattga

SEQ ID NO: 1675 - DNA, 1917 bp, Saccharomyces cerevisiae
atgtctcgtactaacatggatacaagacacgcacattctgctttactggcagcaccacagagtgctactgcaaatagcaggagcagcaacagcagcagcgagagtagtagtaacaaaaacaatatcaatgtcggcgtcggtgacgatagcggtaatgtcagcgcggtaagtatcgacgatggaccccacttcagggatatcttccactatggacacgaggaaaattacaaacttgcgagcagcggtatcactaacctgaattcttcatcccacgcccaccaaactttgtctcccatttccattagtaatgcatccactccggaaagttttcccgagcaccctttgggcctagaacgggaaacagagccggcgttggaagctgaaatggaagcggaggaactaccaccacaccaaagtaaataccttttaagctccattaaggcgaccaaacgattaaaagatgctagaccgtttctgaagccggttgatcctattgctttgaacatcccgcattatttcaactacgttcaaaccccaatggatttgtctttaattgaaacaaaattgcagggcaacgtgtatcattcagtagagcaagtcacatcggacttcaaaacaatggtggataattgtttaaactttaatggtccagaatcttcaatctcttcgatggctaaaaggattcaaaagtattttgaaaaaaagttatctgcaatgccaccaagagttttacccgcttctgccttgaagaaaacaagcagaaaccggaaaaaaaatgaggatatggattccccacttgtcattagacgttcagttagtaccaccaatgacaatattggggaaagcggaaatagagaaggcgtcagtggtggtagacccaaaagaacaattcatccacccaaatcaaaagatttgtttgatatatatgaaaactccaaaccaaaatcaaagactttacaaaaaaaattcaggacttgtctgaaaatactaaaggttttgatgagtaaaaaaaattcggatataaattttccctttttacaacctgttgatccgattgctttgaatctaccaaattactttgatgtcgtgaagaatcctatggatttgggtacaatatcaaataatttaatgaactggaagtacaaaacaattgatcaatttgtcgacgacctcaaccttgtcttttataattgtttccaattcaatccagaaggcaatgaagtccattcaatgggcaaaaaactaaaagagcttttcaattttcattggttagagaaccaggatattttgaatgaaattgaaacggattcagatcttgaagaggataactattcttcttcatattcatctgatgatgaatatgatgatgaagacataaatgaaaacgatataactaatccggctattcaatatttggaacaaaaactgaagaaaatggaggttgaattgcaacaattgaaaagacaagagttaagtaaattatcgaaggaaaggaagaggaagcatctaggtaaaacgcttttgcgtaggaaggcaatgaagcattcagttgacgatttaaagaaatctattactgataaaatcaatgaattaagtgatttagaaatgaatgggatgattcgtatcattaaaaattcattacccgcagatgaaatactaacttccaatgaagatgaaattgaaattgatttggatattttagatgaagcgactattgcaagaatttatgagagatattttgagaaaaaaaataacaacaatagcaaaagaaaactaagtggcaactactcgactgcgccaactaacaagaaaaagaaaaccttgaaatttttggaaaaggatgaaatcataaataataataattattccgattctgaagaagacagtagtgatagtagcgacagtgacagtgattaa

SEQ ID NO: 1676 - DNA, 1917 bp, Artificial Sequence
  Description of Artificial Sequence: Synthetic polynucleotide
atgtctcgtactaacatggatacaagacacgcacattctgctttattggcagcaccacagagtgctactgcaaatagcaggagcagcaacagcagcagcgagagtagtagtaacaaaaacaatatcaatgtcggcgtcggtgacgatagcggtaatgtcagcgcggtaagtatcgacgatggaccccacttcagggatatcttccactatggacacgaggaaaattacaaacttgcgagcagcggtatcactaacttgaattcttcttcccacgcccaccaaactttgtctcccatttccattagtaatgcatccactccggaaagttttcccgagcaccctttgggccttgaaagagaaacagagccggcgttggaagctgaaatggaagcggaggaattaccaccacaccaaagtaaataccttttaagctccattaaggcgaccaaaagattaaaagatgctagaccgtttttgaagccggttgatcctattgctttgaacatcccgcattatttcaactacgttcaaaccccaatggatttgtctttaattgaaacaaaattgcagggcaacgtgtatcattctgtagagcaagtcacaagtgacttcaaaacaatggtggataattgtttaaactttaatggtccagaatcttctatctcttctatggctaaaaggattcaaaagtattttgaaaaaaagttatctgcaatgccaccaagagttttacccgcttctgccttgaagaaaacaagcagaaacagaaaaaaaaatgaggatatggattccccacttgtcattagacgttctgttagtaccaccaatgacaatattggggaaagcggaaatagagaaggcgtcagtggtggtagacccaaaagaacaattcatccacccaaatctaaagatttgtttgatatatatgaaaactccaaaccaaaatccaagactttacaaaaaaaattcaggacttgtttgaaaatattgaaggttttgatgagtaaaaaaaattctgatataaattttccctttttacaacctgttgatccgattgctttgaatttaccaaattactttgatgtcgtgaagaatcctatggatttgggtacaatatccaataatttaatgaactggaagtacaaaacaattgatcaatttgtcgacgacctcaaccttgtcttttataattgtttccaattcaatccagaaggcaatgaagtccattctatgggcaaaaaattgaaagagcttttcaattttcattggttagagaaccaggatattttgaatgaaattgaaacggattctgatcttgaagaggataactattcttcttcttattcttctgatgatgaatatgatgatgaagacataaatgaaaacgatataactaatccggctattcaatatttggaacaaaaattgaagaaaatggaggttgaattgcaacaattgaaaagacaagagttaagtaaattatccaaggaaaggaagaggaagcatttaggtaaaacgcttttgcgtaggaaggcaatgaagcattctgttgacgatttaaagaaatctattactgataaaatcaatgaattaagtgatttagaaatgaatgggatgattcgtatcattaaaaattctttacccgcagatgaaatattgacttccaatgaagatgaaattgaaattgatttggatattttagatgaagcgactattgcaagaatttatgagagatattttgagaaaaaaaataacaacaatagcaaaagaaaattaagtggcaactactccactgcgccaactaacaagaaaaagaaaaccttgaaatttttggaaaaggatgaaatcataaataataataattattccgattctgaagaagacagtagtgatagtagcgacagtgacagtgattga

SEQ ID NO: 1677 - DNA, 690 bp, Saccharomyces cerevisiae
atgttgaggacaaaagtgtttgcaactactgttgctcgaatatctgggattcgcaggtatattcccatcagaactataaacacggtgacgaaaaagaatattagtaagatagaaaaactgtgtgaagtccttgaagttaatcctgacggatataaaggaaaggaacgcataccgactaaagaactaactaaactgctatataccacaagcaggaatatgttggtacgagtaccaatgactggagacttgagcacaggaaatacatttgaaacaagaaacgaaactttacaaaaattgggtgaacagctcattcacttggaaattaataagatgcttacaataacatttacgaatttcaatcagtttaatataatgaacaaaaacttcaattacattcataacttagatcgagctcgagtagtgaacatggactcgataagctggcttatcaagaattcgttgaaaattaaccaattagctcatttgcgaatacctgccaatttgccgaaggaaatgggattaacttccagctctaatgattttcagaacttgaacgattggaaagtgatcttatcctttattggttacctgaaattactcgaaattaaaaacgataacaaaaaattcattgaatcaattataaaaactatatgcatacctctaattaattaccatttgcgtaaatcatag

SEQ ID NO: 1678 - DNA, 690 bp, Artificial Sequence
  Description of Artificial Sequence: Synthetic polynucleotide
atgttgaggacaaaagtgtttgcaactactgttgctagaatatctgggattcgcaggtatattcccatcagaactataaacacggtgacgaaaaagaatattagtaagatagaaaaattatgtgaagtccttgaagttaatcctgacggatataaaggaaaggaacgcataccgactaaagaattgactaaattattatataccacaagcaggaatatgttggtaagagtaccaatgactggagacttgagcacaggaaatacatttgaaacaagaaacgaaactttacaaaaattgggtgaacagctcattcacttggaaattaataagatgcttacaataacatttacgaatttcaatcagtttaatataatgaacaaaaacttcaattacattcataacttagatagagctcgtgtagtgaacatggacagtataagctggcttatcaagaattctttgaaaattaaccaattagctcatttgagaatacctgccaatttgccgaaggaaatgggattaacttccagctctaatgattttcagaacttgaacgattggaaagtgatcttatcctttattggttacttgaaattactcgaaattaaaaacgataacaaaaaattcattgaaagtattataaaaactatatgcatacctttgattaattaccatttgcgtaaaagctga

SEQ ID NO: 1679 - DNA, 180 bp, Saccharomyces cerevisiae
atgactattgctccaattactggtacgatcaagagaagagtcatcatggacatcgtcctcgggttctccctcgggggtgtcatggcctcttactggtggtggggattccacatggataagattaacaagagagagaagttctacgcagagctagctgagaggaaaaagcaagagaactga

SEQ ID NO: 1680 - DNA, 180 bp, Artificial Sequence
  Description of Artificial Sequence: Synthetic polynucleotide
atgactattgctccaattactggtacgatcaagagaagagtcatcatggacatcgtcctcgggttctccctcgggggtgtcatggcctcttactggtggtggggattccacatggataagattaacaagagagagaagttctacgcagagttggctgagaggaaaaagcaagagaactga

SEQ ID NO: 1681 - DNA, 1287 bp, Saccharomyces cerevisiae
atgagtatgttatctagaagattattttccacctctcgccttgctgctttcagtaagattaaggtcaaacaacccgttgtcgagttggacggtgatgaaatgacccgtatcatttgggataagatcaagaagaaattgattctaccctacttggacgtagatttgaagtactacgacttatctgtcgaatctcgtgacgccacctccgacaagattactcaggatgctgctgaggcgatcaagaagtatggtgttggtatcaaatgtgccaccatcactcctgatgaagctcgtgtgaaggaattcaacctgcacaagatgtggaaatctcctaatggtaccatcagaaacattctcggcggtacagtgttcagagagcccattgtgattcctagaattcctagactggtcccacgttgggaaaaaccaatcattattggaagacacgcccacggtgatcaatataaagctacggacacactgatcccaggcccaggatctttggaactggtctacaagccatccgaccctacgactgctcaaccacaaactttgaaagtgtatgactacaagggcagtggtgtggccatggccatgtacaatactgacgaatccatcgaagggtttgctcattcgtctttcaagctggccattgacaaaaagctaaatcttttcttgtcaaccaagaacactattttgaagaaatatgacggtcggttcaaagacattttccaagaagtttatgaagctcaatataaatccaaattcgaacaactagggatccactatgaacaccgtttaattgatgatatggtcgctcaaatgataaaatctaaaggtggctttatcatggcgctaaagaactatgacggtgatgtccaatctgacatcgtcgctcaaggatttggctccttaggtttgatgacttctatcttagttacaccagacggtaaaactttcgaaagtgaagctgctcatggtaccgtgacaagacattatagaaagtaccaaaagggtgaagaaacttctacaaactccattgcatccattttcgcgtggtcgagaggtctattgaagagaggtgaattggacaatactcctgctttgtgtaaatttgccaatattttggaatccgccactttgaacacagttcagcaagacggtatcatgacgaaggacttggctttggcttgcggtaacaacgaaagatctgcttatgttaccacagaagaatttttggatgccgttgaaaaaagactacaaaaagaaatcaagtcgatcgagtaa

SEQ ID NO: 1682 - DNA, 1287 bp, Artificial Sequence
  Description of Artificial Sequence: Synthetic polynucleotide
atgagtatgttatctagaagattattttccacctctcgccttgctgctttcagtaagattaaggtcaaacaacccgttgtcgagttggacggtgatgaaatgacccgtatcatttgggataagatcaagaagaaattgattttgccctacttggacgtagatttgaagtactacgacttatctgtcgaatctcgtgacgccacctccgacaagattactcaggatgctgctgaggcgatcaagaagtatggtgttggtatcaaatgtgccaccatcactcctgatgaagctcgtgtgaaggaattcaacttgcacaagatgtggaaatctcctaatggtaccatcagaaacattctcggcggtacagtgttcagagagcccattgtgattcctagaattcctagattggtcccacgttgggaaaaaccaatcattattggaagacacgcccacggtgatcaatataaagctacggacacattgatcccaggcccaggatctttggaattggtctacaagccatccgaccctacgactgctcaaccacaaactttgaaagtgtatgactacaagggcagtggtgtggccatggccatgtacaatactgacgaatccatcgaagggtttgctcattcttctttcaagttggccattgacaaaaagttgaatcttttcttgtccaccaagaacactattttgaagaaatatgacggtagattcaaagacattttccaagaagtttatgaagctcaatataaatccaaattcgaacaattagggatccactatgaacaccgtttaattgatgatatggtcgctcaaatgataaaatctaaaggtggctttatcatggcgttaaagaactatgacggtgatgtccaatctgacatcgtcgctcaaggatttggctccttaggtttgatgacttctatcttagttacaccagacggtaaaactttcgaaagtgaagctgctcatggtaccgtgacaagacattatagaaagtaccaaaagggtgaagaaacttctacaaactccattgcatccattttcgcgtggtccagaggtttattgaagagaggtgaattggacaatactcctgctttgtgtaaatttgccaatattttggaatccgccactttgaacacagttcagcaagacggtatcatgacgaaggacttggctttggcttgcggtaacaacgaaagatctgcttatgttaccacagaagaatttttggatgccgttgaaaaaagattacaaaaagaaatcaagtctatcgagtga

SEQ ID NO: 1683 - DNA, 1029 bp, Saccharomyces cerevisiae
atgaatgaaaacgagtacgataattttgatgatttggatgaccttttagatgaagatcccactaaactggatgaagcagagcccgatgatgtgcaagcgaagggttctgtgtacaacgatagtgaaaacaaagagaagaatgccgaaagtaaggacagtgatggcgtacaggtagctaatgaatctgaagaggacccagaattgaaagaaatgatggtagatttgcaaaatgagttcgcaaatttgatgaaaaataacggtaacgagaataatgtgaagacagaagattttaataaactgattagtgctctagaagaggcagctaaagtacctcatcaacagatggagcaaggatgtagtagtttgaaaagtaacagcactgataaagggaccgtgaatggtagcaatccgggatttaaaaacattgtttccaatacgctagacaggttaaaggaaaatggtaataaagttgatacatccctagccgaagaaaccaaggaatctcaacgcagtggccaaaataataatattgatgatatattgtcacaattattagatcaaatggtagcatctggtggaaaagaaagtgcagaaaatcaatttgatctaaaagatggggagatggacgacgcaataacaaaaatacttgatcaaatgacgtcaaaagaagtattatatgagcctatgaaagaaatgcgtagtgagttcggtgtttggtttcaagaaaacggtgaaaatgaagagcataaggaaaagataggcacctacaagaggcaatttaatatcgtagacgaaattgtaaatatttatgaattgaaagattatgacgagctaaagcataaagatcgtgttactgaacttttggacgaattagaacagcttggtgatagccctattagaagtgcgaacagccccctaaaacacggtaatgaagaagaagaactcatgaaaatgttggaaattgatggtaatgatccgaacttggggaaccttgataaggaattaaccgacggttgcaaacaacaataa

SEQ ID NO: 1684 - DNA, 1029 bp, Artificial Sequence
  Description of Artificial Sequence: Synthetic polynucleotide
atgaatgaaaacgagtacgataattttgatgatttggatgaccttttagatgaagatcccactaaattggatgaagcagagcccgatgatgtgcaagcgaagggttctgtgtacaacgatagtgaaaacaaagagaagaatgccgaaagtaaggacagtgatggcgtacaggtagctaatgaatctgaagaggacccagaattgaaagaaatgatggtagatttgcaaaatgagttcgcaaatttgatgaaaaataacggtaacgagaataatgtgaagacagaagattttaataaattgattagtgctttggaagaggcagctaaagtacctcatcaacagatggagcaaggatgtagtagtttgaaaagtaacagcactgataaagggaccgtgaatggtagcaatccgggatttaaaaacattgtttccaatacgcttgacaggttaaaggaaaatggtaataaagttgatacatccttggccgaagaaaccaaggaatctcaacgcagtggccaaaataataatattgatgatatattgtctcaattattagatcaaatggtagcatctggtggaaaagaaagtgcagaaaatcaatttgatttgaaagatggggagatggacgacgcaataacaaaaatacttgatcaaatgacgtccaaagaagtattatatgagcctatgaaagaaatgcgtagtgagttcggtgtttggtttcaagaaaacggtgaaaatgaagagcataaggaaaagataggcacctacaagaggcaatttaatatcgtagacgaaattgtaaatatttatgaattgaaagattatgacgagttgaagcataaagatcgtgttactgaacttttggacgaattagaacagcttggtgatagccctattagaagtgcgaacagccccttgaaacacggtaatgaagaagaagaactcatgaaaatgttggaaattgatggtaatgatccgaacttggggaaccttgataaggaattaaccgacggttgcaaacaacaatga

SEQ ID NO: 1685 - DNA, 474 bp, Saccharomyces cerevisiae
atgagtagtttgtgtctacagcgtcttcaggaagaaagaaaaaaatggagaaaggatcatccatttggattttatgccaaaccagttaagaaagctgatgggtccatggatttacagaaatgggaagctggtatcccaggcaaagaaggtacaaactgggcgggtggtgtgtacccaattacagtcgaatatccaaatgaatatccttcaaaacctccaaaggttaaatttccagccggattttatcatccaaacgtgtatccaagtggcacaatatgtttaagtattttaaatgaagatcaagattggagacccgccatcacgttaaaacaaattgttcttggggttcaggatcttttagactctccaaatccaaattcccctgctcaagagcctgcatggagatcattttcaagaaataaggcggaatatgacaagaaagttttgcttcaagctaaacagtactctaaatag

SEQ ID NO: 1686 - DNA, 474 bp, Artificial Sequence
  Description of Artificial Sequence: Synthetic polynucleotide
atgagtagtttgtgtttacagcgtcttcaggaagaaagaaaaaaatggagaaaggatcatccatttggattttatgccaaaccagttaagaaagctgatgggtccatggatttacagaaatgggaagctggtatcccaggcaaagaaggtacaaactgggcgggtggtgtgtacccaattacagtcgaatatccaaatgaatatccttccaaacctccaaaggttaaatttccagccggattttatcatccaaacgtgtatccaagtggcacaatatgtttaagtattttaaatgaagatcaagattggagacccgccatcacgttaaaacaaattgttcttggggttcaggatcttttagactctccaaatccaaattcccctgctcaagagcctgcatggagatctttttccagaaataaggcggaatatgacaagaaagttttgcttcaagctaaacagtactctaaatga

SEQ ID NO: 1687 - DNA, 1863 bp, Saccharomyces cerevisiae
atgggcagatcaaagaaaagatcaagagcatcttcgtctcgattaaatccactacgcaaagctgggtcaaatgacaataataaagataccaacgtcgttaataaaaaactccagccgctattgcagaatttgtcaagtgtggtgcctaatgatagaagtattgctttgagttccatcagtgttctttgtgaggatgcacatatgagacaacttttactgaaagagaaattagttcctatcattttgaataaattgctgaacgattctaattcggacatagttgtggagtcgttcggcttattaaggaacttgtctttggaagaaggttatgatgtgtcaatctacctttggagatctgatatatggacaagtataacaagtaattttggcaggattgttgaatcgttatccgctttgcaagcagcagaacagcaaccgcagctaaaacctgcaggaaaatccaaaatagaatctaaaaggttgttattcgattttgccgataacttactgtcgttagtggtggctctgtctaatggatccgacgatattcttaatgagatattaacggaaagtaaaataaatgaaatttttcaggtcatttcacagctattaaaatatggtgtcgagaaactgccaattaatctgttcaataccactcttgatctcatttatgatttgagttccgaatcatttgaatttattgatcatgtttccaacaatgaacttctatcacagttcttaaatgggctatctccggctttacatccacaagctaatgaattaacaaaagttctaattgaaggtatccattgccaattccttgacatgaaaataacttatgatcaatgtaacaaaatgatccactctgtatgtcattccattaataacattgatccagtacagttagttaatgacattaataaccctgtagaaattggacctgctactagtaaagatgaaagcagtaaggttataactaagatcaaggattacaatgcgaaacgtaacgaatccatgataaaattgcaaagcattgaaatagcaattgatcttatcaccgcaatcattgagatagttgcatccaaatatgaatcaccagaatcacaggaagtagcaattccagaggagctaatcaataccttaacaaatttcttacctcacgttttcatgattttgaaagataccttcacctcgcgaatattgatcggatggaacaatctgatctggctctttgtgtctctatctctaacagagctctctggagagttgttaaccaccttatggagttatgttacacagttggacagccaagatgatttgagtattaaaataggaagaatgggctgtatttgggcgcttctgaaactcatctttcctgatggagcgtttgaaagtgagaatcgagcattgatcaatgtccaaatgctgaacaattcaggattcgctaggggaattattgaagagttccaaaataataatgaccttgagttacaacaaaaatgtattaatgtactaagcacatatgctatgattcagggacaaattgatgcaaataaggagattgggcagttcttcatacaaactttaacacagttgaatgttcgccctgaaattttgatagaaatgacaaattcgcttttccaaatttacggggatgcctcttacgactataatgaaccaatatttgtaaggggtggatttttatctattctaaaagaccaagttgtaccaaatttgaggcagcaattcaaaatggttgataaaaacaaaaatcccgaactaaaagaaagatgccatgattgctttactacgttggatagtttcattcactacaaaatgaatgaaaattctactaaccaatag

SEQ ID NO: 1688 - DNA, 1863 bp, Artificial Sequence
  Description of Artificial Sequence: Synthetic polynucleotide
atgggcagatccaagaaaagatctagagcatcttcttctagattaaatccattgcgcaaagctgggtctaatgacaataataaagataccaacgtcgttaataaaaaactccagccgttattgcagaatttgagcagtgtggtgcctaatgatagaagtattgctttgagttccatcagtgttctttgtgaggatgcacatatgagacaacttttattgaaagagaaattagttcctatcattttgaataaattgttgaacgattctaatagtgacatagttgtggagagtttcggcttattaaggaacttgtctttggaagaaggttatgatgtgtccatctacctttggagatctgatatatggacaagtataacaagtaattttggcaggattgttgaatctttatccgctttgcaagcagcagaacagcaaccgcagttgaaacctgcaggaaaatccaaaatagaatctaaaaggttgttattcgattttgccgataacttattatctttagtggtggctttatctaatggatccgacgatattcttaatgagatattaacggaaagtaaaataaatgaaatttttcaggtcatttctcagcttttaaaatatggtgtcgagaaattaccaattaatttattcaataccactcttgatctcatttatgatttgagttccgaaagttttgaatttattgatcatgtttccaacaatgaacttttatctcagttcttaaatgggttatctccggctttacatccacaagctaatgaattaacaaaagttttgattgaaggtatccattgccaattccttgacatgaaaataacttatgatcaatgtaacaaaatgatccactctgtatgtcattccattaataacattgatccagtacagttagttaatgacattaataaccctgtagaaattggacctgctactagtaaagatgaaagcagtaaggttataactaagatcaaggattacaatgcgaaacgtaacgaatccatgataaaattgcaaagcattgaaatagcaattgatcttatcaccgcaatcattgagatagttgcatccaaatatgaatctccagaatctcaggaagtagcaattccagaggagttgatcaataccttaacaaatttcttacctcacgttttcatgattttgaaagataccttcacctctagaatattgatcggatggaacaatttgatctggctctttgtgtctttatctttaacagagctctctggagagttgttaaccaccttatggagttatgttacacagttggacagccaagatgatttgagtattaaaataggaagaatgggctgtatttgggcgcttttgaaactcatctttcctgatggagcgtttgaaagtgagaatagagcattgatcaatgtccaaatgttgaacaattctggattcgctaggggaattattgaagagttccaaaataataatgaccttgagttacaacaaaaatgtattaatgtattgagcacatatgctatgattcagggacaaattgatgcaaataaggagattgggcagttcttcatacaaactttaacacagttgaatgttcgccctgaaattttgatagaaatgacaaattctcttttccaaatttacggggatgcctcttacgactataatgaaccaatatttgtaaggggtggatttttatctattttgaaagaccaagttgtaccaaatttgaggcagcaattcaaaatggttgataaaaacaaaaatcccgaattgaaagaaagatgccatgattgctttactacgttggatagtttcattcactacaaaatgaatgaaaattctactaaccaatga

SEQ ID NO: 1689 - DNA, 171 bp, Saccharomyces cerevisiae
atggctcacgaaaacgtttggttctcccacccaagaagattcggtaaaggttcccgtcaatgtcgtgtctgctcctcccacactggtttggtcagaaagtacgacttaaacatctgtcgtcaatgtttcagagaaaaggctaacgacattggtttccacaagtacagataa

SEQ ID NO: 1690 - DNA, 171 bp, Artificial Sequence
  Description of Artificial Sequence: Synthetic polynucleotide
atggctcacgaaaacgtttggttctcccacccaagaagattcggtaaaggttcccgtcaatgtcgtgtctgctcctcccacactggtttggtcagaaagtacgacttaaacatctgtcgtcaatgtttcagagaaaaggctaacgacattggtttccacaagtacagatga

SEQ ID NO: 1691 - DNA, 2367 bp, Saccharomyces cerevisiae
atggcaggtcattcacacaggtcatcattaaaaaacggacacaaatcttacaaatccaaacatgcttctaaaggtgctttgaaaagattatacaaggggaaagtggaaaaagaacccgtgggcactggcaaaccagacaaacaagtttcaaaattgcaacgtaaaaacaaggcaaaacaattaagggcccaaaggatcttggattccattgaaaacaggaaattattcgaaggaaaaaatggcgctgccaaaatcattactattgttccgttagtgaatgatttagacccattggacattctttacaagctattaaagtgtgcagatgatgaaggaatcatggtgcaggaagtagactcaaaacgtatatttaatgttcatataaagaagtttaaaagcaatcttaaaatcataattccagacatgaccaattttttgaacattttagattgcgctaaagtagcagactttgttgtgtttgggctcagtggtgtccaagaagtcgatgaagaatttggtgagcagatcatccgtgcgttagaactacaaggtattgcttcatatatcggtgtcataagcaacctctcagcagtccatgaaaaggagaaattccaattggatgtcaagcaatccttagaaagttatttcaagcactttttcccaagtgaagaacgtgtttataatttggaaaaaaactcagacgctttaaacgtcttgagaacattgtgccagaggctaccaagatcaatcaattggagagacaatagaggttacgtagtcgctgactttgttgatttcgttgaaacctctcccgattctggtgacctggtaattgaggggaccgtccgtggtattggcttcaacgccaatagactggtccatattcctgattttggtgacttccaactgaataagatagaaaaaatcagtgaatcttcgcagaaaaggaaaataataaaggaaaaagctacagatagtctgagcttagagctggatttacaaacagttttcgaaagtaatatgaatagagatactttggacgaatatgccccagaaggcacggaagattggtcagattatgacgaggattttgagtacgacggtttgacaaccgcgagatacgacgaccatggcttcttgccagggagggaacaaacatcaaaaaaggcggcagttcctaagggaacttctgactatcaagcgaagtggtacttggatgacgtcattgacgcaaatgaggaagaagaggcagaacagaccaatggaaaggatgagacaatgatggaaattgatgatgaaatgatggtggagcaagacaatgaagaggtagcaggcgacgaagaatatgacatagaggataatgaaggatttgaagagctttcacccgaagaagaagaacgtcaactgagggaatttagagatatggaaaaggaggacagagagttccccgatgagatcgaactagagcccagtgaatctgccatcgaacgtttgaaaaggtatagaggtttgaaaaacttatacaactgtgattggcaagttgatgaaaaggacccatcatcaccagcggaatggaaacgtctattaaggattggcaattacaaaaacactaaaaacagaatcataaaggaaaccaagaatgaagcacaggccattgcaggtgatcgtattaggatgttcatcaggtttcctaagtttctgcttgaaaagattcaagatcctaaacaactattatttgctgtctacggattactacttcatgaacacaaaaatgcggtagtcaacttctctctacaaagatgggaacaatatgacaaacctgtgccttctcaggagcctatcgtagtacaatacggtgttagaagatacactattcaacctctattttctcaaggctctaacagtcctaataatgttcacaagtatgaaaggtttctgcatccagatacagtatcagttgccacatgtattgctcccgtagatttcacccagtcacctgcaatttttttcaagccatcaccaacagatgccaaaaatattgaattgattggtcacggtacattcctgaatgcagaccattcaagaatattagcaaagagagccattttgaccggtcatccattcagattccacaaaactgtggttactgtacgttacatgtttttcagaccagaagatgtggaatggttcaagtctatcccactgttcaccaaatcaggtaggtcaggtttcattaaagaaagtttgggtacgcatggttatttcaaggctacatttgatggtaaattatctgcgcaggatgttgttgctatgtccttgtacaaacgtatgtggcccatgccttcgttaccttggaatggtatgtaa

SEQ ID NO: 1692 - DNA, 2367 bp, Artificial Sequence
  Description of Artificial Sequence: Synthetic polynucleotide
atggcaggtcattctcacaggagttctttaaaaaacggacacaaatcttacaaatccaaacatgcttctaaaggtgctttgaaaagattatacaaggggaaagtggaaaaagaacccgtgggcactggcaaaccagacaaacaagtttccaaattgcaacgtaaaaacaaggcaaaacaattaagggcccaaaggatcttggattccattgaaaacaggaaattattcgaaggaaaaaatggcgctgccaaaatcattactattgttccgttagtgaatgatttagacccattggacattctttacaagcttttaaagtgtgcagatgatgaaggaatcatggtgcaggaagtagactctaaacgtatatttaatgttcatataaagaagtttaaaagcaatcttaaaatcataattccagacatgaccaattttttgaacattttagattgcgctaaagtagcagactttgttgtgtttgggctcagtggtgtccaagaagtcgatgaagaatttggtgagcagatcatccgtgcgttagaattacaaggtattgcttcttatatcggtgtcataagcaacctctctgcagtccatgaaaaggagaaattccaattggatgtcaagcaatccttagaaagttatttcaagcactttttcccaagtgaagaacgtgtttataatttggaaaaaaacagcgacgctttaaacgtcttgagaacattgtgccagaggttaccaagatctatcaattggagagacaatagaggttacgtagtcgctgactttgttgatttcgttgaaacctctcccgattctggtgacttggtaattgaggggaccgtccgtggtattggcttcaacgccaatagattggtccatattcctgattttggtgacttccaattgaataagatagaaaaaatcagtgaatcttctcagaaaaggaaaataataaaggaaaaagctacagatagtttaagcttagagttagatttacaaacagttttcgaaagtaatatgaatagagatactttggacgaatatgccccagaaggcacggaagattggtctgattatgacgaggattttgagtacgacggtttgacaaccgcgagatacgacgaccatggcttcttgccagggagggaacaaacaagtaaaaaggcggcagttcctaagggaacttctgactatcaagcgaagtggtacttggatgacgtcattgacgcaaatgaggaagaagaggcagaacagaccaatggaaaggatgagacaatgatggaaattgatgatgaaatgatggtggagcaagacaatgaagaggtagcaggcgacgaagaatatgacatagaggataatgaaggatttgaagagctttctcccgaagaagaagaacgtcaattaagggaatttagagatatggaaaaggaggacagagagttccccgatgagatcgaattagagcccagtgaatctgccatcgaacgtttgaaaaggtatagaggtttgaaaaacttatacaactgtgattggcaagttgatgaaaaggacccatcttctccagcggaatggaaacgtttattaaggattggcaattacaaaaacactaaaaacagaatcataaaggaaaccaagaatgaagcacaggccattgcaggtgatcgtattaggatgttcatcaggtttcctaagtttttacttgaaaagattcaagatcctaaacaattattatttgctgtctacggattattacttcatgaacacaaaaatgcggtagtcaacttctctttacaaagatgggaacaatatgacaaacctgtgccttctcaggagcctatcgtagtacaatacggtgttagaagatacactattcaacctttattttctcaaggctctaacagtcctaataatgttcacaagtatgaaaggtttttacatccagatacagtatctgttgccacatgtattgctcccgtagatttcacccagtctcctgcaatttttttcaagccatctccaacagatgccaaaaatattgaattgattggtcacggtacattcttgaatgcagaccattccagaatattagcaaagagagccattttgaccggtcatccattcagattccacaaaactgtggttactgtacgttacatgtttttcagaccagaagatgtggaatggttcaagtctatcccattattcaccaaatctggtaggtctggtttcattaaagaaagtttgggtacgcatggttatttcaaggctacatttgatggtaaattatctgcgcaggatgttgttgctatgtccttgtacaaacgtatgtggcccatgccttctttaccttggaatggtatgtga

SEQ ID NO: 1693 - DNA, 717 bp, Saccharomyces cerevisiae
atgacgatacaagcgaagcccagttcgagcatatcgtatgattcgactacatacggcacagcaccgggcttggatataaaagagttccaaatcatcgaagattggaatggaagacctgccagcgcttggtcggtgcagaggattgggcttctacagtccaagatcgaaaggtacacgtacaatatttaccacaataataaatatgggaagcacaacttatctaagctgataccagggcatgctctcattcagttcgctaatgaaacattcgggtatgatggttggcgaatggatgttatagatgttgaggcccgggagtgccagcccttcaccgcagtaaataatggagaaaacaccaacactagtgaggtcaagtatacagttgtggcagaagcccaagtaaaggttaccttaaaggatggcaccaacacacagtgtggtgggctaggtagaattactttgtcctcgagaggtgaatgttataacaggtcgaaaaaagaggctgtaggcgatgcgttaaagaaggcgttattgagctttgaaaaaatcatactcgattatgagactaagattacaaataattactatgtcgatggcttgtatggctcaaaaaaaattaaaaatgaagctaacaccaattacaacttattgtcagcgactaatagcaagccgacttttatcaaattggaggatgctaaaggcacgcatatcaaataa

SEQ ID NO: 1694 - DNA, 717 bp, Artificial Sequence
  Description of Artificial Sequence: Synthetic polynucleotide
atgacgatacaagcgaagcccagtagtagcatatcttatgattctactacatacggcacagcaccgggcttggatataaaagagttccaaatcatcgaagattggaatggaagacctgccagcgcttggtctgtgcagaggattgggcttttacagtccaagatcgaaaggtacacgtacaatatttaccacaataataaatatgggaagcacaacttatctaagttaataccagggcatgctctcattcagttcgctaatgaaacattcgggtatgatggttggagaatggatgttatagatgttgaggccagagagtgccagcccttcaccgcagtaaataatggagaaaacaccaacactagtgaggtcaagtatacagttgtggcagaagcccaagtaaaggttaccttaaaggatggcaccaacacacagtgtggtgggttaggtagaattactttgtccagcagaggtgaatgttataacaggtccaaaaaagaggctgtaggcgatgcgttaaagaaggcgttattgagctttgaaaaaatcatactcgattatgagactaagattacaaataattactatgtcgatggcttgtatggctctaaaaaaattaaaaatgaagctaacaccaattacaacttattgagtgcgactaatagcaagccgacttttatcaaattggaggatgctaaaggcacgcatatcaaatga

SEQ ID NO: 1695 - DNA, 5373 bp, Saccharomyces cerevisiae
atggacatcattcaaggactgatacagcaaccaaaaattcaatctgtggatgaaaccattccgacgttgtgcgatcgagttgagaactccactttgattagcgataggagatccgctgtgctgggattaaaggcatttagccggcagtatagagaatcagtgattgcatccgggctaaaaccgttgctcaatactttgaaacgtgattatatggatgaagattcggtaaaggctatattagaaacaattttgattcttttcatcagaggcgatggccatgacgacttaactagaggttggatttctcaacaatcgcggttgcagaatggcaagtatccctcaccattggtgatgaagcaagaaaaggaacaagtagatcagttctcgttatggattgctgatgctttgacgcagtctgaagatttaattcacctacttgttgaattttgggaaatcgataatttccatattagattgtacacaattcaattactagaggcagtgatggccacgaggccgttgaaggcgagaagtgctttgatttcacttccaacgagcatatccacaatggtctcactcctagatgacatgcatgagcccatcagggatgaagctattttattattaatggcagtagtgaacgattcacctcacgttcaaaaattggttgcttttgaaaacatttttgaaaggctcttttccatcatcgaagaagaaggtgggttaagaggctctctcgtcgtcaatgattgtttatcgttgatcaataacatcctgaagtataacacttctaatcaaactttattccttgagacaggaaacttgccaaaactggcacaccttttgagtgaaccaatatctcaagatgaagtttttttttggaatgatcaaaggatagttaatatcaatacagctttagatatcgtcagcctaacagtagagccaggaaatactgtcaccactaagcatcaaaatgcgttgcttgactcaagcgtattaatggttgtgttgcgacttgcattctttcataatatcccaaaaaaagttagaccggttgctcttttgactgccgcaaacatggttagaagtaatgaacatgcacagctagagtttagtaagatcgatgttccatatttcgatccttcattacctgtaaactctactgcaaacggtggtccaattaaattaattcctgtagtcagcatcttgataaattggatgctctatgccaactccgttcacacgtttgatacaagagttgcgtgttctagactattaaaggcttatttcatggataattttgatcttcaaagagattttttactaaaacaagtccaattgtgtaataattcaacaaataatgtcggcgacaatgctaaagaaaatggtggttctaacaaatctgataaagaaagtgattcagataaagataccgacgggaaggatggcactgaatatgaaggttctttcaaggcaaatctattcgaagtcctgttaaattatgacgcagaattgaatctgaacccttttaaattattcttcacaactgatatttttatgttttttttccaacaggatcacaaatatagcgaagaactacgtgaaataacaagaaatgttaccaccggtaacgatctcgaagacgaagaacccttaaaggcaattcaaacaataagtgaattgctaactacttcccttactgctgctgacataagaattcctatttcctacttaacgttcctaatatattggctctttggcgactttaaggccacgaacgattttctttcggataaatccgtgattaaatccttgctttccttctcttaccaaattcaagatgaagacgttactatcaaatgccttgtaacaatgttactaggtgtggcatacgagttttcctcgaaagaatctccattcccaagaaaggaatacttcgaattcatcactaaaactttgggaaaagacaattatgcttctcgaatcaaacaatttaaaaaagattcatatttctcaaaagttgatatgaatgaagacagtatactaactccggagcttgatgaaactggtttaccaaaagtttatttcagcacttacttcatacagttatttaatgaaaacatatacaggatcagaactgcattgtctcacgaccctgacgaagagccaatcaataaaatatctttcgaagaagtcgaaaaattacagaggcaatgtacaaaattgaagggtgagataacttctttgcaaacagaaacggaaagcacccatgagaacctcaccgaaaaattgattgcgttgactaatgaacacaaagagttggatgagaaataccaaattttgaattcctcacattcttcgttgaaagaaaacttttccattttggaaactgaattgaagaacgtcagagattccttggatgaaatgacgcaactgagagatgtactggaaactaaggacaaagaaaatcaaactgctttactggagtacaaaagcacaatccacaaacaagaagactctatcaaaactttagaaaaaggacttgaaactattttgtctcaaaagaaaaaggcagaagatggtataaacaaaatgggtaaagatttattcgctctgagtagagagatgcaagcagttgaggagaattgtaaaaatttacagaaggaaaaagataaaagcaatgtcaaccatcagaaagagactaaatcactaaaagaagatattgcggcaaaaattactgaaataaaagctatcaatgaaaatctggaagaaatgaaaattcaatgtaataatttatcaaaagaaaaggaacatatttcgaaggaacttgttgagtacaaatcccgctttcagagtcatgacaatctagtagcgaaactaacagaaaaattgaaatccttagcaaataactataaggatatgcaagctgaaaatgagtctctaataaaagctgtagaagagtcaaaaaacgaaagcagcatacaattgtctaatttgcaaaataaaattgattctatgtcacaggaaaaagaaaattttcaaatagaaagaggcagtatagaaaaaaatatcgaacaactaaaaaaaaccatctctgacttagaacaaacgaaggaggaaattatctcaaaatccgattcttcaaaagatgaatatgagtcccagattagtctcttgaaagaaaaattagaaacggcgacaacagcaaacgatgaaaacgtgaataaaatctcagaattgactaaaactagggaagagctggaagccgagttagcagcttataaaaatctcaaaaatgaacttgaaacaaaactagaaacttcagagaaagctttgaaagaagttaaagaaaacgaggagcatttaaaagaagagaaaattcaactcgagaaggaggccactgaaaccaaacagcaactcaacagcctacgtgccaatttagaatcattagaaaaagagcatgaagatttagcagctcagttgaagaagtacgaggagcaaattgccaacaaggaaaggcaatataacgaggaaatatctcaattaaatgatgagattacttccactcaacaagaaaatgaatcaattaagaaaaaaaatgacgaactggagggcgaagttaaagcaatgaagagcacttcagaggaacaatcaaatttgaaaaagtcagagattgatgccttaaatttgcaaattaaagagctgaaaaagaagaacgaaacgaacgaagccagtttattggagtcaatcaaaagtgtagaatcagaaacggtaaaaattaaagaattacaagacgaatgtaactttaaagaaaaggaagttagtgaattggaagacaaactcaaggcctcagaagataagaactctaaatatttggagctacagaaggaatcggagaagataaaagaagaactagatgctaaaacgactgaactaaaaattcaattggaaaagatcactaatttatctaaggccaaggagaaatcagaatctgagttgtctagattgaagaagacatcttctgaggaaagaaaaaatgcagaggagcaattggaaaaattgaaaaatgaaatacaaatcaaaaatcaggccttcgaaaaggaaagaaagctacttaatgaaggatcttcaacaattacacaagaatattctgaaaagatcaatactttggaagatgaattaattaggctacaaaatgaaaacgaattaaaagccaaagagatcgataatacgaggagtgaactagagaaggttagtttaagcaatgatgagcttttagaagagaaacaaaacacaataaaaagcttacaagatgaaattctttcatataaagacaaaataactagaaatgacgaaaagcttctatcaatagagcgagataataaacgagacctggagagcttgaaagaacaactccgggctgcacaagaatccaaagctaaagttgaagaagggctgaaaaaacttgaggaagaatcttcaaaagagaaagcagagcttgaaaagtctaaagaaatgatgaaaaagctagagagtacgattgagagcaatgaaacggagttgaaatcctcaatggaaaccataaggaaatcagatgaaaaattagaacagtcgaaaaaaagtgctgaggaggatattaaaaacttgcaacatgagaagtcagatttgatatcccgaatcaacgaatctgaaaaggatattgaagaactgaaaagtaaactgaggatcgaagcaaaatctggctctgaactagaaaccgtaaaacaagagctaaataacgcacaagaaaaaataaggatcaacgcagaagaaaatacagttttgaaatctaaattagaagatatagaacgtgaactcaaagacaagcaagccgaaataaaaagtaatcaagaagaaaaagaattactaacttcgcgcctcaaggaattagaacaggaattagatagcacccaacagaaggcacaaaaatccgaggaagaacgtagggccgaagtcaggaagtttcaagtcgaaaagtctcaacttgatgaaaaagccatgttgcttgaaactaaatacaacgatttggtgaataaagagcaagcatggaaaagggatgaagatactgttaaaaagacaaccgattctcagagacaagaaattgaaaagttggctaaagaactggataacttgaaggcagagaactctaagttgaaggaagctaacgaagatcgttcggaaattgatgacttgatgctcttggttactgacctagatgagaaaaacgccaaatatcgctcaaagctgaaggatttgggcgttgaaattagttcggatgaagaggatgatgaagaagatgatgaagaagacgaggaagaagggcaagtggcatga

SEQ ID NO: 1696 - DNA, 5373 bp, Artificial Sequence
  Description of Artificial Sequence: Synthetic polynucleotide
atggacatcattcaaggattgatacagcaaccaaaaattcaatctgtggatgaaaccattccgacgttgtgcgatagagttgagaactccactttgattagcgataggagatccgctgtgttgggattaaaggcatttagcagacagtatagagaatctgtgattgcatccgggttgaaaccgttgctcaatactttgaaacgtgattatatggatgaagattctgtaaaggctatattagaaacaattttgattcttttcatcagaggcgatggccatgacgacttaactagaggttggatttctcaacaaagtagattgcagaatggcaagtatccctctccattggtgatgaagcaagaaaaggaacaagtagatcagttctctttatggattgctgatgctttgacgcagtctgaagatttaattcacttacttgttgaattttgggaaatcgataatttccatattagattgtacacaattcaattattggaggcagtgatggccacgaggccgttgaaggcgagaagtgctttgatttctcttccaacgagcatatccacaatggtctctctcttggatgacatgcatgagcccatcagggatgaagctattttattattaatggcagtagtgaacgattctcctcacgttcaaaaattggttgcttttgaaaacatttttgaaaggctcttttccatcatcgaagaagaaggtgggttaagaggctctctcgtcgtcaatgattgtttatctttgatcaataacatcttgaagtataacacttctaatcaaactttattccttgagacaggaaacttgccaaaattggcacaccttttgagtgaaccaatatctcaagatgaagtttttttttggaatgatcaaaggatagttaatatcaatacagctttagatatcgtcagcttaacagtagagccaggaaatactgtcaccactaagcatcaaaatgcgttgcttgactccagcgtattaatggttgtgttgagacttgcattctttcataatatcccaaaaaaagttagaccggttgctcttttgactgccgcaaacatggttagaagtaatgaacatgcacagttggagtttagtaagatcgatgttccatatttcgatccttctttacctgtaaactctactgcaaacggtggtccaattaaattaattcctgtagtcagcatcttgataaattggatgctctatgccaactccgttcacacgtttgatacaagagttgcgtgttctagattattaaaggcttatttcatggataattttgatcttcaaagagattttttattgaaacaagtccaattgtgtaataattctacaaataatgtcggcgacaatgctaaagaaaatggtggttctaacaaatctgataaagaaagtgattctgataaagataccgacgggaaggatggcactgaatatgaaggttctttcaaggcaaatttattcgaagtccttttaaattatgacgcagaattgaatttgaacccttttaaattattcttcacaactgatatttttatgttttttttccaacaggatcacaaatatagcgaagaattgcgtgaaataacaagaaatgttaccaccggtaacgatctcgaagacgaagaacccttaaaggcaattcaaacaataagtgaattgttgactacttcccttactgctgctgacataagaattcctatttcctacttaacgttcttgatatattggctctttggcgactttaaggccacgaacgattttctttctgataaatccgtgattaaatccttgctttccttctcttaccaaattcaagatgaagacgttactatcaaatgccttgtaacaatgttattgggtgtggcatacgagttttcctctaaagaatctccattcccaagaaaggaatacttcgaattcatcactaaaactttgggaaaagacaattatgcttctagaatcaaacaatttaaaaaagattcttatttctccaaagttgatatgaatgaagacagtatattgactccggagcttgatgaaactggtttaccaaaagtttatttcagcacttacttcatacagttatttaatgaaaacatatacaggatcagaactgcattgtctcacgaccctgacgaagagccaatcaataaaatatctttcgaagaagtcgaaaaattacagaggcaatgtacaaaattgaagggtgagataacttctttgcaaacagaaacggaaagcacccatgagaacctcaccgaaaaattgattgcgttgactaatgaacacaaagagttggatgagaaataccaaattttgaattcctctcattcttctttgaaagaaaacttttccattttggaaactgaattgaagaacgtcagagattccttggatgaaatgacgcaattgagagatgtattggaaactaaggacaaagaaaatcaaactgctttattggagtacaaaagcacaatccacaaacaagaagactctatcaaaactttagaaaaaggacttgaaactattttgtctcaaaagaaaaaggcagaagatggtataaacaaaatgggtaaagatttattcgctttaagtagagagatgcaagcagttgaggagaattgtaaaaatttacagaaggaaaaagataaaagcaatgtcaaccatcagaaagagactaaatctttgaaagaagatattgcggcaaaaattactgaaataaaagctatcaatgaaaatttggaagaaatgaaaattcaatgtaataatttatccaaagaaaaggaacatatttccaaggaacttgttgagtacaaatcccgctttcagagtcatgacaatttggtagcgaaattaacagaaaaattgaaatccttagcaaataactataaggatatgcaagctgaaaatgagtctttgataaaagctgtagaagagagtaaaaacgaaagcagcatacaattgtctaatttgcaaaataaaattgattctatgtctcaggaaaaagaaaattttcaaatagaaagaggcagtatagaaaaaaatatcgaacaattgaaaaaaaccatctctgacttagaacaaacgaaggaggaaattatctccaaatccgattcttctaaagatgaatatgagtcccagattagtctcttgaaagaaaaattagaaacggcgacaacagcaaacgatgaaaacgtgaataaaatcagtgaattgactaaaactagggaagagttagaagccgagttagcagcttataaaaatctcaaaaatgaacttgaaacaaaattagaaacttccgagaaagctttgaaagaagttaaagaaaacgaggagcatttaaaagaagagaaaattcaactcgagaaggaggccactgaaaccaaacagcaactcaacagccttcgtgccaatttagaatctttagaaaaagagcatgaagatttagcagctcagttgaagaagtacgaggagcaaattgccaacaaggaaaggcaatataacgaggaaatatctcaattaaatgatgagattacttccactcaacaagaaaatgaaagtattaagaaaaaaaatgacgaattagagggcgaagttaaagcaatgaagagcacttccgaggaacaaagcaatttgaaaaagagtgagattgatgccttaaatttgcaaattaaagagttgaaaaagaagaacgaaacgaacgaagccagtttattggagagtatcaaaagtgtagaaagtgaaacggtaaaaattaaagaattacaagacgaatgtaactttaaagaaaaggaagttagtgaattggaagacaaactcaaggccagtgaagataagaactctaaatatttggagttacagaaggaaagtgagaagataaaagaagaattagatgctaaaacgactgaattgaaaattcaattggaaaagatcactaatttatctaaggccaaggagaaaagtgaatctgagttgtctagattgaagaagacatcttctgaggaaagaaaaaatgcagaggagcaattggaaaaattgaaaaatgaaatacaaatcaaaaatcaggccttcgaaaaggaaagaaagcttcttaatgaaggatcttctacaattacacaagaatattctgaaaagatcaatactttggaagatgaattaattaggttacaaaatgaaaacgaattaaaagccaaagagatcgataatacgaggagtgaattagagaaggttagtttaagcaatgatgagcttttagaagagaaacaaaacacaataaaaagcttacaagatgaaattctttcctataaagacaaaataactagaaatgacgaaaagcttttatctatagagagagataataaaagagacttggagagcttgaaagaacaactcagagctgcacaagaatccaaagctaaagttgaagaagggttgaaaaaacttgaggaagaatcttctaaagagaaagcagagcttgaaaagtctaaagaaatgatgaaaaagttggagagtacgattgagagcaatgaaacggagttgaaatcctctatggaaaccataaggaaatctgatgaaaaattagaacagtccaaaaaaagtgctgaggaggatattaaaaacttgcaacatgagaagagtgatttgatatccagaatcaacgaatctgaaaaggatattgaagaattgaaaagtaaattgaggatcgaagcaaaatctggctctgaattggaaaccgtaaaacaagagttgaataacgcacaagaaaaaataaggatcaacgcagaagaaaatacagttttgaaatctaaattagaagatatagaacgtgaactcaaagacaagcaagccgaaataaaaagtaatcaagaagaaaaagaattattaactagccgcctcaaggaattagaacaggaattagatagcacccaacagaaggcacaaaaatccgaggaagaacgtagggccgaagtcaggaagtttcaagtcgaaaagtctcaacttgatgaaaaagccatgttgcttgaaactaaatacaacgatttggtgaataaagagcaagcatggaaaagggatgaagatactgttaaaaagacaaccgattctcagagacaagaaattgaaaagttggctaaagaattagataacttgaaggcagagaactctaagttgaaggaagctaacgaagatcgttctgaaattgatgacttgatgctcttggttactgacttggatgagaaaaacgccaaatatcgctctaagttgaaggatttgggcgttgaaattagttctgatgaagaggatgatgaagaagatgatgaagaagacgaggaagaagggcaagtggcatga

SEQ ID NO: 1697 - DNA, 987 bp, Saccharomyces cerevisiae
atggaaaaaaaacatgtcactgtgcaaatacaaagtgctcccccctcctatatcaaattggaagcaaatgaaaaattcgtatatattacaagtacaatgaacggcttatcttatcaaattgcggctatagtttcatacccagaaaagagaaattcatcaactgcaaataaagaagatggtaaattactgtgcaaggaaaataaactagcattgttactacacggaagtcaatctcacaagaacgctatttatcaaactttactagcaaaaaggctggccgaattcggatattgggtactaagaatagattttaggggccaaggtgattcctcagataactgcgaccctggccttggtaggacgctcgctcaggatcttgaagatttgagtacagtataccaaacagtatctgacaggtctcttagggtgcaattgtacaaaactagtacaatatcactggacgtggttgtggcacattctagaggatctcttgccatgttcaaattctgtctaaaattacatgcagctgaatctccattaccgtctcacctgatcaattgcgctggaagatatgatgggagaggacttattgaacgctgcacacgactgcacccgcattggcaagcagaaggtgggttttgggcgaatggtccacgaaatggcgaatacaaagacttttggataccattaagtgagacttatagtatcgctggcgtttgcgttccggaatttgccacgataccacaaacttgttcagtaatgtcctgctatggcatgtgtgatcacatagtgccaattagcgcagcctcaaattatgcaaggcttttcgagggcagacattcattgaaacttattgaaaatgcggaccacaattattatggcattgaaggtgatcccaacgcgctaggcttaccgataaggaggggtagagtcaactactcaccactagtagttgatctaattatggaatacctgcaagatacatag

SEQ ID NO: 1698 - DNA, 987 bp, Artificial Sequence
  Description of Artificial Sequence: Synthetic polynucleotide
atggaaaaaaaacatgtcactgtgcaaatacaaagtgctcccccctcctatatcaaattggaagcaaatgaaaaattcgtatatattacaagtacaatgaacggcttatcttatcaaattgcggctatagtttcttacccagaaaagagaaattcttctactgcaaataaagaagatggtaaattattatgcaaggaaaataaattggcattgttattacacggaagtcaatctcacaagaacgctatttatcaaactttattggcaaaaaggttggccgaattcggatattgggtattaagaatagattttaggggccaaggtgattccagtgataactgcgaccctggccttggtaggacgctcgctcaggatcttgaagatttgagtacagtataccaaacagtatctgacaggtctcttagggtgcaattgtacaaaactagtacaatatctttggacgtggttgtggcacattctagaggatctcttgccatgttcaaattctgtttgaaattacatgcagctgaatctccattaccgtctcacttaatcaattgcgctggaagatatgatgggagaggacttattgaacgctgcacaagattgcacccgcattggcaagcagaaggtgggttttgggcgaatggtccaagaaatggcgaatacaaagacttttggataccattaagtgagacttatagtatcgctggcgtttgcgttccggaatttgccacgataccacaaacttgttctgtaatgtcctgctatggcatgtgtgatcacatagtgccaattagcgcagcctctaattatgcaaggcttttcgagggcagacattctttgaaacttattgaaaatgcggaccacaattattatggcattgaaggtgatcccaacgcgttgggcttaccgataaggaggggtagagtcaactactctccattagtagttgatttgattatggaatacttacaagatacatga

SEQ ID NO: 1699 - DNA, 2502 bp, Saccharomyces cerevisiae
atgtctaaccaaatatactcagcgagatattcgggggttgatgtttatgaattcattcattctacaggatctatcatgaaaaggaaaaaggatgattgggtcaatgctacacatattttaaaggccgccaattttgccaaggctaaaagaacaaggattctagagaaggaagtacttaaggaaactcatgaaaaagttcagggtggatttggtaaatatcagggtacatgggtcccactgaacatagcgaaacaactggcagaaaaatttagtgtctacgatcagctgaaaccgttgttcgactttacgcaaacagatgggtctgcttctccacctcctgctccaaaacatcaccatgcctcgaaggtggataggaaaaaggctattagaagtgcaagtacttccgcaattatggaaacaaaaagaaacaacaagaaagccgaggaaaatcaatttcaaagcagcaaaatattgggaaatcccacggctgcaccaaggaaaagaggtagaccggtaggatctacgaggggaagtaggcggaagttaggtgtcaatttacaacgttctcaaagtgatatgggatttcctagaccggcgataccgaattcttcaatatcgacaacgcaacttccctctattagatccaccatgggaccacaatcccctacattgggtattctggaagaagaaaggcacgattctcgacagcagcagccgcaacaaaataattctgcacagttcaaagaaattgatcttgaggacggcttatcaagcgatgtggaaccttcacaacaattacaacaagtttttaatcaaaatactggatttgtaccccaacaacaatcttccttgatacagacacagcaaacagaatcaatggccacgtccgtatcttcctctccttcattacctacgtcaccgggcgattttgccgatagtaatccatttgaagagcgatttcccggtggtggaacatctcctattatttccatgatcccgcgttatcctgtaacttcaaggcctcaaacatcggatattaatgataaagttaacaaatacctttcaaaattggttgattattttatttccaatgaaatgaagtcaaataagtccctaccacaagtgttattgcacccacctccacacagcgctccctatatagatgctccaatcgatccagaattacatactgccttccattgggcttgttctatgggtaatttaccaattgctgaggcgttgtacgaagccggaacaagtatcagatcgacaaattctcaaggccaaactccattgatgagaagttccttattccacaattcatacactagaagaactttccctagaattttccagctactgcacgagaccgtatttgatatcgattcgcaatcacaaacagtaattcaccatattgtgaaacgaaaatcaacaacaccttctgcagtttattatcttgatgttgtgctatctaagatcaaggatttttccccacagtatagaattgaattacttttaaacacacaagacaaaaatggcgataccgcacttcatattgcttctaaaaatggagatgttgttttttttaatacactggtcaaaatgggtgcattaactactatttccaataaggaaggattaaccgccaatgaaataatgaatcaacaatatgagcaaatgatgatacaaaatggtacaaatcaacatgtcaattcttcaaacacggacttgaatatccacgttaatacaaacaacattgaaacgaaaaatgatgttaattcaatggtaatcatgtcgcctgtttctccttcggattacataacctatccatctcaaattgccaccaatatatcaagaaatattccaaatgtagtgaattctatgaagcaaatggctagcatatacaacgatcttcatgaacagcatgacaacgaaataaaaagtttgcaaaaaactttaaaaagcatttctaagacgaaaatacaggtaagcctaaaaactttagaggtattgaaagagagcagtaaagatgaaaacggcgaagctcagactaatgatgacttcgaaattttatctcgtctacaagaacaaaatactaagaaattgagaaaaaggctcatacgatacaaacggttgataaaacaaaagctggaatacaggcaaacggttttattgaacaaattaatagaagatgaaactcaggctaccaccaataacacagttgagaaagataataatacgctggaaaggttggaattggctcaagaactaacgatgttgcaattacaaaggaaaaacaaattgagttccttggtgaagaaatttgaagacaatgccaagattcataaatatagacggattatcagggaaggtacggaaatgaatattgaagaagtagatagttcgctggatgtaatactacagacattgatagccaacaataataaaaataagggcgcagaacagatcatcacaatctcaaacgcgaatagtcatgcataa

SEQ ID NO: 1700 - DNA, 2502 bp, Artificial Sequence
  Description of Artificial Sequence: Synthetic polynucleotide
atgtctaaccaaatatactctgcgagatattctggggttgatgtttatgaattcattcattctacaggatctatcatgaaaaggaaaaaggatgattgggtcaatgctacacatattttaaaggccgccaattttgccaaggctaaaagaacaaggattttagagaaggaagtacttaaggaaactcatgaaaaagttcagggtggatttggtaaatatcagggtacatgggtcccattgaacatagcgaaacaattggcagaaaaatttagtgtctacgatcagttgaaaccgttgttcgactttacgcaaacagatgggtctgcttctccacctcctgctccaaaacatcaccatgcctccaaggtggataggaaaaaggctattagaagtgcaagtacttccgcaattatggaaacaaaaagaaacaacaagaaagccgaggaaaatcaatttcaaagcagcaaaatattgggaaatcccacggctgcaccaaggaaaagaggtagaccggtaggatctacgaggggaagtaggcgtaagttaggtgtcaatttacaacgttctcaaagtgatatgggatttcctagaccggcgataccgaattcttctatatctacaacgcaacttccctctattagatccaccatgggaccacaatcccctacattgggtattttggaagaagaaaggcacgattctagacagcagcagccgcaacaaaataattctgcacagttcaaagaaattgatcttgaggacggcttatccagcgatgtggaaccttctcaacaattacaacaagtttttaatcaaaatactggatttgtaccccaacaacaatcttccttgatacagacacagcaaacagaaagtatggccacgtccgtatcttcctctccttctttacctacgtctccgggcgattttgccgatagtaatccatttgaagagagatttcccggtggtggaacatctcctattatttccatgatcccgcgttatcctgtaacttctaggcctcaaacatctgatattaatgataaagttaacaaatacctttctaaattggttgattattttatttccaatgaaatgaagagcaataagtccttgccacaagtgttattgcacccacctccacacagcgctccctatatagatgctccaatcgatccagaattacatactgccttccattgggcttgttctatgggtaatttaccaattgctgaggcgttgtacgaagccggaacaagtatcagatctacaaattctcaaggccaaactccattgatgagaagttccttattccacaattcttacactagaagaactttccctagaattttccagttattacacgagaccgtatttgatatcgattctcaatctcaaacagtaattcaccatattgtgaaaagaaaatctacaacaccttctgcagtttattatcttgatgttgtgttatctaagatcaaggatttttccccacagtatagaattgaattacttttaaacacacaagacaaaaatggcgataccgcacttcatattgcttctaaaaatggagatgttgttttttttaatacattggtcaaaatgggtgcattaactactatttccaataaggaaggattaaccgccaatgaaataatgaatcaacaatatgagcaaatgatgatacaaaatggtacaaatcaacatgtcaattcttccaacacggacttgaatatccacgttaatacaaacaacattgaaacgaaaaatgatgttaattctatggtaatcatgtctcctgtttctccttctgattacataacctatccatctcaaattgccaccaatatatctagaaatattccaaatgtagtgaattctatgaagcaaatggctagcatatacaacgatcttcatgaacagcatgacaacgaaataaaaagtttgcaaaaaactttaaaaagcatttctaagacgaaaatacaggtaagcttgaaaactttagaggtattgaaagagagcagtaaagatgaaaacggcgaagctcagactaatgatgacttcgaaattttatctcgtttacaagaacaaaatactaagaaattgagaaaaaggctcataagatacaaaagattgataaaacaaaagttggaatacaggcaaacggttttattgaacaaattaatagaagatgaaactcaggctaccaccaataacacagttgagaaagataataatacgttagaaaggttggaattggctcaagaattgacgatgttgcaattacaaaggaaaaacaaattgagttccttggtgaagaaatttgaagacaatgccaagattcataaatatagaagaattatcagggaaggtacggaaatgaatattgaagaagtagatagttctttagatgtaatattacagacattgatagccaacaataataaaaataagggcgcagaacagatcatcacaatctccaacgcgaatagtcatgcatga

SEQ ID NO: 1701 - DNA, 1086 bp, Saccharomyces cerevisiae
atgaaaggtttaattttagtcggtggttacggtaccagattgagacctttaactttgaccgttccaaagccactggttgaattcggtaatagaccaatgattttacaccaaatcgaggctttagccaacgctggtgttactgacatcgttcttgctgttaattacagaccagaagtcatggtggaaactttgaagaagtacgaaaaggaatatggtgttaacatcactttctctgtagaaactgaaccattaggtactgcaggtccattgaaattggctgaagatgttttgaagaaggacaactctccatttttcgtcctaaactccgacgtcatttgcgaatatccattcaaggaattggctgacttccacaaagctcacggtggtaaaggtaccattgttgctaccaaggtcgacgaaccttctaaatacggtgtcattgtccatgatatagctactccaaacttgattgacagatttgttgaaaagccaaaggaatttgttggtaacagaattaacgccggtttgtacattttaaacccagaagtcattgacttgattgaaatgaagccaacttcaattgaaaaggaaactttcccaatcttggtcgaagaaaaacaactatattccttcgatttggaaggtttctggatggatgttggtcaaccaaaggacttcttgtctggtaccgttctttacttgaactctttggccaagagacaaccaaaaaaattggctacaggtgccaacattgttggtaatgccttgatcgacccaaccgctaagatttcctccactgctaagattggcccagacgtggttatcggtcctaatgtcaccatcggtgatggtgttagaatcaccagatctgttgttttgtgcaactccaccatcaagaaccactccttggtcaaatctaccatcgtaggctggaactctaccgttggtcaatggtgtcgtttggaaggtgtcactgtcttgggtgacgacgttgaagttaaggacgaaatctacatcaacggtggtaaagtcttacctcataagtctatctccgataatgttccaaaggaagctattattatgtga

SEQ ID NO: 1702 - DNA, 1086 bp, Artificial Sequence
  Description of Artificial Sequence: Synthetic polynucleotide
atgaaaggtttaattttagtcggtggttacggtaccagattgagacctttaactttgaccgttccaaagccattagttgaattcggtaatagaccaatgattttacaccaaatcgaggctttagccaacgctggtgttactgacatcgttcttgctgttaattacagaccagaagtcatggtggaaactttgaagaagtacgaaaaggaatatggtgttaacatcactttctctgtagaaactgaaccattaggtactgcaggtccattgaaattggctgaagatgttttgaagaaggacaactctccatttttcgtcttgaactccgacgtcatttgcgaatatccattcaaggaattggctgacttccacaaagctcacggtggtaaaggtaccattgttgctaccaaggtcgacgaaccttctaaatacggtgtcattgtccatgatatagctactccaaacttgattgacagatttgttgaaaagccaaaggaatttgttggtaacagaattaacgccggtttgtacattttaaacccagaagtcattgacttgattgaaatgaagccaacttctattgaaaaggaaactttcccaatcttggtcgaagaaaaacaattatattccttcgatttggaaggtttctggatggatgttggtcaaccaaaggacttcttgtctggtaccgttctttacttgaactctttggccaagagacaaccaaaaaaattggctacaggtgccaacattgttggtaatgccttgatcgacccaaccgctaagatttcctccactgctaagattggcccagacgtggttatcggtcctaatgtcaccatcggtgatggtgttagaatcaccagatctgttgttttgtgcaactccaccatcaagaaccactccttggtcaaatctaccatcgtaggctggaactctaccgttggtcaatggtgtcgtttggaaggtgtcactgtcttgggtgacgacgttgaagttaaggacgaaatctacatcaacggtggtaaagtcttacctcataagtctatctccgataatgttccaaaggaagctattattatgtga

SEQ ID NO: 1703 - DNA, 1461 bp, Saccharomyces cerevisiae
atgcctctatcaaaggtggagcactacctttcataccatacgcgcttactcttaccccatgttttgtctcttcagtcatcacatcgtgttgcatacatcttttcgctattatctgcggtgtcaactggcttcattactttgatatctctttactctcaaccgtggcagaaacatttaaattattcctcatggcaaatcaacaccatcgctagtatgactaatttggggatgtacttgacgccaccaatcttggggatgatcgctgattctcatggccccattactttaagtcttttagccatcatagggttcatacctagctattcatatctggcttacgtttttaatcatccggagttatctctcggaggaaatggtgactcatcattcaatctatccatcatttgtttcgttttcataggtatatcaacaagcgctttatactttagcgctttactgacatgcactaagctatatcctcatacaaaactactatccattagcttaccaacgacatgttatggtatttcttctgtagtcggttctcaactgctaagaatcaaatggttctggtcctctaacgcaagttcttcctcgtccaatagtgacttaaacctgggaagagtattccaaacatttgccctcgtttatgtcgttattgggctacttgcatggatagccaccagcgtggtatcacttttgcattttaatgaagagcaagacaaccaaaaacggctggatgatcaaactgatgtggaacaatcaccgctgttagaacgaagtaatcatgttcaagaaaagtttacgcagacgatgctaaggatctttagtgatcctgtgacatatatcctagcggtatcaattttgttatcacttgggcccctcgagatgtttattgccaatatgggatcactgactaacctgctagtccaattagatgcgccaaccttatctacaaagttgttatccacatacgcgctatcttccacttttacgagattgctcacaggcatagtggcagacttcttcgccaagaaaaaaatatcaattaaatggatcctgttgactttcctttcattaggggtatgtgcacaactgtttttattgaaaatgacctcttcagcgtcaccctgggggctagtacctacaggatcattggttggaattgtatacggtggacttttcactgtttatccgacgctggtcctgttagtatggggcgaacgctcattcgggactgtttacggtagcttactaattgcacctgctataggttctatgatattttgcatgttgtatgccaaattttacgattctcgctgtatgagtggcggaggagatctgcgaaatccgtcctgtatttcggctgtctacaagtacagcagtatcgcattcgttgtatccgctgttctttcagctgtagtattttggaaattaaaaagtagaaaactcagaatttaa

SEQ ID NO: 1704 - DNA, 1461 bp, Artificial Sequence
  Description of Artificial Sequence: Synthetic polynucleotide
atgcctttatccaaggtggagcactacctttcttaccatacgcgcttactcttaccccatgttttgtctcttcagtcttctcatcgtgttgcatacatcttttctttattatctgcggtgtccactggcttcattactttgatatctctttactctcaaccgtggcagaaacatttaaattattcctcttggcaaatcaacaccatcgctagtatgactaatttggggatgtacttgacgccaccaatcttggggatgatcgctgattctcatggccccattactttaagtcttttagccatcatagggttcatacctagctattcttatttggcttacgtttttaatcatccggagttatctctcggaggaaatggtgactcttctttcaatttatccatcatttgtttcgttttcataggtatatctacaagcgctttatactttagcgctttattaacatgcactaagctttatcctcatacaaaattattatccattagcttaccaacgacatgttatggtatttcttctgtagtcggttctcaattattaagaatcaaatggttctggtcctctaacgcaagttcttcctcctccaatagtgacttaaacttgggaagagtattccaaacatttgccctcgtttatgtcgttattgggttacttgcatggatagccaccagcgtggtatctcttttgcattttaatgaagagcaagacaaccaaaaaagattagatgatcaaactgatgtggaacaatctccgttgttagaaagaagtaatcatgttcaagaaaagtttacgcagacgatgttaaggatctttagtgatcctgtgacatatatcttagcggtatctattttgttatctcttgggcccctcgagatgtttattgccaatatgggatctttgactaacttattggtccaattagatgcgccaaccttatctacaaagttgttatccacatacgcgctttcttccacttttacgagattgctcacaggcatagtggcagacttcttcgccaagaaaaaaatatctattaaatggatcttgttgactttcctttctttaggggtatgtgcacaattatttttattgaaaatgacctcttctgcgtctccctgggggttggtacctacaggatctttggttggaattgtatacggtggacttttcactgtttatccgacgttagtccttttagtatggggcgaacgctctttcgggactgtttacggtagcttattgattgcacctgctataggttctatgatattttgcatgttgtatgccaaattttacgattctcgctgtatgagtggcggaggagatttaagaaatccgtcctgtatttctgctgtctacaagtacagcagtatcgcattcgttgtatccgctgttctttctgctgtagtattttggaaattaaaaagtagaaaactcagaatttga

SEQ ID NO: 1705 - DNA, 558 bp, Saccharomyces cerevisiae
atgacaacaacctcaacaaccagtgtagatggcagaacctcctcgactttgaaggctactttatctgcttcaggtccaaattcaaatggtccaacgcccgctgtgcttcctcagaagccaaaattaacaggttgggcgcaggcagctgccaaagcccttccaaggcaacagcaacagcaacagcaggcacgaaaagatgattccgtggctgtacaacctgctaatacgaagactaaaaccatcgcatctaccgcgccgcctgctaatataaagggtagttccaccgccaatggatcatccacaaataagaaatttaaaagagcgaataaacaaccttacaatagagaagaagttagatcgtatatgcacaaattatttcagagctataccgctggtgaaaaaagtcattcaatgaaaacttataagcaagtactatcagaaacggcaagtggcagagtttcaacagccactgactggggtactgtatcaagcagtaaaaataagaataaaaaatacggctgtttgtccgatattgctaaagttttaagaaaccaatga

SEQ ID NO: 1706 - DNA, 558 bp, Artificial Sequence
  Description of Artificial Sequence: Synthetic polynucleotide
atgacaacaacctctacaaccagtgtagatggcagaacctccagcactttgaaggctactttatctgcttctggtccaaatagtaatggtccaacgcccgctgtgcttcctcagaagccaaaattaacaggttgggcgcaggcagctgccaaagcccttccaaggcaacagcaacagcaacagcaggcaagaaaagatgattccgtggctgtacaacctgctaatacgaagactaaaaccatcgcatctaccgcgccgcctgctaatataaagggtagttccaccgccaatggatcttccacaaataagaaatttaaaagagcgaataaacaaccttacaatagagaagaagttagatcttatatgcacaaattatttcagagctataccgctggtgaaaaaagtcattctatgaaaacttataagcaagtattatctgaaacggcaagtggcagagtttctacagccactgactggggtactgtatccagcagtaaaaataagaataaaaaatacggctgtttgtccgatattgctaaagttttaagaaaccaatga

SEQ ID NO: 1707 - DNA, 912 bp, Saccharomyces cerevisiae
atgagtgtgataggtaggttcttgtattacttgaggtccgtgttggtcgtactggcgcttgcaggctgtggcttttacggtgtaatcgcctctatcctttgcacgttaatcggtaagcaacatttggctcagtggattactgcgcgttgtttttaccatgtcatgaaattgatgcttggccttgacgtcaaggtcgttggcgaggagaatttggccaagaagccatatattatgattgccaatcaccaatccaccttggatatcttcatgttaggtaggattttcccccctggttgcacagttactgccaagaagtctttgaaatacgtcccctttctgggttggttcatggctttgagtggtacatatttcttagacagatctaaaaggcaagaagccattgacaccttgaataaaggtttagaaaatgttaagaaaaacaagcgtgctctatgggtttttcctgagggtaccaggtcttacacgagtgagctgacaatgttgcctttcaagaagggtgctttccatttggcacaacagggtaagatccccattgttccagtggttgtttccaataccagtactttagtaagtcctaaatatggggtcttcaacagaggctgtatgattgttagaattttaaaacctatttcaaccgagaacttaacaaaggacaaaattggtgaatttgctgaaaaagttagagatcaaatggttgacactttgaaggagattggctactctcccgccatcaacgatacaaccctcccaccacaagctattgagtatgccgctcttcaacatgacaagaaagtgaacaagaaaatcaagaatgagcctgtgccttctgtcagcattagcaacgatgtcaatacccataacgaaggttcatctgtaaaaaagatgcattaa

SEQ ID NO: 1708 - DNA, 912 bp, Artificial Sequence
  Description of Artificial Sequence: Synthetic polynucleotide
atgagtgtgataggtaggttcttgtattacttgaggtccgtgttggtcgtattggcgcttgcaggctgtggcttttacggtgtaatcgcctctatcctttgcacgttaatcggtaagcaacatttggctcagtggattactgcgcgttgtttttaccatgtcatgaaattgatgcttggccttgacgtcaaggtcgttggcgaggagaatttggccaagaagccatatattatgattgccaatcaccaatccaccttggatatcttcatgttaggtaggattttcccccctggttgcacagttactgccaagaagtctttgaaatacgtcccctttttaggttggttcatggctttgagtggtacatatttcttagacagatctaaaaggcaagaagccattgacaccttgaataaaggtttagaaaatgttaagaaaaacaagcgtgctttatgggtttttcctgagggtaccaggtcttacacgagtgagttgacaatgttgcctttcaagaagggtgctttccatttggcacaacagggtaagatccccattgttccagtggttgtttccaataccagtactttagtaagtcctaaatatggggtcttcaacagaggctgtatgattgttagaattttaaaacctatttctaccgagaacttaacaaaggacaaaattggtgaatttgctgaaaaagttagagatcaaatggttgacactttgaaggagattggctactctcccgccatcaacgatacaaccctcccaccacaagctattgagtatgccgctcttcaacatgacaagaaagtgaacaagaaaatcaagaatgagcctgtgccttctgtcagcattagcaacgatgtcaatacccataacgaaggttcttctgtaaaaaagatgcattga

SEQ ID NO: 1709 - DNA, 828 bp, Saccharomyces cerevisiae
atgtctgaaaaaccacaacaagaggagcaagagaaaccacaatcaagacgtaattcatttgctgtgattgaatttactccagaagtcttggacagatgtttaaagcaagtggaattctacttttctgaattcaactttccatatgacaggttcttgcgcacaacagcggaaaaaaacgatggatgggtccccatcagcaccatcgccacattcaaccgtatgaagaaatatagaccagtggataaggttatcgaagcactacgtagttctgaaattttggaagtatctgctgatggagagaacgtcaagagacgtgttcctttggacctaactgctgccagaaatgccagaattgagcaaaaccaacggactttggctgtaatgaatttcccacatgaggacgttgaagcttcccaaattcctgaattgcaggagaacttggaagcctttttcaaaaaattaggtgaaatcaaccaagtgcgtttgagaagagatcacagaaacaagaaatttaatggtacggtcttggtggaatttaagacaattccagaatgtgaagcttttttgaaatcgtattccaatgacgatgagtccaacgaaattttgtcatatgaaggtaagaaactgagtgttttgacgaaaaaacagtttgatttacagagagaggcctcgaagtccaaaaacttcagcggtagatcaagatcctttaacggccataagaagaaaaacttgcctaaattccccaaaaataagaagaaaaacggcaaggaagagtcaaaagaggactcttctgccattgccgatgacgatgaggagcacaaggagtga

SEQ ID NO: 1710 - DNA, 828 bp, Artificial Sequence
  Description of Artificial Sequence: Synthetic polynucleotide
atgtctgaaaaaccacaacaagaggagcaagagaaaccacaatctagacgtaattcttttgctgtgattgaatttactccagaagtcttggacagatgtttaaagcaagtggaattctacttttctgaattcaactttccatatgacaggttcttgcgcacaacagcggaaaaaaacgatggatgggtccccatcagcaccatcgccacattcaaccgtatgaagaaatatagaccagtggataaggttatcgaagcattgcgtagttctgaaattttggaagtatctgctgatggagagaacgtcaagagacgtgttcctttggacttgactgctgccagaaatgccagaattgagcaaaaccaaagaactttggctgtaatgaatttcccacatgaggacgttgaagcttcccaaattcctgaattgcaggagaacttggaagcctttttcaaaaaattaggtgaaatcaaccaagtgcgtttgagaagagatcacagaaacaagaaatttaatggtacggtcttggtggaatttaagacaattccagaatgtgaagcttttttgaaaagttattccaatgacgatgagtccaacgaaattttgagttatgaaggtaagaaattaagtgttttgacgaaaaaacagtttgatttacagagagaggcctccaagtccaaaaacttcagcggtagatctagatcctttaacggccataagaagaaaaacttgcctaaattccccaaaaataagaagaaaaacggcaaggaagagagtaaagaggactcttctgccattgccgatgacgatgaggagcacaaggagtga

SEQ ID NO: 1711 - DNA, 807 bp, Saccharomyces cerevisiae
atgctgatagtattattcttaacattattttgttcggtagtgttccgaacagcttattgtgatgtggccattgtggctccagaacccaactcagtttatgatttatctggtacaagtcaggctgttgtcaaagtaaagtggatgcatacagataacacaccacaggaaaaggattttgtcagatacacgtttactctgtgttcgggtaccaatgccatgatagaagcaatggctactcttcaaacactcagtgcgagtgatctgacagacaacgagttcaatgcgataatagaaaacaccgttgggacggacggtgtttacttcatacaagtctttgcgcaaacagctatcggttacaccattcattacactaacagatttaaactaaaagggatgattggtacaaaagccgctaatccgagtatgataaccattgcaccagaggcacaaacaagaattaccacaggagatgtgggtgccacgattgattctaagagtttcaccgttccctacaacttacaaacaggtgttgtgaaatatgctcccatgcaactccaaccggctactaaggtaacagcaaagacatggaaaaggaagtacgcgaccagtgaggtaacgtattactacactttaagaaactccgttgatcaacatactaccgtaacaccagggtggtcatacataattacagctgatagtaactatgctacgccggcccctatgccggctgataatggcggttggtataatccacgcaagagactctctctgactgcaagaaaagttaatgctttgaggcacagataa

SEQ ID NO: 1712 - DNA, 807 bp, Artificial Sequence
  Description of Artificial Sequence: Synthetic polynucleotide
atgttgatagtattattcttaacattattttgttctgtagtgttcagaacagcttattgtgatgtggccattgtggctccagaacccaactctgtttatgatttatctggtacaagtcaggctgttgtcaaagtaaagtggatgcatacagataacacaccacaggaaaaggattttgtcagatacacgtttactttgtgttctggtaccaatgccatgatagaagcaatggctactcttcaaacactcagtgcgagtgatttaacagacaacgagttcaatgcgataatagaaaacaccgttgggacggacggtgtttacttcatacaagtctttgcgcaaacagctatcggttacaccattcattacactaacagatttaaattgaaagggatgattggtacaaaagccgctaatccgagtatgataaccattgcaccagaggcacaaacaagaattaccacaggagatgtgggtgccacgattgattctaagagtttcaccgttccctacaacttacaaacaggtgttgtgaaatatgctcccatgcaactccaaccggctactaaggtaacagcaaagacatggaaaaggaagtacgcgaccagtgaggtaacgtattactacactttaagaaactccgttgatcaacatactaccgtaacaccagggtggagttacataattacagctgatagtaactatgctacgccggcccctatgccggctgataatggcggttggtataatccacgcaagagactctctttgactgcaagaaaagttaatgctttgaggcacagatga

SEQ ID NO: 1713 - DNA, 1473 bp, Saccharomyces cerevisiae
atgctggtatcatcatcttttgcatcaagcattgactcagtaatgtcccatgagacgatgtctttacggagaaaccctccctttatagatactccagaaaaaatgccaaacccaacggcttctcccaatggcaccattcaccatttgatagatccatcactgccattgttgtccagtactacgtcgtcttcgcgctctaccctcagttctacactgaattctcctccacctcccccattaactacatcatactcttcttataactcctctgcatgccagtctatcacgagttcgcctacagacaatacagccttggcacataattccaaatgctatttccctcatagcctttctccaacaccgctgtcatccaacagctcaagccatgtcattttgccacccatatcctccttcaccaatttaattacagttgcagaaagagaatttaacggcagatcaaattccttgcatgccaattttacatcaccggtgccaagaacagtgctagatcatcacagacatgagctaacattttgcaaccctaacaacacaacgggtttcaaaaccatcaccccctcaccaccaactcaacaccagagtatattgccaaccgcggtagataacgtaccgagatcaaaatccgtgtccagcctacccgttagtggattcccacctttgatcgtcaaacaacaacagcaacagcaactcaacagtagtagtagtgcctctgcactaccgtctattcattccccattgactaatgaacatacaagcaggtattcatcgtctttaaaggattccgccaagataacgaagcaaagaaagaaaaaggaatgccccatctgccacaacttctacgccaacctatctacgcataaatccactcatttaactccggaggacagaccgcataagtgccctatctgtcaacgcggctttgccaggaacaatgatctgataaggcacaagaagcgccattggaaagatgaatttatgcaaatatacgcaagggagtccgacaacaatagtggtgctgacgatcaagatgacactgcccgcacctccgcaaacaacgacagcgacgactcaaacgataaactcgctgcctcatcctcttccgaagaaacaaaactactgaagaaaaaccaattgaaatcactatacaagattaaaggtgcattcaagtgtccttacaactctactctgatcaatttggatatggaggtgtatccacacaagtctagatcactctatttcgagccaataaactgtcatcaaacgggcgttttttcgcgctgtgatactttcaagaatcacctaaaggctttgcatttcgagtacccgcccaagaccaagaaagaagatagaggtgttgtgccggggaagtgcaagcattgtggactgcaatttccgaacgttgacgtctggctaaataagcacgtggggaaaggatgtggctactcatatcactaa

SEQ ID NO: 1714 - DNA, 1473 bp, Artificial Sequence
  Description of Artificial Sequence: Synthetic polynucleotide
atgttggtatcttcttcttttgcaagtagcattgactctgtaatgtcccatgagacgatgtctttaagaagaaaccctccctttatagatactccagaaaaaatgccaaacccaacggcttctcccaatggcaccattcaccatttgatagatccatctttaccattgttgtccagtactacgtcttcttctcgctctaccctcagttctacattaaattctcctccacctcccccattaactacatcttactcttcttataactcctctgcatgccagtctatcacgagtagccctacagacaatacagccttggcacataattccaaatgctatttccctcatagcctttctccaacaccgttatcttccaacagcagcagccatgtcattttgccacccatatcctccttcaccaatttaattacagttgcagaaagagaatttaacggcagatctaattccttgcatgccaattttacatctccggtgccaagaacagtgttggatcatcacagacatgagttgacattttgcaaccctaacaacacaacgggtttcaaaaccatcaccccctctccaccaactcaacaccagagtatattgccaaccgcggtagataacgtaccgagaagtaaatccgtgtccagcttgcccgttagtggattcccacctttgatcgtcaaacaacaacagcaacagcaactcaacagtagtagtagtgcctctgcattaccgtctattcattccccattgactaatgaacatacaagcaggtattcttcttctttaaaggattccgccaagataacgaagcaaagaaagaaaaaggaatgccccatctgccacaacttctacgccaacttatctacgcataaatccactcatttaactccggaggacagaccgcataagtgccctatctgtcaacgcggctttgccaggaacaatgatttgataaggcacaagaagcgccattggaaagatgaatttatgcaaatatacgcaagggagtccgacaacaatagtggtgctgacgatcaagatgacactgcccgcacctccgcaaacaacgacagcgacgactccaacgataaactcgctgcctcttcctcttccgaagaaacaaaattattgaagaaaaaccaattgaaatctttgtacaagattaaaggtgcattcaagtgtccttacaactctactttgatcaatttggatatggaggtgtatccacacaagtctagaagtctctatttcgagccaataaactgtcatcaaacgggcgtttttagccgctgtgatactttcaagaatcacttgaaggctttgcatttcgagtacccgcccaagaccaagaaagaagatagaggtgttgtgccggggaagtgcaagcattgtggattacaatttccgaacgttgacgtctggttaaataagcacgtggggaaaggatgtggctactcctatcactga

SEQ ID NO: 1715 - DNA, 936 bp, Saccharomyces cerevisiae
atggtatctagaggccccgacgaatggcttgaaacaataaagaaatgccaggcgctaactgaaaacgagatgaaacaactgtgtgaaatggtgaaagaacttttgatggaggaaagtaacatccagccggtacagacccccgttactgtatgtggagacatacacggccaatttcatgacttgttagagctattccgtacggcgggtggctttcctgacgatataaactacatttttctcggtgattacgtggatcgtggctactatagtctggaaacttttacgcttttaatgtgtctgaaagtcaagtacccggcaaagataactttggtcagaggaaaccatgagtccagacaaattactcaagtttacgggttctacgaggaatgcctgaataagtacggatctaccaccgtatggaagtattgctgtcaagtttttgatttcctgacgctggccgctataattgacggtaagatcttatgtgtccatggagggttatctcccgagattagaatgctcgatcaaatcagagtcttgtcaagagctcaagaagtgccacacgagggtgggttctcggacctgctttggtcagaccctgacaatgtagaggcttggcaagtttcccctcgtggtgcaggatggctctttggcagtaaagttgctagagagtttaaccacgttaatggactgaaccttattgcccgggctcaccaactggttatggaggggttcaagtaccattttcctgaaaaggacgttgtaaccgtgtggtccgcgccaaattactgttatagatgtggtaatgtcgcgagtgtaatgaaggtcgatgaggatctggaacctactttcaaaattttctcggctgttcccgatgactacataagagaatccacggcaaaccataataatcaaagagccggctatttcttataa

SEQ ID NO: 1716 - DNA, 936 bp, Artificial Sequence
  Description of Artificial Sequence: Synthetic polynucleotide
atggtatctagaggccccgacgaatggcttgaaacaataaagaaatgccaggcgttgactgaaaacgagatgaaacaattatgtgaaatggtgaaagaacttttgatggaggaaagtaacatccagccggtacagacccccgttactgtatgtggagacatacacggccaatttcatgacttgttagagcttttccgtacggcgggtggctttcctgacgatataaactacatttttctcggtgattacgtggatcgtggctactatagtttagaaacttttacgcttttaatgtgtttgaaagtcaagtacccggcaaagataactttggtcagaggaaaccatgagtccagacaaattactcaagtttacgggttctacgaggaatgcttgaataagtacggatctaccaccgtatggaagtattgctgtcaagtttttgatttcttgacgttggccgctataattgacggtaagatcttatgtgtccatggagggttatctcccgagattagaatgctcgatcaaatcagagtcttgtccagagctcaagaagtgccacacgagggtgggttcagtgacttactttggtctgaccctgacaatgtagaggcttggcaagtttcccctcgtggtgcaggatggctctttggcagtaaagttgctagagagtttaaccacgttaatggattgaaccttattgccagagctcaccaattggttatggaggggttcaagtaccattttcctgaaaaggacgttgtaaccgtgtggtccgcgccaaattactgttatagatgtggtaatgtcgcgagtgtaatgaaggtcgatgaggatttggaacctactttcaaaattttcagtgctgttcccgatgactacataagagaatccacggcaaaccataataatcaaagagccggctatttcttatga

SEQ ID NO: 1717 - DNA, 522 bp, Saccharomyces cerevisiae
atgacccacagcttgaaagctctattcgccttgctatttctttacacagctgctgtcaatgcgggtgtgattggcatattcaacgcccttcccccaccaaacaccaaaccaattaacggcgaatctccactttaccaatgtgacattctagacaagcaacttgtggaaatcaaagaggtcaatttggaccctaaccctcctgttcgtggcgaaaatttgactatttctgctaacggtgaggtctttgaaactatagaagagggggcatatatcgacgttgaagtccgtctaggatacatcagactgttatcccagacttttgatttgtgtgaaacattagaagataacgatatcgaaggcttatcctgtccaattgaaccgggtgaatacaacattaagaaaatagttgagatcccaggcgaggttccacctggcaaatatgttgttgtagcaagagcttacactgaaaaggatgatctgatcacttgcttaaccggagaagtcatcttcccaccaaggtga

SEQ ID NO: 1718 - DNA, 522 bp, Artificial Sequence
  Description of Artificial Sequence: Synthetic polynucleotide
atgacccacagcttgaaagctttattcgccttgttatttctttacacagctgctgtcaatgcgggtgtgattggcatattcaacgcccttcccccaccaaacaccaaaccaattaacggcgaatctccactttaccaatgtgacattttggacaagcaacttgtggaaatcaaagaggtcaatttggaccctaaccctcctgttcgtggcgaaaatttgactatttctgctaacggtgaggtctttgaaactatagaagagggggcatatatcgacgttgaagtccgtttaggatacatcagattattatcccagacttttgatttgtgtgaaacattagaagataacgatatcgaaggcttatcctgtccaattgaaccgggtgaatacaacattaagaaaatagttgagatcccaggcgaggttccacctggcaaatatgttgttgtagcaagagcttacactgaaaaggatgatttgatcacttgcttaaccggagaagtcatcttcccaccaaggtga

SEQ ID NO: 1719 - DNA, 288 bp, Saccharomyces cerevisiae
atgtccggaaaaccaccagtttatagattaccccctcttcccagactaaaagtgaagaaacctatcattaggcaagaagcgaacaaatgtcttgttttaatgtcaaacttattacaatgctggtcttcatatggtcatatgagccctaaatgtgctggcttagtaacggaattgaaaagttgcactagtgaaagtgccctcggcaaaagaaacaacgttcaaaagagcaatattaactatcacgccgctaggctgtatgataggatcaacggtaaaccccatgattaa

SEQ ID NO: 1720 - DNA, 288 bp, Artificial Sequence
  Description of Artificial Sequence: Synthetic polynucleotide
atgtccggaaaaccaccagtttatagattaccccctcttcccagattgaaagtgaagaaacctatcattaggcaagaagcgaacaaatgtcttgttttaatgtccaacttattacaatgctggtcttcttatggtcatatgagccctaaatgtgctggcttagtaacggaattgaaaagttgcactagtgaaagtgccctcggcaaaagaaacaacgttcaaaagagcaatattaactatcacgccgctaggttatatgataggatcaacggtaaaccccatgattga

SEQ ID NO: 1721 - DNA, 921 bp, Saccharomyces cerevisiae
atgcagttgagcaaggctgctgagatgtgttatgagataacaaactcttacttacacatagaccagaaatctcagataatagcaagtacacaagaagcgatacggttgacaagaaaatacttactaagtgaaatttttgtacgttggagtccactgaatggggaaatatcattctcgtacaacggaggaaaagattgccaggtattactactgttatatctgagttgcttatgggaatatttcttcattaaggctcaaaattcccaattcgatttcgagtttcaaagcttccccatgcaaagacttccaactgttttcattgatcaagaagaaactttccctacattagagaattttgtactggaaacctcagagcgatattgcctttccttatacgaatcacaaaggcaatctggtgcatcggtcaatatggcagacgcatttagagattttataaagatataccctgagaccgaagctatagtgataggtattagacacacagacccatttggtgaagcattaaagcctattcaaagaacagattctaactggcctgattttatgaggttgcaacctctcttacactgggacttaaccaatatatggagtttcttactgtattctaatgagccaatttgtggactatatggtaaaggtttcacatcaatcggcggaattaacaactcattgcctaacccacacttgagaaaggactccaataatccagccttgcattttgaatgggaaatcattcatgcatttggcaaggacgcagaaggcgaacgtagttccgctataaacacgtcacctatttccgtggtggataaggaaagattcagcaaataccatgacaattactatcctggctggtatttggttgatgacactttagagagagcaggcaggatcaagaattaa

SEQ ID NO: 1722 - DNA, 921 bp, Artificial Sequence
  Description of Artificial Sequence: Synthetic polynucleotide
atgcagttgagcaaggctgctgagatgtgttatgagataacaaactcttacttacacatagaccagaaatctcagataatagcaagtacacaagaagcgataagattgacaagaaaatacttattaagtgaaatttttgtacgttggagtccattgaatggggaaatatctttctcttacaacggaggaaaagattgccaggtattattattattatatttgagttgcttatgggaatatttcttcattaaggctcaaaattcccaattcgatttcgagtttcaaagcttccccatgcaaagacttccaactgttttcattgatcaagaagaaactttccctacattagagaattttgtattggaaacctctgagagatattgcctttccttatacgaatctcaaaggcaatctggtgcatctgtcaatatggcagacgcatttagagattttataaagatataccctgagaccgaagctatagtgataggtattagacacacagacccatttggtgaagcattaaagcctattcaaagaacagattctaactggcctgattttatgaggttgcaacctctcttacactgggacttaaccaatatatggagtttcttattatattctaatgagccaatttgtggattgtatggtaaaggtttcacatctatcggcggaattaacaactctttgcctaacccacacttgagaaaggactccaataatccagccttgcattttgaatgggaaatcattcatgcatttggcaaggacgcagaaggcgaacgtagttccgctataaacacgtctcctatttccgtggtggataaggaaagattcagcaaataccatgacaattactatcctggctggtatttggttgatgacactttagagagagcaggcaggatcaagaattga

SEQ ID NO: 1723 - DNA, 1323 bp, Saccharomyces cerevisiae
atgatcagaacatcatctatattaaaaaactgtaactatagatacatacattgcatccatagatgcttgctgaatgaagccaatttgaaagatagaaaaactcacaacgtagaaagagtttcaaatgaaaagacatttgaacaagctctcgaagaggaacgtaaggtatttggagaactattcgaagctggagcaagggttgaaaacatgaggcacactaatgctagcaaaataattgacaagtattacaatgggctacaggacaactccgagggaactagtgtaaaaaaagaaaaaattgtttttaaccacagtcaaagagctcaaaggaagcttccaaataaggaccatgaattcctgaaggaaacagcaggcaatgactatgtctacgaacgggcagaaccttctgctattagcactaaaacgataagtgagcagacaagaactttgctggaaaagatatttgacgaagataatagcattaataaaagcaacagagaattgctgaatcttaatctgcgcaagggctcgggaatggaagctttgaggcagccagttgcacattccaacgtcaaatttagcgaggaagtgatgcaagaaattggtaataagattcggtaccaaaccacactggatcaggttttagaacctcacattgactacttgagggaagctgttaaaagtgattacgatcttttaagatacctaaagcaatcactagacatttacaagaaaaggaacaaagacctagagttaaagatgaatgcagaatcttcaaacattttcgaagacattagaagtgcgtgtataaataaaccggcagaactaccgaaaccgcttgcaatgactttaccatatattatagtcaaatcgcttagattaggtgactttgatttcccggcagacagaaagtacacattgatctcctatgtttataatgaatgtaaaaacaacatggacgcttcactgtacctaacaatttgtaatgttgatttctacaatttgctggttcagctattgtgggaaaacttccaggagattcgctacttgagacgtgtggttaccgagatgagcgttaatggtgtcatcggaaatattgaaaccgtggatatattggataagattgtcaaagaaatgagaagtttaaatgaggatgtctttcttgaagcaggagaacagctcagtgcagatgaggaagtttcgtccagcgcaaataaaatagtgaatgtaggtgttttatggaataaagacacgaataatgacttactaattgttgaaaattatctcaaaagcctcaaaaaaaatttaactagagacaggtag

SEQ ID NO: 1724 - DNA, 1323 bp, Artificial Sequence
  Description of Artificial Sequence: Synthetic polynucleotide
atgatcagaacatcttctatattaaaaaactgtaactatagatacatacattgcatccatagatgcttgttgaatgaagccaatttgaaagatagaaaaactcacaacgtagaaagagtttctaatgaaaagacatttgaacaagctctcgaagaggaacgtaaggtatttggagaattattcgaagctggagcaagggttgaaaacatgaggcacactaatgctagcaaaataattgacaagtattacaatgggttgcaggacaactccgagggaactagtgtaaaaaaagaaaaaattgtttttaaccacagtcaaagagctcaaaggaagcttccaaataaggaccatgaattcttgaaggaaacagcaggcaatgactatgtctacgaaagagcagaaccttctgctattagcactaaaacgataagtgagcagacaagaactttgttggaaaagatatttgacgaagataatagcattaataaaagcaacagagaattgttgaatcttaatttacgcaagggcagtggaatggaagctttgaggcagccagttgcacattccaacgtcaaatttagcgaggaagtgatgcaagaaattggtaataagattagataccaaaccacattagatcaggttttagaacctcacattgactacttgagggaagctgttaaaagtgattacgatcttttaagatacttgaagcaatctttggacatttacaagaaaaggaacaaagacttggagttaaagatgaatgcagaatcttccaacattttcgaagacattagaagtgcgtgtataaataaaccggcagaattaccgaaaccgcttgcaatgactttaccatatattatagtcaaatctcttagattaggtgactttgatttcccggcagacagaaagtacacattgatctcctatgtttataatgaatgtaaaaacaacatggacgcttctttgtacttgacaatttgtaatgttgatttctacaatttgttggttcagttattgtgggaaaacttccaggagattcgctacttgagacgtgtggttaccgagatgagcgttaatggtgtcatcggaaatattgaaaccgtggatatattggataagattgtcaaagaaatgagaagtttaaatgaggatgtctttcttgaagcaggagaacagctcagtgcagatgaggaagtttcttccagcgcaaataaaatagtgaatgtaggtgttttatggaataaagacacgaataatgacttattgattgttgaaaattatctcaaaagcctcaaaaaaaatttaactagagacaggtga

SEQ ID NO: 1725 - DNA, 801 bp, Saccharomyces cerevisiae
atgaactatttagaaggcgttgggtcaaagaaaggaggtggtggtatagcctcagaatctcagtttaacttacaacgaaggaaagaagtcgaatcattacttagtaaaggcgaaaatgtcccgtacactttccaagatgaaaaggacgatcaagtaaggtccaatccgtacatttacaagaatcattccggtaaactggtttgtaaactatgtaatacaatgcacatgtcgtggtccagcgttgaaaggcatttgggtggtaaaaaacatggtttaaatgtgttaaggcgtggtatcagtatagagaaaagttctctagggagagaaggccaaacaactcatgatttccgacaacaacaaaagataattgaagctaagcaatctttaaagaataacggtacgatccctgtttgtaaaatagctaccgtgaaaaacccgaagaacggttcagtaggtttggctatccaggtaaattatagcagtgaagtcaaagaaaatagtgtcgatagcgatgataaggctaaagtccctcctctcattaggattgtatctggtttagagctatcagataccaaacagaagggaaaaaaatttctcgttattgcgtatgaaccctttgaaaatattgctattgagctacctccaaacgaaatattattcagcgaaaacaatgacatggacaataataacgatggagtagatgaattaaataaaaagtgtacattttgggatgctatatcaaaactttattacgttcaatttttctttaaacaagccgaacaagaacaagccgatgtatga

SEQ ID NO: 1726 - DNA, 801 bp, Artificial Sequence
  Description of Artificial Sequence: Synthetic polynucleotide
atgaactatttagaaggcgttgggtccaagaaaggaggtggtggtatagccagtgaatctcagtttaacttacaaagaaggaaagaagtcgaatctttacttagtaaaggcgaaaatgtcccgtacactttccaagatgaaaaggacgatcaagtaaggtccaatccgtacatttacaagaatcattccggtaaattggtttgtaaattatgtaatacaatgcacatgtcttggtccagcgttgaaaggcatttgggtggtaaaaaacatggtttaaatgtgttaaggcgtggtatcagtatagagaaaagttctttagggagagaaggccaaacaactcatgatttcagacaacaacaaaagataattgaagctaagcaatctttaaagaataacggtacgatccctgtttgtaaaatagctaccgtgaaaaacccgaagaacggttctgtaggtttggctatccaggtaaattatagcagtgaagtcaaagaaaatagtgtcgatagcgatgataaggctaaagtccctcctctcattaggattgtatctggtttagagttaagtgataccaaacagaagggaaaaaaatttctcgttattgcgtatgaaccctttgaaaatattgctattgagcttcctccaaacgaaatattattcagcgaaaacaatgacatggacaataataacgatggagtagatgaattaaataaaaagtgtacattttgggatgctatatccaaactttattacgttcaatttttctttaaacaagccgaacaagaacaagccgatgtatga

SEQ ID NO: 1727 - DNA, 1689 bp, Saccharomyces cerevisiae
atgaccatcccacatatgaaatacgccgtatcaaagactagcgaaaataaggtttcaaatacagtaagccccacacaagataaagacgcgatcagaaaacaacccgatgacattataaataatgatgaaccttcacataagaagataaaagtagcacagccggattccttgagggaaaccaacacaacagatccacttgggcacactaaagctgcgctcggagaagtggcatcgatggagctcaaaccaactaatgacatggatcccttggcagtgtcagcagcttcagtagtgtcaatgtccaatgacgttttgaaaccagagacgcccaaggggccaatcataatcagtaaaaacccatcaaatggtattttctatggtccctccttcactaaacgagagtctctcaatgctcgaatgtttctgaaatactatggtgcacacaaatttttagacacttacctccccgaggatttgaactcgttatacatttactatcttatcaagttgctaggctttgaagttaaagatcaagcgcttatcggcaccatcaacagtattgtccatatcaactcgcaagagcgtgttcaagatttgggaagtgcaatatctgtcacaaatgttgaagacccattggcaaaaaagcaaacagttcgtctaatcaaagatttgcaaagagcaattaacaaagttctatgtacaagattaagattatccaattttttcactattgatcattttattcaaaaattacataccgctagaaaaattttggtcctgactggtgcaggtgtttcaacttcattagggatcccggacttcagatcttctgaggggttctattcaaagatcaaacatttggggctcgatgatccccaagacgttttcaattacaatatatttatgcacgacccctctgttttctataatattgccaatatggttttacctccagaaaaaatttattctccattgcatagtttcattaagatgctacaaatgaaagggaaattattgagaaattatactcaaaacattgataatttggaatcttatgcgggaataagcacagataaactggtgcagtgccatggctcttttgctactgccacctgcgttacctgccattggaacctacccggtgagaggatatttaataaaattagaaacctcgaacttccactatgcccgtactgttacaaaaaaagaagagaatatttcccagagggatataataataaagtaggtgttgctgcatcacagggttcaatgtcggaaaggcctccatatatccttaactcatatggcgttctcaaaccagatatcacattctttggcgaagcactgccaaataaatttcataagagcattcgcgaagatatcttagaatgtgatttgttgatttgcattgggacaagtttaaaagtagcgccagtgtctgaaatcgtaaacatggttccttcccacgttccccaagtcctgattaatcgtgatcccgtcaagcacgcagaatttgatttatctcttttggggtactgtgatgacattgcagctatggtagcccaaaaatgtggctggacgattccgcataagaaatggaacgatttgaagaacaagaactttaaatgccaagagaaggataagggcgtgtatgtcgttacatcagatgaacatcccaaaaccctctaa

SEQ ID NO: 1728 - DNA, 1689 bp, Artificial Sequence
  Description of Artificial Sequence: Synthetic polynucleotide
atgaccatcccacatatgaaatacgccgtatccaagactagcgaaaataaggtttctaatacagtaagccccacacaagataaagacgcgatcagaaaacaacccgatgacattataaataatgatgaaccttctcataagaagataaaagtagcacagccggattccttgagggaaaccaacacaacagatccacttgggcacactaaagctgcgctcggagaagtggcatctatggagctcaaaccaactaatgacatggatcccttggcagtgagcgcagcttctgtagtgtccatgtccaatgacgttttgaaaccagagacgcccaaggggccaatcataatcagtaaaaacccatccaatggtattttctatggtccctccttcactaaaagagagtctctcaatgctagaatgtttttgaaatactatggtgcacacaaatttttagacacttacctccccgaggatttgaactctttatacatttactatcttatcaagttgttgggctttgaagttaaagatcaagcgcttatcggcaccatcaacagtattgtccatatcaactctcaagagcgtgttcaagatttgggaagtgcaatatctgtcacaaatgttgaagacccattggcaaaaaagcaaacagttcgtttgatcaaagatttgcaaagagcaattaacaaagttttatgtacaagattaagattatccaattttttcactattgatcattttattcaaaaattacataccgctagaaaaattttggtcttgactggtgcaggtgtttccacttctttagggatcccggacttcagatcttctgaggggttctattccaagatcaaacatttggggctcgatgatccccaagacgttttcaattacaatatatttatgcacgacccctctgttttctataatattgccaatatggttttacctccagaaaaaatttattctccattgcatagtttcattaagatgttacaaatgaaagggaaattattgagaaattatactcaaaacattgataatttggaatcttatgcgggaataagcacagataaattagtgcagtgccatggctcttttgctactgccacctgcgttacctgccattggaacttgcccggtgagaggatatttaataaaattagaaacctcgaacttccattgtgcccgtactgttacaaaaaaagaagagaatatttcccagagggatataataataaagtaggtgttgctgcatcccagggttctatgtctgaaaggcctccatatatccttaacagttatggcgttctcaaaccagatatcacattctttggcgaagcattgccaaataaatttcataagagcattcgcgaagatatcttagaatgtgatttgttgatttgcattgggacaagtttaaaagtagcgccagtgtctgaaatcgtaaacatggttccttcccacgttccccaagtcttgattaatcgtgatcccgtcaagcacgcagaatttgatttatctcttttggggtactgtgatgacattgcagctatggtagcccaaaaatgtggctggacgattccgcataagaaatggaacgatttgaagaacaagaactttaaatgccaagagaaggataagggcgtgtatgtcgttacatctgatgaacatcccaaaaccctctga

SEQ ID NO: 1729 - DNA, 2565 bp, Saccharomyces cerevisiae
atgtctaggaaaagaagtactaagcccaagccagcagctaaaatagctttgaaaaaagaaaatgaccagttcctcgaggcattgaaactatacgaagggaagcaatacaaaaaatctctcaagctgctagacgcaattttgaaaaaagacggtagtcacgttgattccttggctttaaagggtcttgatttatattctgtaggtgagaaagatgacgctgcttcctacgtggctaatgccatcagaaaaattgaaggcgcttcagcatcaccaatctgctgtcatgtattaggtatctacatgagaaacaccaaagagtacaaagaatctattaaatggttcacggcagctttgaacaatgggtccactaacaagcaaatatatagagacttagcaactttgcaatcacaaattggcgatttcaaaaatgctttagtgtccaggaaaaaatattgggaagcattccttggttaccgtgccaactggacatcattggctgtggcacaagatgtgaacggtgagaggcaacaagctattaacactttatctcagtttgaaaaactcgctgagggaaaaatatctgattccgagaaatatgaacacagcgagtgtttaatgtacaaaaacgacattatgtataaagctgccagtgataaccaagacaagttacaaaatgtattgaaacatttgaatgatatcgagccatgcgtctttgataaatttggtttattagagagaaaagcaactatttacatgaaattgggtcaattgaaagacgcgtccattgtttatagaactctgatcaagagaaatccagataattttaagtactacaaattactggaagtatccttgggaatccaaggtgacaataaattgaagaaggctttgtatggaaaacttgaacaattttatccaagatgcgaaccacccaaatttattccattaactttccttcaagacaaagaagagctcagcaaaaaattgagagaatatgttttgcctcaattggagcgcggtgttccagcaactttttccaacgtgaaacccctttaccaaagaaggaagtccaaggtttcaccactattggagaaaattgtccttgattatttgtccggattagatcctacgcaggatccaattccttttatttggaccaattattacttgtctcaacatttccttttccttaaggattttccgaaagcccaagaatatattgatgctgcccttgaccacaccccaactttagttgagttttacatcctcaaggcacgtatcctgaagcacttaggcctaatggacacagcggctggaattttggaggaaggtaggcaacttgatttgcaggatagatttatcaactgtaaaacggttaagtactttttaagggctaacaatatcgacaaggcggtggaagtcgcgtcccttttcaccaaaaacgatgattctgttaatggtattaaggacttacaccttgtggaagcttcttggttcatcgtagaacaggcagaagcctattatagactatacctggatagaaaaaagaaattagacgatttagcatcgctaaaaaaagaggttgaaagtgataaaagcgaacaaattgcgaatgatatcaaagaaaaccaatggcttgttcgcaaatataaaggtttggcgctgaaaagattcaacgctattccaaagttttataaacaattcgaagatgaccagttggatttccattcatactgtatgagaaaaggtacgccaagagcctatctggagatgttagaatggggaaaggcactttataccaaacccatgtatgttcgcgcaatgaaggaagcatcaaagctttactttcaaatgcatgatgatcgcttaaaaagaaagtccgattctttagatgaaaattcagatgaaatccaaaataatggccaaaatagtagcagccaaaagaaaaaagctaagaaggaagcagccgctatgaacaaacggaaagaaactgaagccaagagtgttgctgcttatccgagtgatcaagataacgatgtattcggcgaaaagttgattgaaacctccactccaatggaggacttcgctaccgaattttataataactactccatgcaagtcagagaagacgaaagggattatattttggactttgaatttaactacagaattggaaagttagctttgtgctttgcttctctaaacaaattcgctaagagatttggcaccacgagcggtttatttggtagtatggccattgttttgttacatgccacaagaaacgacaccccctttgatccaattttgaagaaagtagtcacgaagagccttgaaaaagagtattctgaaaatttcccattaaacgaaatatctaacaatagcttcgattggctgaatttctaccaagaaaaattcggtaagaatgatataaatggcctgctatttctgtatcgctatcgcgatgatgttccgatcggaagctctaatttgaaagaaatgattattagcagtctttctcccttggagcctcactcccagaacgaaattctacagtattacttgtag

SEQ ID NO: 1730 - DNA, 2565 bp, Artificial Sequence
  Description of Artificial Sequence: Synthetic polynucleotide
atgtctaggaaaagaagtactaagcccaagccagcagctaaaatagctttgaaaaaagaaaatgaccagttcctcgaggcattgaaactttacgaagggaagcaatacaaaaaatctctcaagttattagacgcaattttgaaaaaagacggtagtcacgttgattccttggctttaaagggtcttgatttatattctgtaggtgagaaagatgacgctgcttcctacgtggctaatgccatcagaaaaattgaaggcgcttctgcatctccaatctgctgtcatgtattaggtatctacatgagaaacaccaaagagtacaaagaatctattaaatggttcacggcagctttgaacaatgggtccactaacaagcaaatatatagagacttagcaactttgcaatctcaaattggcgatttcaaaaatgctttagtgtccaggaaaaaatattgggaagcattccttggttaccgtgccaactggacatctttggctgtggcacaagatgtgaacggtgagaggcaacaagctattaacactttatctcagtttgaaaaactcgctgagggaaaaatatctgattccgagaaatatgaacacagcgagtgtttaatgtacaaaaacgacattatgtataaagctgccagtgataaccaagacaagttacaaaatgtattgaaacatttgaatgatatcgagccatgcgtctttgataaatttggtttattagagagaaaagcaactatttacatgaaattgggtcaattgaaagacgcgtccattgtttatagaactttgatcaagagaaatccagataattttaagtactacaaattattggaagtatccttgggaatccaaggtgacaataaattgaagaaggctttgtatggaaaacttgaacaattttatccaagatgcgaaccacccaaatttattccattaactttccttcaagacaaagaagagctcagcaaaaaattgagagaatatgttttgcctcaattggagcgcggtgttccagcaactttttccaacgtgaaacccctttaccaaagaaggaagtccaaggtttctccattgttggagaaaattgtccttgattatttgtccggattagatcctacgcaggatccaattccttttatttggaccaattattacttgtctcaacatttccttttccttaaggattttccgaaagcccaagaatatattgatgctgcccttgaccacaccccaactttagttgagttttacatcctcaaggcacgtatcttgaagcacttaggcttaatggacacagcggctggaattttggaggaaggtaggcaacttgatttgcaggatagatttatcaactgtaaaacggttaagtactttttaagggctaacaatatcgacaaggcggtggaagtcgcgtcccttttcaccaaaaacgatgattctgttaatggtattaaggacttacaccttgtggaagcttcttggttcatcgtagaacaggcagaagcctattatagattatacttggatagaaaaaagaaattagacgatttagcatctttgaaaaaagaggttgaaagtgataaaagcgaacaaattgcgaatgatatcaaagaaaaccaatggcttgttcgcaaatataaaggtttggcgttgaaaagattcaacgctattccaaagttttataaacaattcgaagatgaccagttggatttccattcttactgtatgagaaaaggtacgccaagagcctatttggagatgttagaatggggaaaggcactttataccaaacccatgtatgttcgcgcaatgaaggaagcatccaagctttactttcaaatgcatgatgatcgcttaaaaagaaagtccgattctttagatgaaaattctgatgaaatccaaaataatggccaaaatagtagcagccaaaagaaaaaagctaagaaggaagcagccgctatgaacaaaagaaaagaaactgaagccaagagtgttgctgcttatccgagtgatcaagataacgatgtattcggcgaaaagttgattgaaacctccactccaatggaggacttcgctaccgaattttataataactactccatgcaagtcagagaagacgaaagggattatattttggactttgaatttaactacagaattggaaagttagctttgtgctttgcttctttgaacaaattcgctaagagatttggcaccacgagcggtttatttggtagtatggccattgttttgttacatgccacaagaaacgacaccccctttgatccaattttgaagaaagtagtcacgaagagccttgaaaaagagtattctgaaaatttcccattaaacgaaatatctaacaatagcttcgattggttaaatttctaccaagaaaaattcggtaagaatgatataaatggcttactttttttatatcgctatcgcgatgatgttccgatcggaagctctaatttgaaagaaatgattattagcagtctttctcccttggagcctcactcccagaacgaaattttacagtattacttgtga

SEQ ID NO: 1731 - DNA, 2097 bp, Saccharomyces cerevisiae
atgtatcgtacaagaagctctgacgaggtaaccacatcaacagatctaactagctcaagtgacgttgctacttcagttgacccaactacttctgttatcagttcaacttcagcagacccaactacttcagctgactcaactacctcgaccgttcaaaccacttcagctggtccaagtaacaacatcggcaattccactttggccaattccactacttttgcagttagttccacttcaattgacccaactagctcgagcgatgtgattacttcaaccgttcaaaccacttcaattgaaccaactacttctctcgtcagttcaaacgatattactacttcaacaagtctaaatatctctgtcgtgatttccacttccacggactctacatctttaattgagtctactacaacagttggtccacatgcctcatcaagtgttgctggtatgtatcgtacaagaagctctgacgaggtaaccacatcaacagatccaactagctcaagtgacgtggctacttcagcagatccaactagttcaagcgctgtgactactttagttgacccaactacttctgtagtcatttcaacctcagttgatcaaactagctcaagtgacgttgctacttcagttgacccaaccacttctgttatcagttcaacttcagcagacccaactacttcagctgactcaactacctcgaccgttcaaactacttcagttgatccaactagttctgtagtcagttccgctccagttgatccggctagttctgttgtcagtttaacttcatcttacccaactagctcaagcactgtgactatttctgctaattcaaacggttcagctactttagcggctcaaactacttcaattgatccagttagctccatcgttagttcaagcggtgcaactactatcatcagtagcgcctcaattgatccagctagttctgtagttagttcaacttcatctgaaccaaccagttttattgtcagttcaacctcagtttattcaaccagaccaagtggtccaactacttcaacagatctagctactttctctgacacaatcattctaagggtttcaaccacttcaaccagccaagatacccaaacagtatcatctagtctaactgatatggtttcctcaactggttcagctgatttgagcgtctcatccattcaaagatctcaagtagacccaagcactttcgctgtctcgaatagcccagtatatccaacagcttcgaccggatcaacttccacgggcattccaattgcgtcggaaagtctaagcctttctagacagcaaggaatttcggccacttcaagttcttcgattgtaactttaaccccagttgattcggcttcctcgagtaggtcaagcgcaacaagtataatcaagcctaatatgccagttagcagcaatgattcgaagacccaaagttctgtttctgtagttgacgcattccaatcaactaaatcttcatatcctagcataacttcagcagacccaacgactctagccagtgaaaatggtttagtcggctcatcttcctcagctcatccaatcacattagatagaacttatgcatcagctcacgcaagcgtcaccgatattgtcagtagagttactgactcgactcgccatacaacactagtaacttcaaacattaacattcagtctgaggttgggaacccaaattactcgggtcccaaagacactaccatcaccaaacaatctgcatttatgacttctcctgcatcaacgtctactataagtaacgttcaatcaactgcttccgtaatgaatcacagtattgaggacaatatttctgcagctgcctctctagaaagtgtttctggtacctcaactaaagattattctagtcaatccagtgccattcattatacaaattccttcacgaccaccactactaacgcatttatcacatcaaagcattccattgctgctgtatcaacaggagccattacatcatctgccagcatttcattaatcatggaaggcagcgcaaacattgaagcagtaggaaaattggtgtggctcgctgccgctcttcctctagctttcatttag

SEQ ID NO: 1732 - DNA, 2097 bp, Artificial Sequence
  Description of Artificial Sequence: Synthetic polynucleotide
atgtatcgtacaagaagctctgacgaggtaaccacatctacagatttgactagcagtagtgacgttgctacttctgttgacccaactacttctgttatcagttctacttctgcagacccaactactagtgctgactctactacctccaccgttcaaaccactagtgctggtccaagtaacaacatcggcaattccactttggccaattccactacttttgcagttagttccacttctattgacccaactagcagcagcgatgtgattacttctaccgttcaaaccacttctattgaaccaactacttctctcgtcagtagtaacgatattactacttctacaagtttgaatatctctgtcgtgatttccacttccacggactctacatctttaattgagtctactacaacagttggtccacatgcctcttccagtgttgctggtatgtatcgtacaagaagctctgacgaggtaaccacatctacagatccaactagcagtagtgacgtggctacttctgcagatccaactagtagtagcgctgtgactactttagttgacccaactacttctgtagtcatttctacctctgttgatcaaactagcagtagtgacgttgctacttctgttgacccaaccacttctgttatcagttctacttctgcagacccaactactagtgctgactctactacctccaccgttcaaactacttctgttgatccaactagttctgtagtcagttccgctccagttgatccggctagttctgttgtcagtttaacttcttcttacccaactagcagcagcactgtgactatttctgctaatagcaacggttctgctactttagcggctcaaactacttctattgatccagttagctccatcgttagtagtagcggtgcaactactatcatcagtagcgcctctattgatccagctagttctgtagttagttctacttcttctgaaccaaccagttttattgtcagttctacctctgtttattctaccagaccaagtggtccaactacttctacagatttggctactttctctgacacaatcattttaagggtttctaccacttctaccagccaagatacccaaacagtatcttctagtttgactgatatggtttccagcactggttctgctgatttgagcgtctcttccattcaaagatctcaagtagacccaagcactttcgctgtctccaatagcccagtatatccaacagctagcaccggatctacttccacgggcattccaattgcgtctgaaagtttaagcctttctagacagcaaggaatttctgccacttctagttcttccattgtaactttaaccccagttgattctgcttcctccagtaggagcagcgcaacaagtataatcaagcctaatatgccagttagcagcaatgattctaagacccaaagttctgtttctgtagttgacgcattccaatctactaaatcttcttatcctagcataacttctgcagacccaacgactttggccagtgaaaatggtttagtcggctcttcttcctctgctcatccaatcacattagatagaacttatgcatctgctcacgcaagcgtcaccgatattgtcagtagagttactgactctactcgccatacaacattggtaacttctaacattaacattcagtctgaggttgggaacccaaattactctggtcccaaagacactaccatcaccaaacaatctgcatttatgacttctcctgcaagcacgtctactataagtaacgttcaatctactgcttccgtaatgaatcacagtattgaggacaatatttctgcagctgcctctttggaaagtgtttctggtacctctactaaagattattctagtcaatccagtgccattcattatacaaattccttcacgaccaccactactaacgcatttatcacatccaagcattccattgctgctgtatctacaggagccattacatcttctgccagcatttctttaatcatggaaggcagcgcaaacattgaagcagtaggaaaattggtgtggctcgctgccgctcttcctttggctttcatttga

SEQ ID NO: 1733 - DNA, 987 bp, Saccharomyces cerevisiae
atgagccaacagaatatactacattatgatatggatgttacttccgtatcatgggtcaaggataacacataccagattactattcatgtcaaagccgtaaaagatatccctttgaaatatttatggtctttaaagattattggtgtcaacggtccctcaagcaccgtacaactttacggcaaaaatgagaagacatacctaatcagtgatccaacagattttacatccacttttcaggtttatgcttacccttcttctgacggttgcacagtttggatgccaaatttccaaatccagttcgaatatctacaaggtgatgctgctcagtactggcaaacttggcaatgggggacaaccaccttcgatttatcgacaggttgtaacaattatgacaatcaaggccactcacaaacggatttccctggattttattggacctaccagtgcaagggaaacaatgatggcacttgtacaaaagcctcgtcttcatccattactacttcatccattactacttcatccactactacttcatccactactacttcatccactactacttcatcctctactacttcatcctctactacttcatcctctactacttcatcctctactacttcatcctctactacttcatcctctactacttcatcctctactacttcatcctctactacttcatcctctactacttcatcctctactacttcatcctctactacttcatcctctacgaaaacttccactactacgtcatctactgtgaaaagctcttccactacatccattgattttactacttccgttgactcacatacttcatcaagcgtagccgatatttatcgttcaagaacatctactgatgtcaccacattagcagcttcaactagtcctttcagcagtttcacttcaagtgactctagtagttcaagcgatgtaaccagttcaaccattcaaactacttctgttgatccaaccacttaa

SEQ ID NO: 1734 - DNA, 987 bp, Artificial Sequence
  Description of Artificial Sequence: Synthetic polynucleotide
atgagccaacagaatatattacattatgatatggatgttacttccgtaagctgggtcaaggataacacataccagattactattcatgtcaaagccgtaaaagatatccctttgaaatatttatggtctttaaagattattggtgtcaacggtccctctagcaccgtacaactttacggcaaaaatgagaagacatacttgatcagtgatccaacagattttacatccacttttcaggtttatgcttacccttcttctgacggttgcacagtttggatgccaaatttccaaatccagttcgaatatttacaaggtgatgctgctcagtactggcaaacttggcaatgggggacaaccaccttcgatttatctacaggttgtaacaattatgacaatcaaggccactctcaaacggatttccctggattttattggacctaccagtgcaagggaaacaatgatggcacttgtacaaaagcctcttcttcttccattactacttcttccattactacttcttccactactacttcttccactactacttcttccactactacttcttcctctactacttcttcctctactacttcttcctctactacttcttcctctactacttcttcctctactacttcttcctctactacttcttcctctactacttcttcctctactacttcttcctctactacttcttcctctactacttcttcctctactacttcttcctctacgaaaacttccactactacgtcttctactgtgaaaagctcttccactacatccattgattttactacttccgttgactctcatacttcttctagcgtagccgatatttatcgttccagaacatctactgatgtcaccacattagcagcttccactagtcctttcagcagtttcacttctagtgactctagtagtagtagcgatgtaaccagttctaccattcaaactacttctgttgatccaaccacttga

SEQ ID NO: 1735 - DNA, 1389 bp, Saccharomyces cerevisiae
atgcaaagaaataataggttaagaaatttgtttacagtgccagtaataatggctcgacaactcaaaaggaatgcattatctgcaggtcttgcttttgcaggtaatgcaacctcaaatgagtttgatgaacatttgcaaaatgaggttgaaagagagagggaaattcaaaagaaaaaaaaaataaagcgaactcaatcaaaaaaatcgccagatttgattaataaatctacttttcaatcacgaacgataggcagcaaaaaagagaaacatagacaactagatccagagtatgaaattgtcatcgatggccctctaaggaaaatcaagccctaccattttacgtacaggaccttttgcaaagagcgttggagagataaaaaattggttgatgtctttatatctgaatttcgagatcgtgaatctgaatattataaaagaacaatcgaaaacggggacgttcatataaacgatgaaactgcggacttatctactgtaattcgcaatggtgacctgattacgcatcaggtacatagacatgaacctccagtcacttccaggcctatcaaagttatttttgaagatgataacataatggttattgataaaccgagcggtatacctgttcacccaactggccgatatcggttcaatacaattacgaaaatgcttcaaaataatctcggatttgttgtgaacccatgtaataggttagataggcttacaagtggattaatgtttttggcaaaaactccgaagggagccgataatatcggcgatcaactaaaagctcgagaagtcactaaggaatacgtggccaaggtagttggagaatttccagaaacggaagtaattgttgaaaaacctctaaaactgatcgagccaaggcttgctcttaatgcagtttgtcaaatggacgagaaaggagccaaacatgcaaaaactgtttttaacagaatcagctacgacggtaaaacgagtattgtaaagtgcaaaccgcttaccgggcgatcacatcaaattagagtacatttacagtacttaggccacccaattgctaacgatcctatttattccaatgatgaagtatggggtaacaatctcggaaaaggcggccaggctgacttcgatatagttattactaagctagacgaaatagggaaaagaaaacctgctaaaagttggttccatagtaatggcgggtacggtgaggtattaaggcaagaaaaatgttctatttgtgaatctgatttgtatactgatcctggccccaatgatcttgatctgtggttacatgcctatctatacgaatcaactgagactgaagaaggaaccgaaaagaaaaagtggtgctacaaaacagagtatccagaatgggctctgagaagatag

SEQ ID NO: 1736 - DNA, 1389 bp, Artificial Sequence
  Description of Artificial Sequence: Synthetic polynucleotide
atgcaaagaaataataggttaagaaatttgtttacagtgccagtaataatggctagacaactcaaaaggaatgcattatctgcaggtcttgcttttgcaggtaatgcaacctctaatgagtttgatgaacatttgcaaaatgaggttgaaagagagagggaaattcaaaagaaaaaaaaaataaagagaactcaaagtaaaaaatctccagatttgattaataaatctacttttcaatctaggacgataggcagcaaaaaagagaaacatagacaattggatccagagtatgaaattgtcatcgatggccctttaaggaaaatcaagccctaccattttacgtacaggaccttttgcaaagagcgttggagagataaaaaattggttgatgtctttatatctgaatttagagatcgtgaatctgaatattataaaagaacaatcgaaaacggggacgttcatataaacgatgaaactgcggacttatctactgtaattcgcaatggtgacttgattacgcatcaggtacatagacatgaacctccagtcacttccaggcctatcaaagttatttttgaagatgataacataatggttattgataaaccgagcggtatacctgttcacccaactggcagatatagattcaatacaattacgaaaatgcttcaaaataatctcggatttgttgtgaacccatgtaataggttagataggcttacaagtggattaatgtttttggcaaaaactccgaagggagccgataatatcggcgatcaattgaaagctagagaagtcactaaggaatacgtggccaaggtagttggagaatttccagaaacggaagtaattgttgaaaaacctttgaaattaatcgagccaaggcttgctcttaatgcagtttgtcaaatggacgagaaaggagccaaacatgcaaaaactgtttttaacagaatcagctacgacggtaaaacgagtattgtaaagtgcaaaccgcttaccgggaggagccatcaaattagagtacatttacagtacttaggccacccaattgctaacgatcctatttattccaatgatgaagtatggggtaacaatctcggaaaaggcggccaggctgacttcgatatagttattactaagttggacgaaatagggaaaagaaaacctgctaaaagttggttccatagtaatggcgggtacggtgaggtattaaggcaagaaaaatgttctatttgtgaatctgatttgtatactgatcctggccccaatgatcttgatttatggttacatgcctatttgtacgaatctactgagactgaagaaggaaccgaaaagaaaaagtggtgctacaaaacagagtatccagaatgggctttgagaagatga

SEQ ID NO: 1737 - DNA, 2886 bp, Saccharomyces cerevisiae
atgataactgagggatttcccccgaatttaaacgcgttgaaagggtcatccttactagaaaagagagttgattctctccgacagcttaacactaccacggttaaccagctgctggggttgccggggatgacctctacattcacggctccgcaactgttgcagttaagaataatagctataactgcgtctgccgtgtcccttattgccggttgcctcggaatgttcttcctttctaaaatggataagagacgaaaagtcttcagacatgatctcatcgcatttttgataatttgcgactttcttaaagcttttattctgatgatttatcccatgattatccttattaataatagtgtgtatgcaacacctgcattttttaataccttgggttggtttacggcctttgccatcgaaggtgcagacatggccataatgatattcgccatacattttgctattttgatcttcaagcctaattggaaatggcgaaataaaagatcgggaaatatggagggtggcttgtacaaaaaaaggtcatatatctggccaattactgcattagtacctgccattttagcaagcttagccttcattaattataataaactcaatgacgattctgacaccactattatactggataataataactacaactttcccgattctcccaggcaaggtggctacaaaccttggagtgcatggtgctatttaccacccaagccgtactggtataaaattgttttaagctggggtcccagatatttcattattattttcatatttgcagtctacctcagtatttatattttcattaccagtgaaagtaaaagaattaaagcgcaaattggagactttaaccataacgtactagaggaagagaaagaaaagaaaaaattatttgggctcggtcactggggaaaagccaaatggtatttcagatcctattttaaattgccattgctacatcttttgagaaatttaaagaattttttcaccatttcgttcatagatccgaatgaggaaacagacgattcaggtagtagtaatggaactttcaattttggtgagagttcgaatgagatacctacactattcagaaaaacaaatacaggtagtgatgagaatgtctcggcaagtggtggagttcgcttacttgactataacagtgctaaaccactcgatatgtccaaatatgcaatgtctgaacagccagatttggaaagaaataatccttttgattgtgaaaatgacatcacactcaatccttcggaactagtatccaagcaaaaggagcataaagttacttttagtgttgaaaatgaaggactggatacaagaaaaagttcaatgctgggacatcagactttctcttgccaaaattctctagaatctcctttagcaatgtatgataataagaacgataacagcgacataactagtaacattaaggaaaaaggaggcatcatcaacaacaacagtaacaacgacgacgacgacaacaacaacaataacgataacgataacgataacaataatagcaataataataataacaataataataataacaataataataataacaataataataacaataacaacaacaacaacaataataataataatagtaataatattaaaaataacgttgataacaataatactaatccagccgataatattcctacactttctaatgaagcatttactccgtctcaacaattttcacaggagagagtgaataataatgcagacagatgcgaaaattcaagtttcaccaacgtacaacagcatttccaagcccaaacctacaaacaaatgaaaaaacgtagggcacaaattcaaaagaatctaagggcaatattcatttatccactgtcgtatattgggatatggcttttccccatcattgcagatgcgttgcaatacaatcatgaaataaagcatgggcctaccatgtgggtgacatacattgacacttgcgttcgaccattaagttgtctcgtcgacgtcattgtttacctgttcaaggaaaaaccttggaactattcatgggcaaaaacagaatcaaaatatctcattgaaaaatatattctgaaaggagagcttggtgaaaaggaaattctgaagttttgtcacagcaattgggggaaaagaggttggtattatcgtggtaagtggaagaaaagaaaatgctggaaatattctacaaaccctctgaagcgtatactgtggtttgttgaacgcttctttaaacaattgtttgaactaaaactacactttagtttttatgacaattgtgacgattttgaatactgggaaaactactattcagccaaagattcaaacgataataaacgcacagaatctgatgagactaaaacgaatagtagcgatcgctcccttccatcaaattcacttgaactacaggcaatgcttaataacatcacggccgaagaggttgaagtgcccttgttttggaggatcattcatcatattccaatgcttggcggaatagatcttgatgagttaaacagattgttgaaaatacggtacaataacgaccatttttctctacccgggttgaaatttgcattaaaccaaaataaaagtcacgataaacatcaggacgtctcaactaacagtatggtcaaatccagcttcttttcaagcaatattgtcacaaacgatgatgagaatagcattgaagaggataagaatttacgctattcagatgctagtgcatctgaaaattatctggtcaagcccacaataccaggtacgactcctgatccaataattgaggcgcagaacgataatgatagtagtgatagtagcggcatagatttgatagccttcttaagaaatggaccattataa

SEQ ID NO: 1738 - DNA, 2886 bp, Artificial Sequence
  Description of Artificial Sequence: Synthetic polynucleotide
atgataactgagggatttcccccgaatttaaacgcgttgaaagggtcttccttattggaaaagagagttgattctctccgccagcttaacactaccacggttaaccagttattagggttgccggggatgacctctacattcacggctccgcaattattgcagttaagaataatagctataactgcgtctgccgtgtcccttattgccggttgcctcggaatgttcttcctttctaaaatggataagagaagaaaagtcttcagacatgatctcatcgcatttttgataatttgcgactttcttaaagcttttattttgatgatttatcccatgattatccttattaataatagtgtgtatgcaacacctgcattttttaataccttgggttggtttacggcctttgccatcgaaggtgcagacatggccataatgatattcgccatacattttgctattttgatcttcaagcctaattggaaatggagaaataaaagatctggaaatatggagggtggcttgtacaaaaaaaggagttatatctggccaattactgcattagtacctgccattttagcaagcttagccttcattaattataataaactcaatgacgattctgacaccactattatattggataataataactacaactttcccgattctcccaggcaaggtggctacaaaccttggagtgcatggtgctatttaccacccaagccgtactggtataaaattgttttaagctggggtcccagatatttcattattattttcatatttgcagtctacctcagtatttatattttcattaccagtgaaagtaaaagaattaaagcgcaaattggagactttaaccataacgtattggaggaagagaaagaaaagaaaaaattatttgggctcggtcactggggaaaagccaaatggtatttcagatcctattttaaattgccattgttgcatcttttgagaaatttaaagaattttttcaccatttctttcatagatccgaatgaggaaacagacgattctggtagtagtaatggaactttcaattttggtgagagtagtaatgagatacctacattgttcagaaaaacaaatacaggtagtgatgagaatgtctctgcaagtggtggagttcgcttacttgactataacagtgctaaaccactcgatatgtccaaatatgcaatgtctgaacagccagatttggaaagaaataatccttttgattgtgaaaatgacatcacactcaatccttctgaattggtatccaagcaaaaggagcataaagttacttttagtgttgaaaatgaaggattagatacaagaaaaagttctatgcttggacatcagactttctcttgccaaaattctttggaatctcctttagcaatgtatgataataagaacgataacagcgacataactagtaacattaaggaaaaaggaggcatcatcaacaacaacagtaacaacgacgacgacgacaacaacaacaataacgataacgataacgataacaataatagcaataataataataacaataataataataacaataataataataacaataataataacaataacaacaacaacaacaataataataataatagtaataatattaaaaataacgttgataacaataatactaatccagccgataatattcctacactttctaatgaagcatttactccgtctcaacaattttcccaggagagagtgaataataatgcagacagatgcgaaaatagtagtttcaccaacgtacaacagcatttccaagcccaaacctacaaacaaatgaaaaaacgtagggcacaaattcaaaagaatttaagggcaatattcatttatccattatcttatattgggatatggcttttccccatcattgcagatgcgttgcaatacaatcatgaaataaagcatgggcctaccatgtgggtgacatacattgacacttgcgttagaccattaagttgtctcgtcgacgtcattgtttaccttttcaaggaaaaaccttggaactattcttgggcaaaaacagaaagtaaatatctcattgaaaaatatattttgaaaggagagcttggtgaaaaggaaattttgaagttttgtcacagcaattgggggaaaagaggttggtattatcgtggtaagtggaagaaaagaaaatgctggaaatattctacaaaccctttgaagcgtatattatggtttgttgaacgcttctttaaacaattgtttgaattgaaattacactttagtttttatgacaattgtgacgattttgaatactgggaaaactactattctgccaaagattccaacgataataaacgcacagaatctgatgagactaaaacgaatagtagcgatcgctcccttccatccaattctcttgaattacaggcaatgcttaataacatcacggccgaagaggttgaagtgcccttgttttggaggatcattcatcatattccaatgcttggcggaatagatcttgatgagttaaacagattgttgaaaataagatacaataacgaccatttttctttacccgggttgaaatttgcattaaaccaaaataaaagtcacgataaacatcaggacgtctctactaacagtatggtcaaatccagcttcttttctagcaatattgtcacaaacgatgatgagaatagcattgaagaggataagaatttacgctattctgatgctagtgcatctgaaaattatttagtcaagcccacaataccaggtacgactcctgatccaataattgaggcgcagaacgataatgatagtagtgatagtagcggcatagatttgatagccttcttaagaaatggaccattatga

SEQ ID NO: 1739 - DNA, 1254 bp, Saccharomyces cerevisiae
atgctggcaagatatttaaatttaataggacggaggagtgcttcaccgtacagaccacagcggctaccggcaaagtttgacaacgtgatagtggcaatgtcatctggggtagattcctctgtggcggcagcactatttgccggagaatttccaaatacccgaggagtatatatgcagaactggtctgaatcacaatctttggacgaccctggcaaggagccatgctacgagagggattggagagatgtgaaccgtgtcgctaagcatttgaacatccgagttgacaaagttaattttgagcaagattattggatagatgtatttgaaccaatgttgagaggctacagtgaagggtcgacacccaatccagatatcggttgcaacaagttcgtcaagttcggcaagctgagagagtggctggatgagaagtatgggacgggtaactattggcttgttactggtcattacgcccgagttatgcaggaaatgaatggaaaaggattattccatttactgagaagcatttataggcccaaggatcaaagctattacctttcacaaatcaactccactgttttgtcatctttgttgctacccattggccatctaacgaaaccagaagtacgagatttagcgaagtatgcaggcctcccgactgcagaaaagcctgattcacagggcatatgcttcgtcaacaattcccagcatgggaagttcaagaattttttaaagcactacctacccagttcaccgggtgatatcattaccgttgacccacaatccggtgccaaaacgacatggggcagacacgatggattgtggtcttacacaattggacagaaagtgggcatatccatgccacaagctgaccctaattaccaagggacctggtttgtcagtgaaaaactaagggataccaacgaaatcttgatagtcagaggaagagataatccggcgctatacagtgacactatgcgaatcgaaaacttttcgtctttgggccccagggaggacactataaacgctttccaaaatactggtgccttgacattacaattccggtccctgcaggtcccagtccaaattaaatcgtgcaaactgaatcgctctgccgacaacctcgacataacaatacacttagcctcaaaacaacgtgccataactcctgggcaatcgtgctgtctatatatcgacgatagagtccttgggagtgggcccatttcccatgttaataataatgacacccatgcatag

SEQ ID NO: 1740 - DNA, 1254 bp, Artificial Sequence
  Description of Artificial Sequence: Synthetic polynucleotide
atgttagcaagatatttaaatttaataggaagaaggagtgcttctccgtacagaccacagaggttaccggcaaagtttgacaacgtgatagtggcaatgtcttctggggtagattcctctgtggcggcagcattatttgccggagaatttccaaataccagaggagtatatatgcagaactggtctgaatctcaatctttggacgaccctggcaaggagccatgctacgagagggattggagagatgtgaaccgtgtcgctaagcatttgaacatcagagttgacaaagttaattttgagcaagattattggatagatgtatttgaaccaatgttgagaggctacagtgaagggtctacacccaatccagatatcggttgcaacaagttcgtcaagttcggcaagttgagagagtggcttgatgagaagtatgggacgggtaactattggcttgttactggtcattacgccagagttatgcaggaaatgaatggaaaaggattattccatttattaagaagcatttataggcccaaggatcaaagctattacctttctcaaatcaactccactgttttgtcttctttgttgttgcccattggccatttaacgaaaccagaagtaagagatttagcgaagtatgcaggcctcccgactgcagaaaagcctgattctcagggcatatgcttcgtcaacaattcccagcatgggaagttcaagaattttttaaagcactacttgcccagttctccgggtgatatcattaccgttgacccacaatccggtgccaaaacgacatggggcagacacgatggattgtggtcttacacaattggacagaaagtgggcatatccatgccacaagctgaccctaattaccaagggacctggtttgtcagtgaaaaattgagggataccaacgaaatcttgatagtcagaggaagagataatccggcgttgtacagtgacactatgagaatcgaaaacttttcttctttgggccccagggaggacactataaacgctttccaaaatactggtgccttgacattacaattcagatccttacaggtcccagtccaaattaaaagttgcaaattgaatcgctctgccgacaacctcgacataacaatacacttagcctccaaacaacgtgccataactcctgggcaaagttgctgtttgtatatcgacgatagagtccttgggagtgggcccatttcccatgttaataataatgacacccatgcatga

SEQ ID NO: 1741 - DNA, 2988 bp, Saccharomyces cerevisiae
atggcaggcgtgcagaaaagaaaaagggatctcgaagatcaagacgacaatggaagcgaggaggacgacatcgcctttgatattgcaaatgaaattgccttaaatgatagtgagagtgatgctaacgactccgatagtgaagttgaagctgattatggtcccaacgatgtccaggatgtgatcgagtacagctcagatgaagaagaaggagtgaacaataagaagaaggctgaaaacaaggacatcaagaaaaaaaagaatagtaagaaggaaatagcagcatttccaatgttagaaatgtcagatgatgaaaacaatgcatctggtaaaactcaaaccggtgatgatgaggatgatgtcaatgaatatttctccacaaataacttggagaaaacaaagcataaaaaaggtagttttcccagctttggcctatccaaaattgtattgaacaatattaaaaggaagggatttcgccaacccactcctattcaaaggaagactatcccattaattttgcaaagtagggatattgttggtatggcacgtaccggttctggtaagactgcagcattcatcttgccaatggtggaaaaattgaaaagtcactcaggtaaaattggcgcccgtgcagtcatcttatcgccttccagagaattagccatgcagactttcaacgttttcaaggattttgccagaggaacagaactaagaagcgtcctcttgactggtggtgattccttggaagaacaatttggcatgatgatgaccaacccagacgttattattgcaacacctggtagatttttacatctgaaagttgaaatgaacctcgatttgaagagtgttgagtacgttgttttcgatgaagctgataggttgttcgaaatgggttttcaagaacagttgaatgaattacttgcatctttgcctacaacaagacagactttgttgttttctgctactctacctaattcattggttgattttgttaaggctggtttggttaatccagttttggttcgtttggacgcggaaacgaaagtttcagagaacttagaaatgctttttctatccagtaaaaacgcagatagagaggcgaacctattatatattttgcaagaaatcataaagattccgttagccactagtgaacaacttcaaaagctgcaaaatagtaacaatgaggcagatagtgactcagatgatgaaaatgatcgccaaaagaagaggaggaatttcaagaaggaaaagttccgtaaacaaaaaatgcctgcagctaatgaacttccttctgaaaaagcaactattctgttcgttccaacaagacatcatgtggaatacatttctcaactcttaagagactgcggatacttgatttcgtacatctacggtactttggaccaacatgctcgtaaacgtcaattatataattttagggcgggcttaacttccattttggttgttacagatgttgctgcaagaggtgtcgatattccaatgttagccaatgttattaattacacattacctggttcatcaaaaatttttgtacatcgtgtaggtagaactgcaagagccggtaacaaaggttgggcatattccattgtcgctgaaaatgaattaccttacctattagatttggagctatttttggggaaaaaaattcttctaacaccaatgtacgatagtctagtcgacgtgatgaagaaaaggtggatagatgaaggaaaaccggaatatcaatttcaacccccaaagctttcttacacaaaaagactcgttctaggttcatgtccaagactggatgttgaaggcttaggtgatctttataagaatctgatgtcctctaattttgaccttcagttggcgaagaaaacagccatgaaggcagaaaaactttactacagaacacgcacttccgcctcccctgaatctttaaagagaagtaaagagatcatttcttctggctgggatgctcaaaatgcattttttggtaaaaatgaagagaaggaaaaattggattttttggctaaattgcaaaacagaagaaacaaggaaacggtatttgagttcaccagaaacccagacgatgaaatggcagtgtttatgaaaaggagaagaaagcaattagcgccaattcaacgaaaggcgactgaaagaagggaactattagaaaaggaaagaatggctggtctttcacattctatcgaagatgaaattttgaaaggtgacgatggtgagacaggttacaccgtgtcagaggatgccttaaaagaatttgaagatgcggaccaattattagaagcacaggaaaacgaaaacaaaaagaaaaagaaaccgaagtcttttaaggatccaactttctttttaagtcactatgcgccagctggtgacatacaagataaacaattacagataaccaatgggttcgctaatgatgctgctcaagcggcttacgatttaaatagcgatgataaagtgcaagttcataagcaaacagcgaccgtaaaatgggataaaaaaagaaaaaaatatgttaatactcaaggtattgataacaagaaatatattattggtgaaagtggccaaaaaatcgcggcaagcttcaggtctggtagatttgatgattggtcgaaggcaagaaatttgaaaccattgaaggtaggttcgagagaaacaagcataccatctaacttgctcgaagacccttcacaaggtcctgctgcaaatggtagaaccgtccgtgggaaattcaagcataaacaaatgaaagcgcctaaaatgccagataaacacagagacaattattattcgcaaaagaagaaggtggaaaaggctctacaaagtggaatttccgtcaagggatataataacgctccgggtctgcgaagcgaattgaagtccactgagcaaattagaaaggacaggattatagcagagaaaaaacgtgcgaagaatgctcgtccttccaaaaagcgtaaattttag

SEQ ID NO: 1742 - DNA, 2988 bp, Artificial Sequence
  Description of Artificial Sequence: Synthetic polynucleotide
atggcaggcgtgcagaaaagaaaaagggatctcgaagatcaagacgacaatggaagcgaggaggacgacatcgcctttgatattgcaaatgaaattgccttaaatgatagtgagagtgatgctaacgactccgatagtgaagttgaagctgattatggtcccaacgatgtccaggatgtgatcgagtacagcagtgatgaagaagaaggagtgaacaataagaagaaggctgaaaacaaggacatcaagaaaaaaaagaatagtaagaaggaaatagcagcatttccaatgttagaaatgagtgatgatgaaaacaatgcatctggtaaaactcaaaccggtgatgatgaggatgatgtcaatgaatatttctccacaaataacttggagaaaacaaagcataaaaaaggtagttttcccagctttggcttatccaaaattgtattgaacaatattaaaaggaagggatttcgccaacccactcctattcaaaggaagactatcccattaattttgcaaagtagggatattgttggtatggcacgtaccggttctggtaagactgcagcattcatcttgccaatggtggaaaaattgaaaagtcactctggtaaaattggcgcccgtgcagtcatcttatctccttccagagaattagccatgcagactttcaacgttttcaaggattttgccagaggaacagaattgagaagcgtcctcttgactggtggtgattccttggaagaacaatttggcatgatgatgaccaacccagacgttattattgcaacacctggtagatttttacatttgaaagttgaaatgaacctcgatttgaagagtgttgagtacgttgttttcgatgaagctgataggttgttcgaaatgggttttcaagaacagttgaatgaattacttgcatctttgcctacaacaagacagactttgttgttttctgctactttacctaattctttggttgattttgttaaggctggtttggttaatccagttttggttcgtttggacgcggaaacgaaagtttctgagaacttagaaatgctttttctttccagtaaaaacgcagatagagaggcgaacttattatatattttgcaagaaatcataaagattccgttagccactagtgaacaacttcaaaagttacaaaatagtaacaatgaggcagatagtgacagtgatgatgaaaatgatcgccaaaagaagaggaggaatttcaagaaggaaaagttccgtaaacaaaaaatgcctgcagctaatgaacttccttctgaaaaagcaactattcttttcgttccaacaagacatcatgtggaatacatttctcaactcttaagagactgcggatacttgatttcttacatctacggtactttggaccaacatgctcgtaaacgtcaattatataattttagggcgggcttaacttccattttggttgttacagatgttgctgcaagaggtgtcgatattccaatgttagccaatgttattaattacacattacctggttcttctaaaatttttgtacatcgtgtaggtagaactgcaagagccggtaacaaaggttgggcatattccattgtcgctgaaaatgaattaccttacttattagatttggagttatttttggggaaaaaaattcttttaacaccaatgtacgatagtttagtcgacgtgatgaagaaaaggtggatagatgaaggaaaaccggaatatcaatttcaacccccaaagctttcttacacaaaaagactcgttttaggttcttgtccaagattagatgttgaaggcttaggtgatctttataagaatttaatgtcctctaattttgaccttcagttggcgaagaaaacagccatgaaggcagaaaaactttactacagaacacgcacttccgcctcccctgaatctttaaagagaagtaaagagatcatttcttctggctgggatgctcaaaatgcattttttggtaaaaatgaagagaaggaaaaattggattttttggctaaattgcaaaacagaagaaacaaggaaacggtatttgagttcaccagaaacccagacgatgaaatggcagtgtttatgaaaaggagaagaaagcaattagcgccaattcaaagaaaggcgactgaaagaagggaattattagaaaaggaaagaatggctggtctttctcattctatcgaagatgaaattttgaaaggtgacgatggtgagacaggttacaccgtgtctgaggatgccttaaaagaatttgaagatgcggaccaattattagaagcacaggaaaacgaaaacaaaaagaaaaagaaaccgaagtcttttaaggatccaactttctttttaagtcactatgcgccagctggtgacatacaagataaacaattacagataaccaatgggttcgctaatgatgctgctcaagcggcttacgatttaaatagcgatgataaagtgcaagttcataagcaaacagcgaccgtaaaatgggataaaaaaagaaaaaaatatgttaatactcaaggtattgataacaagaaatatattattggtgaaagtggccaaaaaatcgcggcaagcttcaggtctggtagatttgatgattggtccaaggcaagaaatttgaaaccattgaaggtaggttccagagaaacaagcataccatctaacttgctcgaagacccttctcaaggtcctgctgcaaatggtagaaccgtccgtgggaaattcaagcataaacaaatgaaagcgcctaaaatgccagataaacacagagacaattattattctcaaaagaagaaggtggaaaaggctttacaaagtggaatttccgtcaagggatataataacgctccgggtttaagaagcgaattgaagtccactgagcaaattagaaaggacaggattatagcagagaaaaaacgtgcgaagaatgctcgtccttccaaaaagcgtaaattttga

SEQ ID NO: 1743 - DNA, 1593 bp, Saccharomyces cerevisiae
atgaatttacttgaaacaaggaggtccttgttggaggagatggagattattgaaaatgccatagcagaaagaattcagcggaatccagagttatattaccactatatacaagaatcgagcaaggtgtttcctgatactaaactgcctagatcatcgttgattgcagagaataaaatatacaagtttaaaaaggttaagaggaagagaaaacagataattttgcagcaacatgagataaatatttttcttcgagactaccaagagaaacaacaaacttttaataaaatcaatcgtccagaagagacacaggaggatgacaaggatttgcctaatttcgaaagaaaactacaacagctagagaaggaactgaaaaatgaagatgagaactttgaattggatatcaactctaaaaaagacaaatacgctttattctcatcttcttctgatccatcgaggcgcacaaatatattgtctgacagagctcgagacctagacttaaatgaaatatttactagagatgagcaatatggtgaatatatggagctggaacaatttcattctttatggttgaatgtaattaaacggggcgattgttcactgcttcaatttctcgacatcctagaattatttttggacgacgagaaatatttgctaaccccaccgatggatcgcaagaatgatagatacatggcctttttgctaaagttgagcaaatatgtagaaacttttttcttcaaaagttatgctttgcttgacgctgcggcagttgaaaatctaatcaaatctgacttcgaacattcatactgtaggggatctcttcggtccgaggcaaaaggtatctattgccctttttgttcgaggtggttcaagacatcttccgttttcgaaagccatttagtagggaaaattcataagaaaaatgaatctaaaagaagaaattttgtgtactctgaatataaactgcatcggtatttgaaatatttaaatgatgaattttctcgaacgagaagttttgttgaaagaaaactggcatttactgcaaatgaaagaatggcagaaatggatatcttaacacagaagtatgaagcacctgcatatgattcgacggaaaaagagggggccgaacaagtggatggtgagcagagagatggtcaactgcaagaagagcacctctctggtaaatcgtttgacatgccattgggtccggatggattgcctatgccatactggctatacaaactgcatgggcttgacagagagtatcgctgcgaaatttgttcgaataaagtttataatgggcgacgcacttttgaaagacatttcaacgaagaaagacatatttatcacttgcgatgccttggtatcgaaccttcttcagtattcaagggcataaccaaaattaaggaggcacaagagctctggaaaaatatgcaggggcagtcacagttgacatctattgcagcagttcccccaaagcctaatccttcacaactaaaagttcctacagaattagaactagaagaagaagacgaagaaggaaatgtaatgagtaagaaggtctacgatgaacttaagaagcaaggtttggtgtga

SEQ ID NO: 1744 - DNA, 1593 bp, Artificial Sequence
  Description of Artificial Sequence: Synthetic polynucleotide
atgaatttacttgaaacaaggaggtccttgttggaggagatggagattattgaaaatgccatagcagaaagaattcagagaaatccagagttatattaccactatatacaagaaagtagcaaggtgtttcctgatactaaattacctagatcttctttgattgcagagaataaaatatacaagtttaaaaaggttaagaggaagagaaaacagataattttgcagcaacatgagataaatatttttcttcgtgactaccaagagaaacaacaaacttttaataaaatcaatcgtccagaagagacacaggaggatgacaaggatttgcctaatttcgaaagaaaattacaacagttggagaaggaattgaaaaatgaagatgagaactttgaattggatatcaactctaaaaaagacaaatacgctttattcagttcttcttctgatccatctaggcgcacaaatatattgtctgacagagctagagacttggacttaaatgaaatatttactagagatgagcaatatggtgaatatatggagttagaacaatttcattctttatggttgaatgtaattaaaagaggcgattgttctttacttcaatttctcgacatcttggaattatttttggacgacgagaaatatttgttgaccccaccgatggatcgcaagaatgatagatacatggcctttttgttgaagttgagcaaatatgtagaaacttttttcttcaaaagttatgctttgcttgacgctgcggcagttgaaaatttgatcaaatctgacttcgaacattcttactgtaggggatctcttcgttccgaggcaaaaggtatctattgccctttttgttctaggtggttcaagacatcttccgttttcgaaagccatttagtagggaaaattcataagaaaaatgaatctaaaagaagaaattttgtgtactctgaatataaattgcatcgttatttgaaatatttaaatgatgaattttctaggacgagaagttttgttgaaagaaaattggcatttactgcaaatgaaagaatggcagaaatggatatcttaacacagaagtatgaagcacctgcatatgattctacggaaaaagagggggccgaacaagtggatggtgagcagagagatggtcaattacaagaagagcacctctctggtaaaagttttgacatgccattgggtccggatggattgcctatgccatactggttatacaaattgcatgggcttgacagagagtatcgctgcgaaatttgttctaataaagtttataatgggcgtcgcacttttgaaagacatttcaacgaagaaagacatatttatcacttgagatgccttggtatcgaaccttcttctgtattcaagggcataaccaaaattaaggaggcacaagagctctggaaaaatatgcaggggcagtctcagttgacatctattgcagcagttcccccaaagcctaatccttctcaattgaaagttcctacagaattagaattggaagaagaagacgaagaaggaaatgtaatgagtaagaaggtctacgatgaacttaagaagcaaggtttggtgtga

SEQ ID NO: 1745 - DNA, 1176 bp, Saccharomyces cerevisiae
atggacccacataatccaattgtccttgatcagggtactggtttcgtcaaaattggtcgtgctggcgagaatttcccagattacacgtttccttctattgttggtagacccatcttgagggcggaagaacgtgccagcgttgctacaccattaaaggacattatgattggtgatgaggcaagtgaagttcgctcttatctgcaaatatcttatcctatggaaaacggtattattaagaattggacagatatggaacttctttgggattacgcctttttcgagcaaatgaaactaccatccacctccaacggtaagattttactaacggaacctccaatgaatccgctgaaaaatagggaaaaaatgtgtgaggtaatgttcgaaaaatacgattttggcggagtttatgttgccatccaagctgttctagcattgtacgcacaaggtttgtcttcaggagtcgtcgtcgattccggtgacggtgttactcatatagtcccagtttacgaatctgtcgttttgagccacttaacaagaagattagatgttgcgggtagagacgttactaggcatttgattgatctgctttctcgtcgtggttatgcatttaacagaactgcagatttcgaaactgtgcgtcagataaaggaaaaattatgttatgtttcatatgatttagacctagatacaaaattggctagagaaacaaccgcccttgtggaatcgtatgagttaccagatggcaggacaatcaaagtgggacaagagagatttgaagcaccagaatgtttgttccaacctggtttggttgacgttgaacaacctggcgtgggcgagctgttatttaatactgtgcaatcggctgatgttgatatcagaagttccctgtataaggccattgttctttcaggtggttcaagtatgtacccagggctgccttcgagattagagaaagaattgaaacaattatggtttagtagagttttacacaatgacccttcaagacttgataaattcaaagttagaattgaagatcctccaaggagaaagcatatggttttcattggtggtgccgttttagctagtatcatggctgataaagaccacatgtggttgtctaagcaagaatggcaagaaagcgggccatctgcaatgactaaatttggtccaagatag

SEQ ID NO: 1746 - DNA, 1176 bp, Artificial Sequence
  Description of Artificial Sequence: Synthetic polynucleotide
atggacccacataatccaattgtccttgatcagggtactggtttcgtcaaaattggtcgtgctggcgagaatttcccagattacacgtttccttctattgttggtagacccatcttgagggcggaagaacgtgccagcgttgctacaccattaaaggacattatgattggtgatgaggcaagtgaagttcgctcttatttacaaatatcttatcctatggaaaacggtattattaagaattggacagatatggaacttctttgggattacgcctttttcgagcaaatgaaattaccatccacctccaacggtaagattttattgacggaacctccaatgaatccgttaaaaaatagggaaaaaatgtgtgaggtaatgttcgaaaaatacgattttggcggagtttatgttgccatccaagctgttttagcattgtacgcacaaggtttgtcttctggagtcgtcgtcgattccggtgacggtgttactcatatagtcccagtttacgaatctgtcgttttgagccacttaacaagaagattagatgttgcgggtagagacgttactaggcatttgattgatttactttctcgtcgtggttatgcatttaacagaactgcagatttcgaaactgtgcgtcagataaaggaaaaattatgttatgtttcttatgatttagacttggatacaaaattggctagagaaacaaccgcccttgtggaaagttatgagttaccagatggcaggacaatcaaagtgggacaagagagatttgaagcaccagaatgtttgttccaacctggtttggttgacgttgaacaacctggcgtgggcgagttattatttaatactgtgcaatctgctgatgttgatatcagaagttccttatataaggccattgttctttctggtggtagtagtatgtacccagggttgccttccagattagagaaagaattgaaacaattatggtttagtagagttttacacaatgacccttccagacttgataaattcaaagttagaattgaagatcctccaaggagaaagcatatggttttcattggtggtgccgttttagctagtatcatggctgataaagaccacatgtggttgtctaagcaagaatggcaagaaagcgggccatctgcaatgactaaatttggtccaagatga

SEQ ID NO: 1747 - DNA, 2295 bp, Saccharomyces cerevisiae
atgtcaacaaactcattccatgattatgtggatttaaaatcgagaactaatacacgacagttttcagatgacgaagagttcactacgcctccaaaactaagcaatttcggatcagctttactttcccacacagaaaaaacttcagcatcagagatattatcaagtcataataatgacaagatcgcaaatcgattagaagaaatggacaggagttcatcaaggagtcaccccccaccgtcaatgggcaatttgacatccggtcatactagtacctcatcgcattcaaccttgttcggacgatatctgagaaataatcaccagactagcatgacgacgatgaacactagtgacatagagataaatgttggaaatagtcttgataagagttttgaaaggataaggaatttgcgacaaaatatgaaagaagatattacggcaaagtatgctgaaaggagaagtaagagatttttaatatccaataggacaacgaagctgggtcctgcaaagagagcgatgactttgacaaatatctttgatgaggatgtgcctaactctccaaaccagccaataaatgcaagggagacagtggaattaccacttgaggattctcaccaaacaaactttaaagaaacgaagagaaatacggattatgattcaattgattttggagatttgaatcctatccagtatattaaaaaacataatcttcccacaagtgaccttccactaatatctcaaatctactttgataaacaaagagaagaaaatagacaagcagcactccgaaaacatagttccagagaattgctttataaaagtaggtcttcttcctcttcactttctagtaacaacttattggcaaacaaggacaattctataacatccaataatggttctcaacccaggcgaaaagtttctactggatcatcttcatctaagtcatcgatcgaaataagaagagctctcaaggagaatattgatactagcaataacagcaatttcaacagcccaattcataaaatttataaaggaatttccagaaataaagattccgactccgaaaaaagagaagtactgcgaaacataagcataaatgcaaatcacgctgataatctccttcaacaagagaataagagactaaaacgatcattggatgatgcaataacgaatgagaatataaacagtaaaaatctagaagtattttaccatcgacctgctcccaaacctccagtcaccaagaaagttgaaattgttgaacctgcaaagtccgcttctttatcgaataatagaaatataattacagtaaatgactcccagtacgaaaaaatagaacttttgggtagaggtggatcctccagagtttacaaggtgaaaggatctggcaatagggtatacgcgctcaaaagggtgtcttttgacgcttttgacgattcaagtattgatggattcaaaggagaaatagaacttctggaaaaattgaaagaccaaaagcgtgtaatccaactactagattatgaaatgggggatggtttattgtatttgataatggaatgtggtgatcatgatttgtcacaaatccttaaccaaagaagcggcatgccactggattttaattttgttagattctatacaaaggaaatgttgctgtgcattaaagtagttcatgatgcgggcatagttcattcggatttaaaacctgcaaattttgttttagtgaaaggtatcttaaaaatcattgattttggtatagcaaacgcggtaccggaacatacggtgaatatatatcgtgaaactcaaattgggactccaaattatatggcaccagaagcactagttgctatgaattacacacaaaatagtgagaaccaacatgagggaaacaagtggaaagtggggagaccatctgatatgtggtcatgcggttgtattatatatcagatgatttacgggaaacccccatatggcagtttccaaggccaaaataggctgttggctattatgaatcctgatgtgaaaatcccatttcctgaacatactagcaataatgaaaagattccaaagtctgccattgaattaatgaaagcatgtctgtacaggaacccagacaaaagatggactgtggataaagtcctgagtagcactttccttcaaccttttatgatatccggatcgattatggaagaccttattaggaatgccgttagatatggctctgagaagcctcatatatcacaagatgatctcaatgatgtggtagacactgttttaaggaaatttgcagattacaaaatttag

SEQ ID NO: 1748 - DNA, 2295 bp, Artificial Sequence
  Description of Artificial Sequence: Synthetic polynucleotide
atgtctacaaactctttccatgattatgtggatttaaaatctagaactaatacaagacagttttctgatgacgaagagttcactacgcctccaaaattaagcaatttcggatctgctttactttcccacacagaaaaaacttctgcaagtgagatattatccagtcataataatgacaagatcgcaaatagattagaagaaatggacaggagttcttccaggagtcaccccccaccgtctatgggcaatttgacatccggtcatactagtacctcttctcattctaccttgttcggaagatatttaagaaataatcaccagactagcatgacgacgatgaacactagtgacatagagataaatgttggaaatagtcttgataagagttttgaaaggataaggaatttgagacaaaatatgaaagaagatattacggcaaagtatgctgaaaggagaagtaagagatttttaatatccaataggacaacgaagttgggtcctgcaaagagagcgatgactttgacaaatatctttgatgaggatgtgcctaactctccaaaccagccaataaatgcaagggagacagtggaattaccacttgaggattctcaccaaacaaactttaaagaaacgaagagaaatacggattatgattctattgattttggagatttgaatcctatccagtatattaaaaaacataatcttcccacaagtgaccttccattgatatctcaaatctactttgataaacaaagagaagaaaatagacaagcagcactcagaaaacatagttccagagaattgctttataaaagtaggtcttcttcctcttctctttctagtaacaacttattggcaaacaaggacaattctataacatccaataatggttctcaacccaggagaaaagtttctactggatcttcttcttctaagtcttctatcgaaataagaagagctctcaaggagaatattgatactagcaataacagcaatttcaacagcccaattcataaaatttataaaggaatttccagaaataaagattccgactccgaaaaaagagaagtattgagaaacataagcataaatgcaaatcacgctgataatctccttcaacaagagaataagagattgaaaagaagtttggatgatgcaataacgaatgagaatataaacagtaaaaatttggaagtattttaccataggcctgctcccaaacctccagtcaccaagaaagttgaaattgttgaacctgcaaagtccgcttctttatccaataatagaaatataattacagtaaatgactcccagtacgaaaaaatagaacttttgggtagaggtggatcctccagagtttacaaggtgaaaggatctggcaatagggtatacgcgctcaaaagggtgtcttttgacgcttttgacgattctagtattgatggattcaaaggagaaatagaacttttagaaaaattgaaagaccaaaagcgtgtaatccaattattagattatgaaatgggggatggtttattgtatttgataatggaatgtggtgatcatgatttgtctcaaatccttaaccaaagaagcggcatgccattagattttaattttgttagattctatacaaaggaaatgttgctttgcattaaagtagttcatgatgcgggcatagttcattctgatttaaaacctgcaaattttgttttagtgaaaggtatcttaaaaatcattgattttggtatagcaaacgcggtaccggaacatacggtgaatatatatcgtgaaactcaaattgggactccaaattatatggcaccagaagcattggttgctatgaattacacacaaaatagtgagaaccaacatgagggaaacaagtggaaagtggggagaccatctgatatgtggtcctgcggttgtattatatatcagatgatttacgggaaacccccatatggcagtttccaaggccaaaataggttattggctattatgaatcctgatgtgaaaatcccatttcctgaacatactagcaataatgaaaagattccaaagtctgccattgaattaatgaaagcatgtctttacaggaacccagacaaaagatggactgtggataaagtcttaagtagcactttccttcaaccttttatgatatccggatctattatggaagaccttattaggaatgccgttagatatggctctgagaagcctcatatatctcaagatgatctcaatgatgtggtagacactgttttaaggaaatttgcagattacaaaatttga

SEQ ID NO: 1749 - DNA, 1263 bp, Saccharomyces cerevisiae
atgttcaaagttccagtgggattagccagtaggacaagggagcttatgaacagcgttacgctcaatagtctcaataatggaaagggtttcaatatgtacttgccaggaatattaagggcttttcctaaaccagtgccttcggcgattacatctcccgcaattccaaaatatcgaggagaaagtttccagtttcgtaagctttcatgcatttcttctaattattgttctaccactcaccaatttctatccagtctgaaaagctcgacatccaggttggttggtaaaagagccttccattcgtcacgacgtgcagaaataaagtttatattttcttcgaagtcaccaaagaacggtaacaagccgtttgtgaaagtatataaagtctccccattttttatcatatttgcaactgcaagtatcttcacattcattctaacatcaacgatagtcgttattcccttaatttttcactttttttttccccttcttattatgttctttttttttaaacaattcaaaaaatggcagaaaaatatcttttacaaagatgtcttgacctccttaccgaaaacaaaattgaaaataacattacccaccatgagatcattacaattacaacctatggttcagagttggaaagagatatcttccaggatgggaattccaaacgagtttgccaaaggtttgaatgttgatttagtaaagcaagaagaaaccagaaagcagtttctaagtttcctgcagaaaagagtgttggagtccttcaccaagaacgaactgggaataagatcctactttttaggagacagcgtcgagaaatggatcaaagaatcctatgacttggaactcgatattgataattgccgaagtgaactcagaaaattccaaactttcatattttccagtgttcgatacaagttgtatttagactcaatgaaaaatttaccgctaaacccttcaaaaaaactcgagggcaagaagcatattgcagacgtatatgtcattattttagacgaatcctttcctgcaataatgttcaatggcggagcttattcgaaggctgattttttcaagatattacaagaaagtgaaacctctaacagcagcaaaacccttaacacaattattgccatcaaaagtgtaaatacgctactatcaaaacactttgttatcacaacaaatggtgattctggagaattcttttcaaaatataacatttcaaaaataaacgacaaaaacactgaatacaccctaaaagagtaa

SEQ ID NO: 1750 - DNA, 1263 bp, Artificial Sequence
  Description of Artificial Sequence: Synthetic polynucleotide
atgttcaaagttccagtgggattagccagtaggacaagggagcttatgaacagcgttacgctcaatagtctcaataatggaaagggtttcaatatgtacttgccaggaatattaagggcttttcctaaaccagtgccttctgcgattacatctcccgcaattccaaaatatagaggagaaagtttccagtttcgtaagctttcttgcatttcttctaattattgttctaccactcaccaatttctttccagtttgaaaagctctacatccaggttggttggtaaaagagccttccattcttctcgtcgtgcagaaataaagtttatattttcttccaagtctccaaagaacggtaacaagccgtttgtgaaagtatataaagtctccccattttttatcatatttgcaactgcaagtatcttcacattcattttaacaagtacgatagtcgttattcccttaatttttcactttttttttccccttcttattatgttctttttttttaaacaattcaaaaaatggcagaaaaatatcttttacaaagatgtcttgacctccttaccgaaaacaaaattgaaaataacattacccaccatgagatctttacaattacaacctatggttcagagttggaaagagatatcttccaggatgggaattccaaacgagtttgccaaaggtttgaatgttgatttagtaaagcaagaagaaaccagaaagcagtttttgagtttcttacagaaaagagtgttggagtccttcaccaagaacgaattaggaataagatcctactttttaggagacagcgtcgagaaatggatcaaagaatcctatgacttggaactcgatattgataattgcagaagtgaactcagaaaattccaaactttcatattttccagtgttagatacaagttgtatttagactccatgaaaaatttaccgttgaacccttccaaaaaactcgagggcaagaagcatattgcagacgtatatgtcattattttagacgaatcctttcctgcaataatgttcaatggcggagcttattccaaggctgattttttcaagatattacaagaaagtgaaacctctaacagcagcaaaacccttaacacaattattgccatcaaaagtgtaaatacgttattatccaaacactttgttatcacaacaaatggtgattctggagaattcttttccaaatataacatttccaaaataaacgacaaaaacactgaatacaccttgaaagagtga

SEQ ID NO: 1751 - DNA, 1863 bp, Saccharomyces cerevisiae
atggttaaggaaactccattacactcatcttcatcaacttcgctgtcttcattatttaggccaactaagttgaagaatttatcggctaaaatattcaatggaggtggtaaccaatcatactcaaagacagatgatgtttcaaggtcttcttctagatcttcaaaaaagaatacagattctgaccaagaggatcaaataaagtataacaaacccaacgaccgaagatctaccataggaaagagcccccagggaaatggcgcgttgtcaaaggagtcacacgtagtagcaagttctactttgacaggtatttctcctacttcagctaaaaaagctcctattgactactctccttcacggcccttacctaacaatcataatcccgttcgtacgggacacactgtgccccacttaccccatagtattcacaatccaataaactacattcatcaaggctcaaaagatgctttccaccatcctcaccccgttcgctctacagctcatagcaacatttctacagtgtcttctgcaaaatctgatacaccctcttcgaatttatcataccaggcacatatgcatcccgtagagatactacagaaacagattgaagacaaacacttcatggactctcaagcctccacccctgggtccgtggaactacagcataattcttcaagcggtagtgatgatacctcatcaagaaagaaaaaatccttgagattaacaagatttttcaaaaaaattcataatgattatcacgataaccatcatcatcaccaccatcacaaccgtggatccacccctacaaaaccgaagctcaatttgaacaccaatgaaaatatagtagaaagtaacggaaaagcgttatacgaaacagataacccagtggagctattagaaaaatatggtattcctggtagaaaattaggcgaaggagcttccggttcagtgtccgtagtagaaagaacagacggcaagttatttgcttgcaaaatgttcagaaaaccacacttaaacaatgaaggaactaatcagtctcaattagctaattattctaagaaggttaccactgaattttgtattggttccacgctgcaccacgaaaatatcgttgaaaccctagatatgttgactgaaggtgacacctatttattagtaatggagtatgcgccatatgatttttttaatctcgtcatgagtaacctaatgacacaagatgaagtcaactgttacttcaagcagctgtgccacggcgttaattacctgcactctatgggcttagctcatagggatttaaaattggacaattgtgtcgtcactaaagatggcatcttgaaactgattgactttgggagcgctgtagtgttccaatacccttacgaagataccattgtaaaatcacatggaatcgtgggttctgacccttatttggctcctgagttattgaaacaaacatcctacgatccaagagtagcagatgtgtggtctatcgctattatattttactgtatggtccttaaaagatttccttggaaggctccaaaaaagagcttcaactcatttaggttatttactgaggaacctgaggacgaagatgatatagttcgggggccaaataaaatattaaggctactgccaagacattcacggacaataataggcagaatgttggctttagaaccaaagcaaagagttttaatgaatgacgtggtaaaggatgattggcttgtatccgtcccctcctgtgaagttgaccctacatctggcgatttggttgaaaaaccaaagaatcataagcatcacttggtcactgaggaggagttgaatgagctgaccaagcaacacgggaataaagattcaaattaa

SEQ ID NO: 1752 - DNA, 1863 bp, Artificial Sequence
  Description of Artificial Sequence: Synthetic polynucleotide
atggttaaggaaactccattacactcttcttcttctacttctttatcttctttatttaggccaactaagttgaagaatttatctgctaaaatattcaatggaggtggtaaccaatcttactccaagacagatgatgtttccaggtcttcttctagatcttctaaaaagaatacagattctgaccaagaggatcaaataaagtataacaaacccaacgacagaagatctaccataggaaagagcccccagggaaatggcgcgttgtccaaggagtctcacgtagtagcaagttctactttgacaggtatttctcctactagtgctaaaaaagctcctattgactactctccttctagacccttacctaacaatcataatcccgttcgtacgggacacactgtgccccacttaccccatagtattcacaatccaataaactacattcatcaaggctctaaagatgctttccaccatcctcaccccgttcgctctacagctcatagcaacatttctacagtgtcttctgcaaaatctgatacaccctcttccaatttatcttaccaggcacatatgcatcccgtagagatattacagaaacagattgaagacaaacacttcatggactctcaagcctccacccctgggtccgtggaattacagcataattcttctagcggtagtgatgatacctcttctagaaagaaaaaatccttgagattaacaagatttttcaaaaaaattcataatgattatcacgataaccatcatcatcaccaccatcacaaccgtggatccacccctacaaaaccgaagctcaatttgaacaccaatgaaaatatagtagaaagtaacggaaaagcgttatacgaaacagataacccagtggagttattagaaaaatatggtattcctggtagaaaattaggcgaaggagcttccggttctgtgtccgtagtagaaagaacagacggcaagttatttgcttgcaaaatgttcagaaaaccacacttaaacaatgaaggaactaatcagtctcaattagctaattattctaagaaggttaccactgaattttgtattggttccacgttgcaccacgaaaatatcgttgaaaccttggatatgttgactgaaggtgacacctatttattagtaatggagtatgcgccatatgatttttttaatctcgtcatgagtaacttgatgacacaagatgaagtcaactgttacttcaagcagttatgccacggcgttaattacttgcactctatgggcttagctcatagggatttaaaattggacaattgtgtcgtcactaaagatggcatcttgaaattgattgactttgggagcgctgtagtgttccaatacccttacgaagataccattgtaaaatctcatggaatcgtgggttctgacccttatttggctcctgagttattgaaacaaacatcctacgatccaagagtagcagatgtgtggtctatcgctattatattttactgtatggtccttaaaagatttccttggaaggctccaaaaaagagcttcaactcttttaggttatttactgaggaacctgaggacgaagatgatatagttagggggccaaataaaatattaaggttattaccaagacattccaggacaataataggcagaatgttggctttagaaccaaagcaaagagttttaatgaatgacgtggtaaaggatgattggcttgtatccgtcccctcctgtgaagttgaccctacatctggcgatttggttgaaaaaccaaagaatcataagcatcacttggtcactgaggaggagttgaatgagttgaccaagcaacacgggaataaagattctaattga

SEQ ID NO: 1753 - DNA, 1407 bp, Saccharomyces cerevisiae
atggtgaagcccgttatttttgccatttgtttaggtgttctattatctaaggcactctccatcccactcagaagttttgcggatattgaactaattggctctcagaagagtctgtttccctttcttggagggtctgcgccatatttctcctttcccgctaactacggtatacccactgatattcctgaaggttgtagattaacgcaagttcaaatgattggcagacatggcgaaaggtatcctaccagaagtgaggccaaggatatttttgaagtatggtataaaatatccaattacacaggtaagtacgagggatcattatcgtttttgaataatggatatgaattttttattcccgatgaaagtcttctagaaatggagacaactttgcaaaattcgattgatgtgttgaacccgtatacaggagaaatgaatgcaaagagacatgcaagggagtttttagcaaaatatggaaaattgatggagaactgtaccaactttcctatcttcaccacaaattcgaaaagaatctacgatactgcgcaatattttgccgaggctttgggcgatggctttaatatatcacttcaaacacttagcgaaaattcctcgtcaggagcaaacacattagctgccaaaagttcgtgccccaattggaattcgaatgccaacaatgatatattaatgtcatattcgagggactacttagaaaatatttccgatcgtcttaatgacgaaaataaagggctgaacttgagcaggaaagatgcagcggccttgttttcttggtgtgccttcgagttgaacgcaaaaggttatagtaacatttgtgacattttctccgcggcagagttaatacattattcttatgagactgatttgacgagcttctaccaaaatggtcccggatacaaattgattaaatctataggtgctaatttgttcaatgcaacagtgaagctaatacgacaaagtgcgcacttggaccaaaaagtttggctgagctttacgcacgatactgatattctaaattatttgacaactgctggattgattgatgacactagaaatttaacaaccaatcatgttccctttcgtgatcattcctaccacaggtcgtggtacattcctcagggagctagagtctacacagaaaagtttcaatgctcaaacgattcgtacgtccgttatgtggtcaacgatgctgtggttcctatagagagttgctccagtggtccaggtttttcatgtgaagagggcacattttacgagtatgccaaagacagattacgaggtgtgagcttctatgaagattgcgacgtctccaaagttagcaaagaaaaggaattgacgttttactgggattggaacacaacaaggtataacgcatccttagtgaatcaataa

SEQ ID NO: 1754 - DNA, 1407 bp, Artificial Sequence
  Description of Artificial Sequence: Synthetic polynucleotide
atggtgaagcccgttatttttgccatttgtttaggtgttttattatctaaggcactctccatcccactcagaagttttgcggatattgaattgattggctctcagaagagtttatttccctttcttggagggtctgcgccatatttctcctttcccgctaactacggtatacccactgatattcctgaaggttgtagattaacgcaagttcaaatgattggcagacatggcgaaaggtatcctaccagaagtgaggccaaggatatttttgaagtatggtataaaatatccaattacacaggtaagtacgagggatctttatcttttttgaataatggatatgaattttttattcccgatgaaagtcttttagaaatggagacaactttgcaaaattctattgatgtgttgaacccgtatacaggagaaatgaatgcaaagagacatgcaagggagtttttagcaaaatatggaaaattgatggagaactgtaccaactttcctatcttcaccacaaattctaaaagaatctacgatactgcgcaatattttgccgaggctttgggcgatggctttaatatatctcttcaaacacttagcgaaaattcctcttctggagcaaacacattagctgccaaaagttcctgccccaattggaatagtaatgccaacaatgatatattaatgtcttattctagggactacttagaaaatatttccgatcgtcttaatgacgaaaataaagggttgaacttgagcaggaaagatgcagcggccttgttttcttggtgtgccttcgagttgaacgcaaaaggttatagtaacatttgtgacattttctccgcggcagagttaatacattattcttatgagactgatttgacgagcttctaccaaaatggtcccggatacaaattgattaaatctataggtgctaatttgttcaatgcaacagtgaagttaataagacaaagtgcgcacttggaccaaaaagtttggttaagctttacgcacgatactgatattttgaattatttgacaactgctggattgattgatgacactagaaatttaacaaccaatcatgttccctttcgtgatcattcctaccacaggagttggtacattcctcagggagctagagtctacacagaaaagtttcaatgcagcaacgattcttacgtccgttatgtggtcaacgatgctgtggttcctatagagagttgctccagtggtccaggtttttcttgtgaagagggcacattttacgagtatgccaaagacagattaagaggtgtgagcttctatgaagattgcgacgtctccaaagttagcaaagaaaaggaattgacgttttactgggattggaacacaacaaggtataacgcatccttagtgaatcaatga

SEQ ID NO: 1755 - DNA, 249 bp, Saccharomyces cerevisiae
atgtactaccttgtgccaaagacaacctacgggaaccttcagtgttcctctttagcgatgacttttcatgagaggggggagagcggtgatgtgttatcttgcgcctgtaggctttacctctatataatgcctcttttttttaacacttttttgaggcagaagtattttcagctatgttctaatacaccatacaggaacaatggtgaagcccgttatttttgccatttgtttaggtgttctattatctaa

SEQ ID NO: 1756 - DNA, 249 bp, Artificial Sequence
  Description of Artificial Sequence: Synthetic polynucleotide
atgtactaccttgtgccaaagacaacctacgggaaccttcagtgttcctctttagcgatgacttttcatgagaggggggagagcggtgatgtgttatcttgcgcctgtaggctttacctctatataatgcctcttttttttaacacttttttgaggcagaagtattttcagttgtgttctaatacaccatacaggaacaatggtgaagcccgttatttttgccatttgtttaggtgttctattatctga

SEQ ID NO: 1757 - DNA, 1176 bp, Saccharomyces cerevisiae
atgtctgctgctgctgatagattaaacttaacttccggccacttgaatgctggtagaaagagaagttcctcttctgtttctttgaaggctgccgaaaagcctttcaaggttactgtgattggatctggtaactggggtactactattgccaaggtggttgccgaaaattgtaagggatacccagaagttttcgctccaatagtacaaatgtgggtgttcgaagaagagatcaatggtgaaaaattgactgaaatcataaatactagacatcaaaacgtgaaatacttgcctggcatcactctacccgacaatttggttgctaatccagacttgattgattcagtcaaggatgtcgacatcatcgttttcaacattccacatcaatttttgccccgtatctgtagccaattgaaaggtcatgttgattcacacgtcagagctatctcctgtctaaagggttttgaagttggtgctaaaggtgtccaattgctatcctcttacatcactgaggaactaggtattcaatgtggtgctctatctggtgctaacattgccaccgaagtcgctcaagaacactggtctgaaacaacagttgcttaccacattccaaaggatttcagaggcgagggcaaggacgtcgaccataaggttctaaaggccttgttccacagaccttacttccacgttagtgtcatcgaagatgttgctggtatctccatctgtggtgctttgaagaacgttgttgccttaggttgtggtttcgtcgaaggtctaggctggggtaacaacgcttctgctgccatccaaagagtcggtttgggtgagatcatcagattcggtcaaatgtttttcccagaatctagagaagaaacatactaccaagagtctgctggtgttgctgatttgatcaccacctgcgctggtggtagaaacgtcaaggttgctaggctaatggctacttctggtaaggacgcctgggaatgtgaaaaggagttgttgaatggccaatccgctcaaggtttaattacctgcaaagaagttcacgaatggttggaaacatgtggctctgtcgaagacttcccattatttgaagccgtataccaaatcgtttacaacaactacccaatgaagaacctgccggacatgattgaagaattagatctacatgaagattag

SEQ ID NO: 1758 - DNA, 1176 bp, Artificial Sequence
  Description of Artificial Sequence: Synthetic polynucleotide
atgtctgctgctgctgatagattaaacttaacttccggccacttgaatgctggtagaaagagaagttcctcttctgtttctttgaaggctgccgaaaagcctttcaaggttactgtgattggatctggtaactggggtactactattgccaaggtggttgccgaaaattgtaagggatacccagaagttttcgctccaatagtacaaatgtgggtgttcgaagaagagatcaatggtgaaaaattgactgaaatcataaatactagacatcaaaacgtgaaatacttgcctggcatcactttacccgacaatttggttgctaatccagacttgattgattctgtcaaggatgtcgacatcatcgttttcaacattccacatcaatttttgccccgtatctgtagccaattgaaaggtcatgttgattctcacgtcagagctatctcctgtttgaagggttttgaagttggtgctaaaggtgtccaattgttatcctcttacatcactgaggaattgggtattcaatgtggtgctttatctggtgctaacattgccaccgaagtcgctcaagaacactggtctgaaacaacagttgcttaccacattccaaaggatttcagaggcgagggcaaggacgtcgaccataaggttttgaaggccttgttccacagaccttacttccacgttagtgtcatcgaagatgttgctggtatctccatctgtggtgctttgaagaacgttgttgccttaggttgtggtttcgtcgaaggtcttggctggggtaacaacgcttctgctgccatccaaagagtcggtttgggtgagatcatcagattcggtcaaatgtttttcccagaatctagagaagaaacatactaccaagagtctgctggtgttgctgatttgatcaccacctgcgctggtggtagaaacgtcaaggttgctaggttgatggctacttctggtaaggacgcctgggaatgtgaaaaggagttgttgaatggccaatccgctcaaggtttaattacctgcaaagaagttcacgaatggttggaaacatgtggctctgtcgaagacttcccattatttgaagccgtataccaaatcgtttacaacaactacccaatgaagaacttaccggacatgattgaagaattagatttgcatgaagattga

SEQ ID NO: 1759 - DNA, 936 bp, Saccharomyces cerevisiae
atgactgcaagcacaccatccaatgtcatgacattgttcttgttaaggcatggacaaagtgaattgaatcacgagaatatattctgtggttggattgacgctaagctaaccgaaaaaggtaaagaacaagctcgtcattctgccgagctaatcgaacaatattgtaaagctaataatttgagattaccccagattggttacacctcacgtttaattaggacccaacagaccatagaaacgatgtgtgaagaatttaagttaaagccacaactgcaggttgtttacgactttaataaaatcaaacttggagacgaatttggcagtgatgacaaggataatatgaaaatcccgattcttcaaacttggaggctaaatgaacgtcattacggttcctggcagggccagaggaaaccgaatgttttaaaagaatatggtaaggataaatatatgttcattaggagagattacgagggtaagccaccacctgtagatcttgaccgtgagatgattcaacaagaaaatgagaagggctcttctactgggtacgaattcaaggagccaaacagacaaataaaatatgaattggaatgcagcaatcatgacattgtattaccggattccgaatctcttcgtgaagtggtttatagattgaatccttttctacaaaatgtcatattaaaattagccaatcaatatgatgaatcttcatgcctgattgtgggccatggaagttcagtgagatcgctactgaaaattctggagggtatatcagatgatgacatcaagaatgttgatattccaaatggtatccccttagtcgttgaattagataagaataatggtcttaagtttatcagaaaattctacctagatcctgaatctgctaagatcaatgctgagaaagtccgtaatgagggtttcataaaaaatccttaa

SEQ ID NO: 1760 - DNA, 936 bp, Artificial Sequence
  Description of Artificial Sequence: Synthetic polynucleotide
atgactgcaagcacaccatccaatgtcatgacattgttcttgttaaggcatggacaaagtgaattgaatcacgagaatatattctgtggttggattgacgctaagttgaccgaaaaaggtaaagaacaagctcgtcattctgccgagttgatcgaacaatattgtaaagctaataatttgagattaccccagattggttacacctctcgtttaattaggacccaacagaccatagaaacgatgtgtgaagaatttaagttaaagccacaattgcaggttgtttacgactttaataaaatcaaacttggagacgaatttggcagtgatgacaaggataatatgaaaatcccgattcttcaaacttggaggttgaatgaacgtcattacggttcctggcagggccagaggaaaccgaatgttttaaaagaatatggtaaggataaatatatgttcattaggagagattacgagggtaagccaccacctgtagatcttgaccgtgagatgattcaacaagaaaatgagaagggctcttctactgggtacgaattcaaggagccaaacagacaaataaaatatgaattggaatgcagcaatcatgacattgtattaccggattccgaatctcttcgtgaagtggtttatagattgaatccttttttgcaaaatgtcatattaaaattagccaatcaatatgatgaatctagttgcttgattgtgggccatggaagttctgtgagatccttattgaaaattttagagggtatatctgatgatgacatcaagaatgttgatattccaaatggtatccccttagtcgttgaattagataagaataatggtcttaagtttatcagaaaattctacttggatcctgaatctgctaagatcaatgctgagaaagtccgtaatgagggtttcataaaaaatccttga

SEQ ID NO: 1761 - DNA, 1596 bp, Saccharomyces cerevisiae
atggcttctacggaacttagcctaaaaagaaccttaacggatattttagaagacgagttgtaccatactaatccaggtcacagtcagtttacgagtcattatcaaaactatcatccaaatgctagtattactccatataagttggtgaataagaacaaggaaaacaacacttttacgtggaatcattcattacaacaccagaatgaatcgagtgcagcttcgatacccccacaacaaacctaccatttcccgatattcaacaaatacgcggatcctactttaactaccaccacctcttttacgactagtgaagcaacggccaacgatagacagattaataatgtccatctcataccaaacgagattaagggtgctagcgaaaccccattgcagaagaccgtcaatctaaagaatataatgaaagtatcagacccgtatgtaccgacacggaatacgttcaattatgatgttaaaatttccaacgattttttcgataacggtgacaatctatatggtaatgatgaagaagtgcttttctatgaggataattataatccgaaaatgcagtggtcacttcaagataatagcgccgcaataaacaatgaggatgcgagagctatttttaacaatgaatttgactctgatgacgacgatatcagtgatgatgaagaggatgaaatagaagaaaattgtttgcaacaagagcaacaccaagaggagcctttactgtcattggatgttacaccaatctcaatgtttggctcagatcaaaaaacgggtcgtgccaagagttctagtcatttatttaatgagtacagttacgttgactctaacatggacagcatttccagtgttgtatctgaagatctgttagatgaacggggacatgagaagatagaggatgaggatgaggataatgatcttgatgaagacgatatctacgatatctctctcttgaagaacagaagaaagcaaagttttgtcctcaataaaaacactattgattttgaaagatttccatctccctcaacctcggcaaacgtaccgtctactgctactaccggtaaaaggaaaccagcaaaatcatccagtaaccgtagttgcgttagtaacagtaatgaaaacggcacattagaaagaataaagaagcctacatcagctgtagtaagctcaaatgctagtaggcggaagctaattaattatactaagaagcacttatcttcacattcatctacaaattcgaattcgaaaccttcgactgcatcaccatcggcccatacgtcatcttctgacggtaataacgaaatatttacgtgtcagataatgaatctcattacaaatgaaccgtgtggtgcccaattttcaaggtcctatgatttaacgagacaccaaaataccattcacgctaaaaggaagattgtcttccgttgctcggagtgtataaaaattcttggatctgagggctatcagaagacgttttcgagactggatgctttaacaaggcatataaaatcgaagcatgaagatttgtcgttagaacaacgtcaagaagttacaaaatttgcaaaggctaatattggttatgtcatgggttaa

SEQ ID NO: 1762 - DNA, 1596 bp, Artificial Sequence
  Description of Artificial Sequence: Synthetic polynucleotide
atggcttctacggaacttagcttgaaaagaaccttaacggatattttagaagacgagttgtaccatactaatccaggtcacagtcagtttacgagtcattatcaaaactatcatccaaatgctagtattactccatataagttggtgaataagaacaaggaaaacaacacttttacgtggaatcattctttacaacaccagaatgaaagtagtgcagcttctatacccccacaacaaacctaccatttcccgatattcaacaaatacgcggatcctactttaactaccaccacctcttttacgactagtgaagcaacggccaacgatagacagattaataatgtccatctcataccaaacgagattaagggtgctagcgaaaccccattgcagaagaccgtcaatttgaagaatataatgaaagtaagtgacccgtatgtaccgacaagaaatacgttcaattatgatgttaaaatttccaacgattttttcgataacggtgacaatttatatggtaatgatgaagaagtgcttttctatgaggataattataatccgaaaatgcagtggagtcttcaagataatagcgccgcaataaacaatgaggatgcgagagctatttttaacaatgaatttgactctgatgacgacgatatcagtgatgatgaagaggatgaaatagaagaaaattgtttgcaacaagagcaacaccaagaggagcctttattatctttggatgttacaccaatctctatgtttggcagtgatcaaaaaacgggtcgtgccaagagttctagtcatttatttaatgagtacagttacgttgactctaacatggacagcatttccagtgttgtatctgaagatttattagatgaaagaggacatgagaagatagaggatgaggatgaggataatgatcttgatgaagacgatatctacgatatctctctcttgaagaacagaagaaagcaaagttttgtcctcaataaaaacactattgattttgaaagatttccatctccctctacctctgcaaacgtaccgtctactgctactaccggtaaaaggaaaccagcaaaatcttccagtaaccgtagttgcgttagtaacagtaatgaaaacggcacattagaaagaataaagaagcctacatctgctgtagtaagcagtaatgctagtaggcgtaagttgattaattatactaagaagcacttatcttctcattcttctacaaatagtaattctaaaccttccactgcatctccatctgcccatacgtcttcttctgacggtaataacgaaatatttacgtgtcagataatgaatctcattacaaatgaaccgtgtggtgcccaatttagcaggtcctatgatttaacgagacaccaaaataccattcacgctaaaaggaagattgtcttccgttgcagtgagtgtataaaaattcttggatctgagggctatcagaagacgttttccagattagatgctttaacaaggcatataaaatccaagcatgaagatttgtctttagaacaacgtcaagaagttacaaaatttgcaaaggctaatattggttatgtcatgggttga

SEQ ID NO: 1763 - DNA, 3852 bp, Saccharomyces cerevisiae
atgtctagggaagacttgtccattgctgaagatctcaaccaagtgagcaaacctttactcaaagtgaagctgctggaagttttgggtcagggggatttcaaacatttaaaggcgcttgtggacaatgaatttcaacctaaagacgacccatctgtacagcaagttcttaatttaattttacattatgctgtccaggtggcccctattcttcttatcaaggaaattgttgctcattgggtggaccaagtaggtgatgagaagagttcgagtaaaagcgatgatggtatccatctagatttgaattatcaggatgaaaatggcaatactccattgcacttggctgctgctcaatctcggtcggatgtgatcagtttccttcttagccagaagtctatcaatgattgtgtcaagaataaagctcatcagcagcctttggacatgtgcaaagatttgaatgtagcacaaatgattcaattgaaaagagatgactattttttggaaacagttcattctttgagagcagccatgaataaaagagacttttcgaaattggactctatttggaaaaatccaagaaacctaaatttactagatattaatggcatagatcctgaaaccggaacgacacttctgtatgaatattcgcaaaaaaaagacattgaaatgtgtcaatggctgctgaaacatggtgcagaagcaacagttaaagatgggaagggacggtcgccattggatttagtcaaaaatataaaactacccgctaaaccgtcgaacaacgttacaccggaaattaagttaaagaatctacttgaaaagaatctgagagaacaagctattgttcacgaagatgtcgcatcaagtaagcctcctacgtataaggggtttttaaagaaatggacaaattttgcccatggctacaaattacgttggttcattttaagtggcgacggaaatctgtcatattacaaagaccaatcgcatgttgataggcctcgtggtactttaaaagtttcgacgtgccgcttacacatcgattcttcagaaaaactgaatttcgagttgctaggtggcatcacaggcacaacaaggtggcgcttaaagggcaatcatcccattgaaacgactaggtgggtcaatgctatacaaagcgctattagattcgccaaagacaaggagatattaaacaaaaaaaaggcagtaccaccatcattggccttgaagaacaaatctccagccctgatatcgcattccaaaacacaaggatctcttcctgaagcttcgcaatactatcagcacacattacacaaggaagttattcagccctcctctgtgagtctttatcggagaccaagcaacaacctgtccgtcgtatccagcgaaatccaactaaacgataatttgactgaatctggcaagcgctttgttagtaaaatgattgaaaaccggctggatggtagcaaaacccccgttggagtacacacaggttcagctctgcaaagggtccgcagtagtaataccttgaaaagtaaccggagtatgcaaagtggctcaggtgtagctagtcctatagataaagtccctaacggtgcgaatttgagccagtctaacaccacaacaggatctactgcttccttgagtgataataactatattgataatttcgagggtgatgaggcaaattcagatgatgaagaggaagaccttggaataaattttgatcgtgatgaagaatacatcaaagcacagtatgggccatataaggagaaacttgatatgtatgaacaagcaatcagtatagagttgagttctttgattgaactaattgaacaagaggagccaagtcctgaggtttggctcacaataaagaagagcctcatcaacacatcaaccatttttggtaagttgaaggacttgacttataaaagagacaaaagattagtggatatggtttcaaagcaaggtgatgtcaataacgtttgggtgcaatctgtgaaagaattagaaatggagttgtccaacaaaaccgaacgtctagcatctattgataaagaaagaagaggtttgaaaaagatactacacaagaaattgctggaatcacatgccactgccggcaacaaggaatccttagaaaatgacaaagaacaggaatcagatactacggcaagtactctcggtcaaattgcgaaatttatcagcgctacaaaggaagaagatgaagcatctgatgctgatgagttttatgatgccgcggaattggtggatgaagtaactgaattaacagaggctcatcctgaaatttcgaccgctgcagctcccaagcatgctcctcccccagttccaaatgaaacagataacgacagccagtatgtccaggacgaaaaaagcaaaatagagtcaaatgttgagaaaacaagccaaaaatttgaaaaacaaaataatctagttacagaagatgaaccaaaaactgatcaatcactgaaaaacttcaaagcggaggacaaagagagccaagtaaaggagaaaactaaagagatagcatcttcagttatcggtgaaaagaccatagttgctgtcactacagtgcaaaaaagaaaagaagaatatttactcaaagaagggtcctatcttggttatgaagatggtattagaaaaagactatctatggataaggacgatagaccaaagattagtctttgggccgttctgaaatcgatggtgggcaaagatatgacaagaatgacgttaccagttactttcaatgagcctacatctcttttacaaagagtggcagaggatttggagtattccgaactattagaccaggctgcaacgtttgaagattcaacactgagaactctatatgttgcggcatttaccgcatcttcatacgcatctactacaaaaagagttgcgaaacccttcaacccattgttgggtgaaacatttgagtattctcgaccagataaacagtacagatttttcaccgagcaggtttcacatcaccctcctatatctgcaacatggactgaatcaccaagatgggacttttggggtgaatcatttgttgatactaaattcaatggcagatctttcaatgttaagcacttaggattatggcacattaagttgcgtccaaatgacaatgaaaaagaggaactgtatacttggaagaagcccaacaatactgttataggtattctcattggtaatccacaagttgataaccacggtgaagtgaacgttgtcaatcacacaaccggtgatcattgcaagttgtatttcaaagcaaggggatggaggtcatcaggagcatatgaaatcacaggcgaagtctacaacaagaaaaaacagaaggtgtggatcctaggaggacactggaatgaagctatttttgccaagaaagtagtaaaagatggcgatctctcgttggagaaaactagaaccgctgcatcagcagggaatgggcctacggatgacggaacgaagtttttaatatggaaggcaaacgaccgtcctgaggagccattcaatttaacaccttttgctatcacgctgaatgctccacaaccacatctattgccatggttaccccccacagatacacgtttgagaccagatcaaagagcaatggaagatgggcgttatgacgaagctggtgatgagaaattcagagttgaagaaaagcaaagagcagcacgcagaaaaagggaggaaaataaccttgaatatcacccacaatggttcgtcagggatactcatcccatcacaaaagctaaatattggagatatacgggcaaatattgggttaaaagaagagatcatgatttgaaagattgtggtgacattttttaa

SEQ ID NO: 1764 - DNA, 3852 bp, Artificial Sequence
  Description of Artificial Sequence: Synthetic polynucleotide
atgtctagggaagacttgtccattgctgaagatctcaaccaagtgagcaaacctttactcaaagtgaagttattggaagttttgggtcagggggatttcaaacatttaaaggcgcttgtggacaatgaatttcaacctaaagacgacccatctgtacagcaagttcttaatttaattttacattatgctgtccaggtggcccctattcttcttatcaaggaaattgttgctcattgggtggaccaagtaggtgatgagaagagtagtagtaaaagcgatgatggtatccatttggatttgaattatcaggatgaaaatggcaatactccattgcacttggctgctgctcaatctaggtctgatgtgatcagtttccttcttagccagaagtctatcaatgattgtgtcaagaataaagctcatcagcagcctttggacatgtgcaaagatttgaatgtagcacaaatgattcaattgaaaagagatgactattttttggaaacagttcattctttgagagcagccatgaataaaagagacttttccaaattggactctatttggaaaaatccaagaaacttgaatttattagatattaatggcatagatcctgaaaccggaacgacacttttatatgaatattctcaaaaaaaagacattgaaatgtgtcaatggttgttgaaacatggtgcagaagcaacagttaaagatgggaagggaagatctccattggatttagtcaaaaatataaaattgcccgctaaaccgtctaacaacgttacaccggaaattaagttaaagaatttacttgaaaagaatttaagagaacaagctattgttcacgaagatgtcgcaagtagtaagcctcctacgtataaggggtttttaaagaaatggacaaattttgcccatggctacaaattacgttggttcattttaagtggcgacggaaatttatcttattacaaagaccaatctcatgttgataggcctcgtggtactttaaaagtttccacgtgccgcttacacatcgattcttctgaaaaattgaatttcgagttgttgggtggcatcacaggcacaacaaggtggcgcttaaagggcaatcatcccattgaaacgactaggtgggtcaatgctatacaaagcgctattagattcgccaaagacaaggagatattaaacaaaaaaaaggcagtaccaccatctttggccttgaagaacaaatctccagccttaatatctcattccaaaacacaaggatctcttcctgaagcttctcaatactatcagcacacattacacaaggaagttattcagccctcctctgtgagtctttatagaagaccaagcaacaacctttccgtcgtatccagcgaaatccaattgaacgataatttgactgaatctggcaagcgctttgttagtaaaatgattgaaaacagattagatggtagcaaaacccccgttggagtacacacaggttctgctttacaaagggtccgcagtagtaataccttgaaaagtaacagaagtatgcaaagtggcagtggtgtagctagtcctatagataaagtccctaacggtgcgaatttgagccagtctaacaccacaacaggatctactgcttccttgagtgataataactatattgataatttcgagggtgatgaggcaaattctgatgatgaagaggaagaccttggaataaattttgatcgtgatgaagaatacatcaaagcacagtatgggccatataaggagaaacttgatatgtatgaacaagcaatcagtatagagttgagttctttgattgaattgattgaacaagaggagccaagtcctgaggtttggctcacaataaagaagagcctcatcaacacatctaccatttttggtaagttgaaggacttgacttataaaagagacaaaagattagtggatatggtttccaagcaaggtgatgtcaataacgtttgggtgcaatctgtgaaagaattagaaatggagttgtccaacaaaaccgaacgtttagcatctattgataaagaaagaagaggtttgaaaaagatattacacaagaaattgttggaaagtcatgccactgccggcaacaaggaatccttagaaaatgacaaagaacaggaaagtgatactacggcaagtactctcggtcaaattgcgaaatttatcagcgctacaaaggaagaagatgaagcatctgatgctgatgagttttatgatgccgcggaattggtggatgaagtaactgaattaacagaggctcatcctgaaatttctaccgctgcagctcccaagcatgctcctcccccagttccaaatgaaacagataacgacagccagtatgtccaggacgaaaaaagcaaaatagagagcaatgttgagaaaacaagccaaaaatttgaaaaacaaaataatttggttacagaagatgaaccaaaaactgatcaaagtttgaaaaacttcaaagcggaggacaaagagagccaagtaaaggagaaaactaaagagatagcatcttctgttatcggtgaaaagaccatagttgctgtcactacagtgcaaaaaagaaaagaagaatatttactcaaagaagggtcctatcttggttatgaagatggtattagaaaaagattatctatggataaggacgatagaccaaagattagtctttgggccgttttgaaatctatggtgggcaaagatatgacaagaatgacgttaccagttactttcaatgagcctacatctcttttacaaagagtggcagaggatttggagtattccgaattattagaccaggctgcaacgtttgaagattctacattaagaactttatatgttgcggcatttaccgcatcttcctacgcatctactacaaaaagagttgcgaaacccttcaacccattgttgggtgaaacatttgagtattctagaccagataaacagtacagatttttcaccgagcaggtttctcatcaccctcctatatctgcaacatggactgaatctccaagatgggacttttggggtgaaagttttgttgatactaaattcaatggcagatctttcaatgttaagcacttaggattatggcacattaagttgcgtccaaatgacaatgaaaaagaggaattgtatacttggaagaagcccaacaatactgttataggtattctcattggtaatccacaagttgataaccacggtgaagtgaacgttgtcaatcacacaaccggtgatcattgcaagttgtatttcaaagcaaggggatggaggagtagtggagcatatgaaatcacaggcgaagtctacaacaagaaaaaacagaaggtgtggatcttgggaggacactggaatgaagctatttttgccaagaaagtagtaaaagatggcgatctctctttggagaaaactagaaccgctgcatctgcagggaatgggcctacggatgacggaacgaagtttttaatatggaaggcaaacgaccgtcctgaggagccattcaatttaacaccttttgctatcacgttgaatgctccacaaccacatcttttgccatggttaccccccacagatacacgtttgagaccagatcaaagagcaatggaagatgggcgttatgacgaagctggtgatgagaaattcagagttgaagaaaagcaaagagcagcacgcagaaaaagggaggaaaataaccttgaatatcacccacaatggttcgtcagggatactcatcccatcacaaaagctaaatattggagatatacgggcaaatattgggttaaaagaagagatcatgatttgaaagattgtggtgacattttttga

SEQ ID NO: 1765 - DNA, 678 bp, Saccharomyces cerevisiae
atgtccaatttatgtgtacttttcttccagtttttttttttagcacaattttttgctgaggcatcaccgttgacatttgaactgaataaaggtcgaaaggagtgcttatatacgctaactccggaaattgactgtacaatctcatattattttgcagtacagcaaggagagagcaatgactttgatgttaactacgaaatatttgctcctgatgacaaaaacaagccaataatcgagagatctggtgaacgtcaaggtgaatggtcatttataggccaacataagggagaatatgctatctgcttttatggtggtaaagcacacgacaagattgttgatctggacttcaagtacaattgtgaacgccaagatgatattcgaaatgaaagacgcaaggcgagaaaggcgcagagaaacctgagagactctaaaaccgatcccttgcaagacagtgtggaaaattctatagacaccatagaaaggcagctccacgttttggaacgtaatatacagtactataaaagcagaaacaccagaaatcatcacaccgtttgttcaacagagcatagaattgtaatgttttctatttacggcatattattaatcatcggaatgagctgcgctcaaattgccatactggagttcattttcagagaatcgagaaagcataatgtgtaa

SEQ ID NO: 1766 - DNA, 678 bp, Artificial Sequence
  Description of Artificial Sequence: Synthetic polynucleotide
atgtccaatttatgtgtacttttcttccagtttttttttttagcacaattttttgctgaggcaagtccgttgacatttgaattgaataaaggtagaaaggagtgcttatatacgttgactccggaaattgactgtacaatcagttattattttgcagtacagcaaggagagagcaatgactttgatgttaactacgaaatatttgctcctgatgacaaaaacaagccaataatcgagagatctggtgaacgtcaaggtgaatggtcttttataggccaacataagggagaatatgctatctgcttttatggtggtaaagcacacgacaagattgttgatttggacttcaagtacaattgtgaacgccaagatgatattagaaatgaaagacgcaaggcgagaaaggcgcagagaaacttgagagactctaaaaccgatcccttgcaagacagtgtggaaaattctatagacaccatagaaaggcagctccacgttttggaacgtaatatacagtactataaaagcagaaacaccagaaatcatcacaccgtttgttctacagagcatagaattgtaatgttttctatttacggcatattattaatcatcggaatgagctgcgctcaaattgccatattggagttcattttcagagaatctagaaagcataatgtgtga

SEQ ID NO: 1767 - DNA, 1524 bp, Saccharomyces cerevisiae
atgacaagcaaaacgaagaatatcgatgatatacctccagaaatcaaagaagagatgatacagctctatcatgatctaccgggtatagaaaatgaatataaactcatagacaagatcggtgagggaacattttcgtcagtgtataaagccaaagatatcactgggaaaataacaaaaaaatttgcatcacatttttggaattatggttcgaactatgttgctttgaagaaaatatacgttacctcgtcaccgcaaagaatttataatgagctcaacctgctgtacataatgacgggatcttcgagagtagcccctctatgtgatgcaaaaagggtgcgagatcaagtcattgctgttttaccgtactatccccacgaggagttccgaactttctacagggatctaccaatcaagggaatcaagaagtacatttgggagctactaagagcattgaagtttgttcattcgaagggaattattcatagagacatcaaaccgacaaattttttatttaatttggaattggggcgtggagtgcttgttgattttggtctagccgaggctcaaatggattataaaagcatgatatctagtcaaaacgattacgacaattatgcaaatacaaaccatgatggtggatattcaatgaggaatcacgaacaattttgtccatgcattatgcgtaatcaatattctcctaactcacataaccaaacacctcctatggtcaccatacaaaatggcaaggtcgtccacttaaacaatgtaaatggggtggatctgacaaagggttatcctaaaaatgaaacgcgtagaattaaaagggctaatagagcagggactcgtggatttcgggcaccagaagtgttaatgaagtgtggggctcaaagcacaaagattgatatatggtccgtaggtgttattcttttaagtcttttgggcagaagatttccaatgttccaaagtttagatgatgcggattctttgctagagttatgtactatttttggttggaaagaattaagaaaatgcgcagcgttgcatggattgggtttcgaagctagtgggctcatttgggataaaccaaacggatattctaatggattgaaggaatttgtttatgatttgcttaataaagaatgtaccataggtacgttccctgagtacagtgttgcttttgaaacattcggatttctacaacaagaattacatgacaggatgtccattgaacctcaattacctgaccccaagacaaatatggatgctgttgatgcctatgagttgaaaaagtatcaagaagaaatttggtccgatcattattggtgcttccaggttttggaacaatgcttcgaaatggatcctcaaaagcgtagttcagcagaagatttactgaaaaccccgtttttcaatgaattgaatgaaaacacatatttactggatggcgagagtactgacgaagatgacgttgtcagctcaagcgaggcagatttgctcgataaggatgttctcctaatatctgaatag

SEQ ID NO: 1768 - DNA, 1524 bp, Artificial Sequence
  Description of Artificial Sequence: Synthetic polynucleotide
atgacaagcaaaacgaagaatatcgatgatatacctccagaaatcaaagaagagatgatacagctctatcatgatttaccgggtatagaaaatgaatataaactcatagacaagatcggtgagggaacattttcttctgtgtataaagccaaagatatcactgggaaaataacaaaaaaatttgcatctcatttttggaattatggttccaactatgttgctttgaagaaaatatacgttacctcttctccgcaaagaatttataatgagctcaacttattgtacataatgacgggatcttctagagtagcccctctttgtgatgcaaaaagggtgagagatcaagtcattgctgttttaccgtactatccccacgaggagttcagaactttctacagggatttaccaatcaagggaatcaagaagtacatttgggagttattaagagcattgaagtttgttcattctaagggaattattcatagagacatcaaaccgacaaattttttatttaatttggaattggggcgtggagtgcttgttgattttggtttagccgaggctcaaatggattataaaagcatgatatctagtcaaaacgattacgacaattatgcaaatacaaaccatgatggtggatattccatgaggaatcacgaacaattttgtccatgcattatgcgtaatcaatattctcctaactctcataaccaaacacctcctatggtcaccatacaaaatggcaaggtcgtccacttaaacaatgtaaatggggtggatttaacaaagggttatcctaaaaatgaaacgcgtagaattaaaagggctaatagagcagggactcgtggatttagagcaccagaagtgttaatgaagtgtggggctcaaagcacaaagattgatatatggtccgtaggtgttattcttttaagtcttttgggcagaagatttccaatgttccaaagtttagatgatgcggattctttgttggagttatgtactatttttggttggaaagaattaagaaaatgcgcagcgttgcatggattgggtttcgaagctagtgggctcatttgggataaaccaaacggatattctaatggattgaaggaatttgtttatgatttgcttaataaagaatgtaccataggtacgttccctgagtacagtgttgcttttgaaacattcggatttttgcaacaagaattacatgacaggatgtccattgaacctcaattacctgaccccaagacaaatatggatgctgttgatgcctatgagttgaaaaagtatcaagaagaaatttggtccgatcattattggtgcttccaggttttggaacaatgcttcgaaatggatcctcaaaagcgtagttctgcagaagatttattgaaaaccccgtttttcaatgaattgaatgaaaacacatatttattagatggcgagagtactgacgaagatgacgttgtcagcagcagcgaggcagatttgctcgataaggatgttctcttaatatctgaatga

SEQ ID NO: 1769 - DNA, 933 bp, Saccharomyces cerevisiae
atgcctatcaccataaaaagccgctctaaagggttaagggacactgaaattgacttatccaaaaagcctactttagatgatgttttgaaaaaaatctctgctaataaccacaatatcagcaagtacaggataagattaacctacaaaaaggaatctaaacaagttccggttatttcagaatcgttttttcaagaagaggctgatgactcaatggaattcttcatcaaagatttgggtccccaaatttcatggagattagtcttcttttgtgagtatttgggtccagtcttggttcactcccttttttattatctatctaccattcccacagttgttgatagatggcacagtgctagctccgactataatccatttttaaacagggttgcatattttttaattttaggacattatggaaagagattatttgaaaccttatttgttcaccaattctctttagctactatgccaattttcaacctgttcaaaaattgtttccattactgggttctaagcggtctcatttcattcggttactttggctacggcttcccctttgggaatgctaagttattcaaatactattcatatttgaaattggatgacttgagtacattaattggtcttttcgtgctttcagaactatggaacttttattgccacattaaattgcgcctatggggtgactatcaaaagaagcatggtaacgctaagatccgtgtcccattgaatcaaggtattttcaatctttttgttgctcccaactatacttttgaagtttggtcttggatttggtttacttttgtgttcaagttcaatttatttgccgttttatttttgactgtttcaacagctcaaatgtacgcatgggctcaaaagaaaaacaaaaagtatcataccagaagagcattcttgattccatttgtattttga

SEQ ID NO: 1770 - DNA, 933 bp, Artificial Sequence
  Description of Artificial Sequence: Synthetic polynucleotide
atgcctatcaccataaaaagccgctctaaagggttaagggacactgaaattgacttatccaaaaagcctactttagatgatgttttgaaaaaaatctctgctaataaccacaatatcagcaagtacaggataagattaacctacaaaaaggaatctaaacaagttccggttatttctgaaagtttttttcaagaagaggctgatgactccatggaattcttcatcaaagatttgggtccccaaatttcttggagattagtcttcttttgtgagtatttgggtccagtcttggttcactcccttttttattatttatctaccattcccacagttgttgatagatggcacagtgctagctccgactataatccatttttaaacagggttgcatattttttaattttaggacattatggaaagagattatttgaaaccttatttgttcaccaattctctttagctactatgccaattttcaacttgttcaaaaattgtttccattactgggttttaagcggtctcatttctttcggttactttggctacggcttcccctttgggaatgctaagttattcaaatactattcttatttgaaattggatgacttgagtacattaattggtcttttcgtgctttctgaattatggaacttttattgccacattaaattgcgcttatggggtgactatcaaaagaagcatggtaacgctaagatccgtgtcccattgaatcaaggtattttcaatctttttgttgctcccaactatacttttgaagtttggtcttggatttggtttacttttgtgttcaagttcaatttatttgccgttttatttttgactgtttctacagctcaaatgtacgcatgggctcaaaagaaaaacaaaaagtatcataccagaagagcattcttgattccatttgtattttga

SEQ ID NO: 1771 - DNA, 984 bp, Saccharomyces cerevisiae
atgtcattcagaccaggtagcagaggtggttcccgtggaggttccagaggtggcttcggtggtagaggcggttcccgtggtggtgctcgcggtggttccagaggtggcttcggtggtagaggcggttctcgtggtggtgcccgtggtggttccagaggcggcttcggtggtagaggcggttctcgtggtggtgcccgtggtggctccagaggtggtagaggtggcgctgctggtggtgcccgtggtggtgccaaggtcgttattgaaccacatagacatgccggtgtttacattgctagaggtaaagaagatttgctagttaccaagaacatggccccaggtgaatcagtttatggtgaaaagagaatctccgttgaagaaccatctaaggaagatggtgtcccaccaaccaaggtcgaataccgtgtatggaacccattcagatctaagttggctgccggtattatgggtggtctagatgaattatttattgccccaggcaagaaagttttatatttaggtgctgcttccggtacttctgtttctcacgtttcagatgttgttggtccagaaggtgttgtctacgccgtagaattttctcacagaccaggcagagaattgatttctatggcaaagaagagacctaatatcatcccaatcattgaagatgctagacacccacaaaaatacagaatgttgattggtatggttgactgtgtcttcgcagatgttgcccagcctgatcaagctcgtattattgcattgaactctcatatgttcttgaaggaccaaggtggtgttgttatctccattaaggctaactgtattgattctactgtagacgcggaaaccgtttttgctagagaagttcaaaagttacgtgaggaacgtattaagccattagaacaattgactttagagccatatgaaagagaccattgtatcgtcgttggtagatacatgagaagcggtttgaagaaataa

SEQ ID NO: 1772 - DNA, 984 bp, Artificial Sequence
  Description of Artificial Sequence: Synthetic polynucleotide
atgagtttcagaccaggtagcagaggtggttcccgtggaggttccagaggtggcttcggtggtagaggcggttcccgtggtggtgctcgcggtggttccagaggtggcttcggtggtagaggcggttctcgtggtggtgcccgtggtggttccagaggcggcttcggtggtagaggcggttctcgtggtggtgcccgtggtggctccagaggtggtagaggtggcgctgctggtggtgcccgtggtggtgccaaggtcgttattgaaccacatagacatgccggtgtttacattgctagaggtaaagaagatttgttggttaccaagaacatggccccaggtgaatctgtttatggtgaaaagagaatctccgttgaagaaccatctaaggaagatggtgtcccaccaaccaaggtcgaataccgtgtatggaacccattcagatctaagttggctgccggtattatgggtggtttggatgaattatttattgccccaggcaagaaagttttatatttaggtgctgcttccggtacttctgtttctcacgtttctgatgttgttggtccagaaggtgttgtctacgccgtagaattttctcacagaccaggcagagaattgatttctatggcaaagaagagacctaatatcatcccaatcattgaagatgctagacacccacaaaaatacagaatgttgattggtatggttgactgtgtcttcgcagatgttgcccagcctgatcaagctcgtattattgcattgaactctcatatgttcttgaaggaccaaggtggtgttgttatctccattaaggctaactgtattgattctactgtagacgcggaaaccgtttttgctagagaagttcaaaagttacgtgaggaacgtattaagccattagaacaattgactttagagccatatgaaagagaccattgtatcgtcgttggtagatacatgagaagcggtttgaagaaatga

SEQ ID NO: 1773 - DNA, 1860 bp, Saccharomyces cerevisiae
atgcatagcgatactaacggtcgaacaaagagcaataatagcccatcagacaataatccaaatgagacagttatattaatagatagtgataaggaagaagacgcttctattcgcgaggctaaccttcctgtgaggttgtacccagacagacgggtagggagacgacgtgatgctttaaataggtttgtgaggtcagattcaaggagcaggaattctcaacggactcacataacagcaagctctgagcgccctgattttcaagctaataacgacgatatcactataatacgagaagttggacggttttttggagacgatggacctattgatccttctgcacattacgtcgatcttgatcaggagccaggttctgaaacgttagaaactccaagaacaatacaagtagataacacaaacgggtacttgaatgataatggtaataacaatgaaagtgatgatggcctgacaatagttgaagagagaacaacacgacccagagtgacactgaacctgccaggcggggagaggcttgaggtaactgcgacgacaacagacataccgataagaaggtcatttgaattccaagaagatctaggcgcatcacgcaggcagttactgagaaggagtgctacaagagcccgtaatttatttgtggaccggtctgatgaaaacgatgaagattggacagatgatacccataatttaccagaagctattcaaagggctcgtagggagagccgtatgcgaatgagcagacggattgcagaaagacaacgtagggtacaacagcaaagggtgtccagtgacgaaaatataagtacatctattaggttacaatcaatcagggaacgaatacaatcatatacgcctgatattcgtagtgcttttcatcgtgcagagtcactgcatgaattcaggtctattttacaaaatgttgctccaattactttgcaagaatgtgaagaagaactaatggcactcttcactgagttcagaaatcaactgctgcagaattgggccattgatagggtcagaaatactcaggaagaggccttgagacttcaccgagaagcattggaaagacaagaaagaacggcaggaagagttttccatcgtggcacattacgtgaatcaatcacaaactatcttaatttcaatggagaggatgggttcttaagtcgtttgtggagtggcccagcattgagcgatgctgacgaggaacgacacactcaaaatatcattgatatgatccaagagagagaagaacgagagcgggatgtggtcatgaagaatctaatgaacaaaaccagagcccaacaggaagaattcgaagctagggcagccagcctacccgaaggttatagcgcgtcatttgatactacgccaaaaatgaaattagacattacgaaaaatggtaaagaagaaaccatcattgtgacagatgacgatttagcaaaaacactcgaggatattcctgtttgttgcttgtgtggcgcagaattgggggtcggaataccggatgattttactggaatcagtcaaaaggatcgtggtgtttcatttgaagggttagtgtcaaaatacaaattccactgcccctaccaaaccctagccagaccatcaatgcttgatagagatttatcaaaacgaacgtttattgcatcgtgtggtcatgcattttgtggtaggtgtttcgccaggattgacaatgcaaaaaaaaaatctaagatgcccaaaaagaaactagctcaactaaagggttcggctcatccggataattatggccccaaattatgtcccgcagattcttgtaagaagcttattcgttcaagaggcaggttgaaggaggtttacttctag

SEQ ID NO: 1774 - DNA, 1860 bp, Artificial Sequence
  Description of Artificial Sequence: Synthetic polynucleotide
atgcatagcgatactaacggtagaacaaagagcaataatagcccatctgacaataatccaaatgagacagttatattaatagatagtgataaggaagaagacgcttctattcgcgaggctaaccttcctgtgaggttgtacccagacagaagagtagggagaagacgtgatgctttaaataggtttgtgaggtctgatagtaggagcaggaattctcaaagaactcacataacagcaagctctgagcgccctgattttcaagctaataacgacgatatcactataataagagaagttggaagattttttggagacgatggacctattgatccttctgcacattacgtcgatcttgatcaggagccaggttctgaaacgttagaaactccaagaacaatacaagtagataacacaaacgggtacttgaatgataatggtaataacaatgaaagtgatgatggcttaacaatagttgaagagagaacaacaagacccagagtgacattgaacttaccaggcggggagaggcttgaggtaactgcgacgacaacagacataccgataagaaggtcttttgaattccaagaagatttgggcgcatctcgcaggcagttattaagaaggagtgctacaagagcccgtaatttatttgtggacagatctgatgaaaacgatgaagattggacagatgatacccataatttaccagaagctattcaaagggctcgtagggagagccgtatgagaatgagcagaagaattgcagaaagacaacgtagggtacaacagcaaagggtgtccagtgacgaaaatataagtacatctattaggttacaatccatcagggaaagaatacaaagttatacgcctgatattcgtagtgcttttcatcgtgcagagtctttgcatgaattcaggtctattttacaaaatgttgctccaattactttgcaagaatgtgaagaagaattgatggcactcttcactgagttcagaaatcaattattgcagaattgggccattgatagggtcagaaatactcaggaagaggccttgagacttcacagagaagcattggaaagacaagaaagaacggcaggaagagttttccatcgtggcacattacgtgaaagtatcacaaactatcttaatttcaatggagaggatgggttcttaagtcgtttgtggagtggcccagcattgagcgatgctgacgaggaaagacacactcaaaatatcattgatatgatccaagagagagaagaaagagagagagatgtggtcatgaagaatttaatgaacaaaaccagagcccaacaggaagaattcgaagctagggcagccagcttgcccgaaggttatagcgcgtcttttgatactacgccaaaaatgaaattagacattacgaaaaatggtaaagaagaaaccatcattgtgacagatgacgatttagcaaaaacactcgaggatattcctgtttgttgcttgtgtggcgcagaattgggggtcggaataccggatgattttactggaatcagtcaaaaggatcgtggtgtttcttttgaagggttagtgtctaaatacaaattccactgcccctaccaaaccttggccagaccaagcatgcttgatagagatttatccaaaagaacgtttattgcatcttgtggtcatgcattttgtggtaggtgtttcgccaggattgacaatgcaaaaaaaaaatctaagatgcccaaaaagaaattggctcaattgaagggttctgctcatccggataattatggccccaaattatgtcccgcagattcttgtaagaagcttattcgttccagaggcaggttgaaggaggtttacttctga

SEQ ID NO: 1775 - DNA, 324 bp, Saccharomyces cerevisiae
atgtcagctcaagattattacggaaactctgcctccaaacaaagctattctcgtcctagcgctccaccaccaggatatgaaacggcgtctagaggttacgctccatcgcaaagccaacagaactattatccacctcaacagcagcagcagcagtatcagcaacaacctcaatactatcagcaacagcagccccaatattaccaacaacacccacagcagcccatttatgtccaacaacaaccggccagttctggaaatgaagactgtctagcgggctgtctagcgggtttatgtttatgctgtactttggatatgctgttttag

SEQ ID NO: 1776 - DNA, 324 bp, Artificial Sequence
  Description of Artificial Sequence: Synthetic polynucleotide
atgtctgctcaagattattacggaaactctgcctccaaacaaagctattctcgtcctagcgctccaccaccaggatatgaaacggcgtctagaggttacgctccatctcaaagccaacagaactattatccacctcaacagcagcagcagcagtatcagcaacaacctcaatactatcagcaacagcagccccaatattaccaacaacacccacagcagcccatttatgtccaacaacaaccggccagttctggaaatgaagactgtttggcgggctgtttggcgggtttatgtttatgctgtactttggatatgttattttga

SEQ ID NO: 1777 - DNA, 696 bp, Saccharomyces cerevisiae
atgataccttccaataagagaaatgctagaattttaagcattacaacgctattattgttgttagtgtttttcgtagcgcaaaatgcgaacttcttgacggtagagataaaagaggaaacttctaaagcatttagtactaatatggacaatatggctggaggatcttccagggaatatgctgctatgccgacttctaccacgaataaggggagctctgaagtagacgaagaaattaatgaaataaaacagaaggtgggactccaacagcccatagcatcggttgatgatagtttgtcggccattaaaaacgataaagggtcgcgaataaccaaagcttttaatgttcaaaaagaatactccctcatactagacttgtctccgattataatatttagtaaaagcacctgttcatatagcaagggcatgaaggaactgcttgaaaatgagtatcagtttatcccaaactactatattatagaacttgacaaacatggacatggggaagagctgcaagaatatatcaagttggtgaccggtagaggaactgttccaaaccttttggttaatggagtatcaagaggaggtaatgaagaaatcaagaaactgcacactcaagggaaacttttagaatcattacaagtctggagtgatggtaaattctcggttgagcaacgtgaaaaaccttccaataattga

SEQ ID NO: 1778 - DNA, 696 bp, Artificial Sequence
  Description of Artificial Sequence: Synthetic polynucleotide
atgataccttccaataagagaaatgctagaattttaagcattacaacgttattattgttgttagtgtttttcgtagcgcaaaatgcgaacttcttgacggtagagataaaagaggaaacttctaaagcatttagtactaatatggacaatatggctggaggatcttccagggaatatgctgctatgccgacttctaccacgaataaggggagctctgaagtagacgaagaaattaatgaaataaaacagaaggtgggactccaacagcccatagcatctgttgatgatagtttgagtgccattaaaaacgataaagggtctagaataaccaaagcttttaatgttcaaaaagaatactccctcatattggacttgtctccgattataatatttagtaaaagcacctgttcttatagcaagggcatgaaggaattgcttgaaaatgagtatcagtttatcccaaactactatattatagaacttgacaaacatggacatggggaagagttacaagaatatatcaagttggtgaccggtagaggaactgttccaaaccttttggttaatggagtatctagaggaggtaatgaagaaatcaagaaattacacactcaagggaaacttttagaatctttacaagtctggagtgatggtaaattctctgttgagcaacgtgaaaaaccttccaataattga

SEQ ID NO: 1779 - DNA, 324 bp, Saccharomyces cerevisiae
atgaaggcattaagcgttttatgttttcacaacccttttaagagatgtcttggacaaaaaagcttcttcgttggtgatagcttctttattccaactccgaaacgccttgtgctaggaaaactacgcctttccaactacactgcatttcacgacctaatcattcacgacctctttatttatatatttattcttaattttttcttctttcctttttgtaacaatttcaattattggaaggtttttcacgttgctcaaccgagaatttaccatcactccagacttgtaatgattctaaaagtttcccttgagtgtgcagtttcttga

SEQ ID NO: 1780 - DNA, 324 bp, Artificial Sequence
  Description of Artificial Sequence: Synthetic polynucleotide
atgaaggcattaagcgttttatgttttcacaacccttttaagagatgtcttggacaaaaaagcttcttcgttggtgatagcttctttattccaactccgaaacgccttgtgttgggaaaattgcgcctttccaactacactgcatttcacgacttgatcattcacgacctctttatttatatatttattcttaattttttcttctttcctttttgtaacaatttcaattattggaaggtttttcacgttgctcaaccgagaatttaccatcactccagacttgtaatgattttgaaagtttcccttgagtgtgcagtttcttga

SEQ ID NO: 1781 - DNA, 498 bp, Saccharomyces cerevisiae
atgaaagttaaaataaacgaagtgcacagtgtgtttgcttggtcatggcacatccctagcacatctgatgaggacgcagccaataacgatccaattggcaatgatgaagacgaggatgtctgtggtatctgtcgtgccagttataacggtacctgtccaagctgtaaatttccaggcgatcaatgccctttagtgattgggctatgtcatcataacttccatgatcattgtatataccgttggcttgatacaccaacctcaaaaggactgtgtccgatgtgtaggcaaactttccagctacagaagggtctagcaattaatgacgctcatgtccaaaagttcgttgaaatagtttcaagaagaagagaagaaatgatagaggagggcgtcgcagaagagtttgtggactttgatgaaccaataaggcaaaacaccgataacccaatcggtagacagcaagttgataccatcctggacgaagactttttgttacgataa

SEQ ID NO: 1782 - DNA, 498 bp, Artificial Sequence
  Description of Artificial Sequence: Synthetic polynucleotide
atgaaagttaaaataaacgaagtgcacagtgtgtttgcttggtcctggcacatccctagcacatctgatgaggacgcagccaataacgatccaattggcaatgatgaagacgaggatgtctgtggtatctgtcgtgccagttataacggtacctgtccaagctgtaaatttccaggcgatcaatgccctttagtgattgggctttgtcatcataacttccatgatcattgtatataccgttggcttgatacaccaacctccaaaggattatgtccgatgtgtaggcaaactttccagttacagaagggtttggcaattaatgacgctcatgtccaaaagttcgttgaaatagtttctagaagaagagaagaaatgatagaggagggcgtcgcagaagagtttgtggactttgatgaaccaataaggcaaaacaccgataacccaatcggtagacagcaagttgataccatcttggacgaagactttttgttacgttga

SEQ ID NO: 1783 - DNA, 258 bp, Saccharomyces cerevisiae
atgttccttcctataatttttcacaccatcctaaccctcctgaactttggtaaatattactgtttacctattcaagaagacgatgataaatcaggaaaagaaattgaacaaattttagacaataacatcgagtcattaggactactactaaattcgatgtccttatcctcgaactttacgacaggcgatcctgaactagattcgctcttccaagatgatttaatccccgagttatatagtgtattagatggcttctaa

SEQ ID NO: 1784 - DNA, 258 bp, Artificial Sequence
  Description of Artificial Sequence: Synthetic polynucleotide
atgttccttcctataatttttcacaccatcttgaccctcttgaactttggtaaatattactgtttacctattcaagaagacgatgataaaagtggaaaagaaattgaacaaattttagacaataacatcgagtctttaggattattattgaattctatgtccttatccagtaactttacgacaggcgatcctgaattagattctctcttccaagatgatttaatccccgagttatatagtgtattagatggcttctga

SEQ ID NO: 1785 - DNA, 1314 bp, Saccharomyces cerevisiae
atgggacaaggtgtatcatctggacaagacaaaaagaagaagaagggatctaatcagaaacccaaatatgaacctcccgttcaatctaaatttggtcgtaagaaaagaaagggaggtccagctactgctgaaaaattacccaacatatatccaagtactcgttgtaagttaaagcttctaaggatggaacgaattaaagaccatttgttattagaagaagaatttgtctctaactctgaaattttaaaaccctttgaaaagaagcaggaggaggaaaagaaacaattggaagaaatacgtggaaatccattgagcattgggacccttgaagaaattatagacgatgatcatgcgatagtgacaagtccaactatgcctgattattatgtatctatcttatcctttgtcgataaagagttactagagcctggatgttctgtgttattgcatcataaaaccatgtccatcgtaggtgttttacaggatgacgccgatccaatggtttcggtcatgaaaatggataagtcgccaacagaatcatacagtgatattggtggcttagaatctcaaattcaagaaataaaagagtctgtagagttaccgttaacacaccccgaactgtatgaagagatgggtatcaaacctcccaagggtgtgattctttatggtgcacccggtacaggtaagacattgctagcaaaggctgttgcaaatcaaacatctgccacattcttaaggattgttggctcagagttaattcaaaaatatttgggggatggtcctaggttgtgtaggcaaattttcaaagtagcgggtgagaatgcaccaagtattgtatttattgatgaaatagacgccattggtactaaaagatatgactccaatagtggtggtgagagagaaattcagagaaccatgctggaattgctgaaccagctggacgggttcgacgacagaggggatgtgaaggtgattatggccactaacaaaatcgagactcttgacccagcattaatcaggcctgggagaattgatcgtaaaatcttatttgaaaaccctgatctaagtactaagaaaaaaattttagggattcacacttccaagatgaatttaagtgaggacgttaatcttgaaactttagtaacaacaaaggatgatttgtcaggcgccgatatccaggcaatgtgtacagaagcaggtttgttagcccttagagagagaagaatgcaagttacagcggaggattttaaacaagccaaggagagagtcatgaaaaataaagttgaggaaaatttagaaggtttatacttgtga

SEQ ID NO: 1786 - DNA, 1314 bp, Artificial Sequence
  Description of Artificial Sequence: Synthetic polynucleotide
atgggacaaggtgtatcttctggacaagacaaaaagaagaagaagggatctaatcagaaacccaaatatgaacctcccgttcaatctaaatttggtcgtaagaaaagaaagggaggtccagctactgctgaaaaattacccaacatatatccaagtactcgttgtaagttaaagcttttgaggatggaaagaattaaagaccatttgttattagaagaagaatttgtctctaactctgaaattttaaaaccctttgaaaagaagcaggaggaggaaaagaaacaattggaagaaatacgtggaaatccattgagcattgggacccttgaagaaattatagacgatgatcatgcgatagtgacaagtccaactatgcctgattattatgtatctatcttatcctttgtcgataaagagttattggagcctggatgttctgtgttattgcatcataaaaccatgtccatcgtaggtgttttacaggatgacgccgatccaatggtttctgtcatgaaaatggataagtctccaacagaatcttacagtgatattggtggcttagaatctcaaattcaagaaataaaagagtctgtagagttaccgttaacacaccccgaattgtatgaagagatgggtatcaaacctcccaagggtgtgattctttatggtgcacccggtacaggtaagacattgttggcaaaggctgttgcaaatcaaacatctgccacattcttaaggattgttggcagtgagttaattcaaaaatatttgggggatggtcctaggttgtgtaggcaaattttcaaagtagcgggtgagaatgcaccaagtattgtatttattgatgaaatagacgccattggtactaaaagatatgactccaatagtggtggtgagagagaaattcagagaaccatgttggaattgttgaaccagttagacgggttcgacgacagaggggatgtgaaggtgattatggccactaacaaaatcgagactcttgacccagcattaatcaggcctgggagaattgatcgtaaaatcttatttgaaaaccctgatttgagtactaagaaaaaaattttagggattcacacttccaagatgaatttaagtgaggacgttaatcttgaaactttagtaacaacaaaggatgatttgagcggcgccgatatccaggcaatgtgtacagaagcaggtttgttagcccttagagagagaagaatgcaagttacagcggaggattttaaacaagccaaggagagagtcatgaaaaataaagttgaggaaaatttagaaggtttatacttgtga

SEQ ID NO: 1787 - DNA, 846 bp, Saccharomyces cerevisiae
atgagtaatcattctgaaatcttagaaaggccagaaacaccatatgacataacttatagagtaggtgtggcggaaaataaaaactcgaaatttcggaggacaatggaagatgttcatacgtatgttaaaaactttgcttcaagattagattggggatatttcgcggtgtttgatggacatgctgggattcaggcctccaaatggtgtggtaaacatcttcatacaattatagagcaaaacattttggcagatgaaacacgagatgttagagatgtattgaacgattcattcctagccattgacgaagaaattaatacaaaacttgtaggaaatagtggatgtactgctgctgtttgcgtattacgttgggagcttccggattcagtttctgatgattcaatggatttagcccaacaccaaagaaagttatatacagcaaatgttggtgattctcgaatagtattgtttagaaacgggaacagcataagactgacttatgatcataaggcatctgacactttggagatgcagagagttgaacaagcaggtggcctgataatgaaaagtcgtgtaaatggtatgctggcagtgacgagatcgttaggggataaattttttgatagtttagtagtgggcagcccatttaccacgagcgtagaaataacttctgaggacaaatttttaatcctagcgtgtgatggattatgggatgttattgatgatcaagatgcatgcgaattaatcaaggatattactgaacctaatgaagctgcaaaagtcttggttagatatgctttggaaaatggcacaacagataatgtaacggtcatggttgtcttcctctaa

SEQ ID NO: 1788 - DNA, 846 bp, Artificial Sequence
  Description of Artificial Sequence: Synthetic polynucleotide
atgagtaatcattctgaaatcttagaaaggccagaaacaccatatgacataacttatagagtaggtgtggcggaaaataaaaactccaaatttagaaggacaatggaagatgttcatacgtatgttaaaaactttgcttccagattagattggggatatttcgcggtgtttgatggacatgctgggattcaggcctccaaatggtgtggtaaacatcttcatacaattatagagcaaaacattttggcagatgaaacaagagatgttagagatgtattgaacgattctttcttggccattgacgaagaaattaatacaaaacttgtaggaaatagtggatgtactgctgctgtttgcgtattacgttgggagcttccggattctgtttctgatgattctatggatttagcccaacaccaaagaaagttatatacagcaaatgttggtgattctagaatagtattgtttagaaacgggaacagcataagattaacttatgatcataaggcatctgacactttggagatgcagagagttgaacaagcaggtggcttgataatgaaaagtcgtgtaaatggtatgttagcagtgacgagatctttaggggataaattttttgatagtttagtagtgggcagcccatttaccacgagcgtagaaataacttctgaggacaaatttttaatcttagcgtgtgatggattatgggatgttattgatgatcaagatgcatgcgaattaatcaaggatattactgaacctaatgaagctgcaaaagtcttggttagatatgctttggaaaatggcacaacagataatgtaacggtcatggttgtcttcctctga

SEQ ID NO: 1789 - DNA, 1296 bp, Saccharomyces cerevisiae
atggtagtacaaaatagcccagtttcgtctgttcacacagccaatttctctgaacgggggagcaataccagaacaatgacgtataaaaataagcttactgtttgcttcgatgacatcctaaaagttggagcagaaatgatgatgcaacaacagttaaaaaatgtacaactagattcttatctcgtcaatggtttcagtcaatctcagcaaaaattattgaaagagaaggttaaattatttcatggaattttagatgatttagagacttctctaagccagagttcttcatatttagaaactcttactgcactcggaaaagaaaaggagaaagaaagagaggaagctgaaaaaaagagggctgaacaagaaaatatgaggaaggttagagaacaagaagaattaaaaaagcgacaagaactcgaagaagcctcccaacagcagcaactccagcaaaattcaaaggaaaaaaatggccttggtttgaacttctccacaacagcacctgcgaacacaacggatgccaacggttccaaagagaattatcaagaacttggatctcttcaatcatccagtcaaacacaacttgagaacgcaaatgctgctaataacggtgccgcattttctcccttaaccactactcgaatccaaagccagcaggcccaaccctcggatgtaatgttcaacgatttaaactctatggatatttcgatgttttcaggccttgacagtactggttttgactccacagccttcaatgccacggtggacgaaaccaaaggctttgacgataatgactcaggtaacaactacaatgacataaatatttcttctattgaaaacaacataaataataatatcaatagcaccaagaacggcaaggataacaacaacgaaagcaacaaaaataacaacggcgatgaaaagaataagaacaacaacgaggacaacgagaacaacaacaacagcagtgagaagaacaacaataataataataataacaataacaacaatgacgataacggcaacaacaacaacaacaacagtgggaacgacaataacaataccaccaacaacgacagcaataacaagaacaattctatcactaccggaaatgataatgaaaatatagttaataatgatttaccaacgaccgttgtttccaatcctggagataaccctcctccagccgacaacggtgaagaatacttgacattaaatgatttcaacgaccttaatattgactggtcgaccactggagataatggcgaattagacctcagcggcttcaatatatag

SEQ ID NO: 1790 - DNA, 1296 bp, Artificial Sequence
  Description of Artificial Sequence: Synthetic polynucleotide
atggtagtacaaaatagcccagtttcttctgttcacacagccaatttctctgaaagagggagcaataccagaacaatgacgtataaaaataagcttactgtttgcttcgatgacatcttgaaagttggagcagaaatgatgatgcaacaacagttaaaaaatgtacaattggattcttatctcgtcaatggtttcagtcaatctcagcaaaaattattgaaagagaaggttaaattatttcatggaattttagatgatttagagacttctttaagccagagttcttcttatttagaaactcttactgcactcggaaaagaaaaggagaaagaaagagaggaagctgaaaaaaagagggctgaacaagaaaatatgaggaaggttagagaacaagaagaattaaaaaagagacaagaactcgaagaagcctcccaacagcagcaactccagcaaaattctaaggaaaaaaatggccttggtttgaacttctccacaacagcacctgcgaacacaacggatgccaacggttccaaagagaattatcaagaacttggatctcttcaatcttccagtcaaacacaacttgagaacgcaaatgctgctaataacggtgccgcattttctcccttaaccactactagaatccaaagccagcaggcccaaccctctgatgtaatgttcaacgatttaaactctatggatatttccatgttttctggccttgacagtactggttttgactccacagccttcaatgccacggtggacgaaaccaaaggctttgacgataatgactctggtaacaactacaatgacataaatatttcttctattgaaaacaacataaataataatatcaatagcaccaagaacggcaaggataacaacaacgaaagcaacaaaaataacaacggcgatgaaaagaataagaacaacaacgaggacaacgagaacaacaacaacagcagtgagaagaacaacaataataataataataacaataacaacaatgacgataacggcaacaacaacaacaacaacagtgggaacgacaataacaataccaccaacaacgacagcaataacaagaacaattctatcactaccggaaatgataatgaaaatatagttaataatgatttaccaacgaccgttgtttccaatcctggagataaccctcctccagccgacaacggtgaagaatacttgacattaaatgatttcaacgaccttaatattgactggtctaccactggagataatggcgaattagacctcagcggcttcaatatatga

SEQ ID NO: 1791 - DNA, 483 bp, Saccharomyces cerevisiae
atgttacgttcaattattggaaagagtgcatcaagatcattgaatttcgtcgctaagcgttcatatgcagaagctgctgccgcatcatcaggtttgaagttacaatttgctctaccacacgaaactttatatagtggctccgaagttactcaagtgaacctgcctgctaagtcaggacgtattggtgtattggccaaccatgttcccaccgttgaacaattactaccaggtgtcgttgaagttatggaaggctctaactctaaaaaattctttatatcaggtggatttgcaacagttcaaccagactcgcagttatgtgtaactgcaattgaagcttttccattggaatccttttcacaagaaaatataaaaaatttgttggcagaagctaagaagaacgttagttcatctgatgccagggaagccgcagaagctgcaattcaagtagaagttttagaaaacctacaatccgtattgaaatag

SEQ ID NO: 1792 - DNA, 483 bp, Artificial Sequence
  Description of Artificial Sequence: Synthetic polynucleotide
atgttacgttctattattggaaagagtgcatctagaagtttgaatttcgtcgctaagcgttcttatgcagaagctgctgccgcatcttctggtttgaagttacaatttgctttgccacacgaaactttatatagtggctccgaagttactcaagtgaacttgcctgctaagagtggacgtattggtgtattggccaaccatgttcccaccgttgaacaattattaccaggtgtcgttgaagttatggaaggctctaactctaaaaaattctttatatctggtggatttgcaacagttcaaccagactctcagttatgtgtaactgcaattgaagcttttccattggaatccttttctcaagaaaatataaaaaatttgttggcagaagctaagaagaacgttagttcttctgatgccagggaagccgcagaagctgcaattcaagtagaagttttagaaaacttacaatccgtattgaaatga

SEQ ID NO: 1793 - DNA, 1701 bp, Saccharomyces cerevisiae
atggttacagaaaatcctcaacgtcttactgttttaagacttgccaccaataagggtccattagcacaaatatggcttgcttcaaatatgtcgaatataccaagaggatcggttatccaaacacatattgctgaatcagcaaaggaaattgcaaaagcttctggctgtgatgacgaatcaggggacaatgaatacataactttacgaacatctggcgaattacttcaaggcattgttcgtgtatattccaaacaggccacttttctccttacagatataaaggacacattaacgaagataagtatgttatttaaaacaagccagaagatgacttctacagtaaacagactgaacactgtaacaagggttcatcaattgatgttagaagatgccgttacagaaagagaagttttggtcaccccagggttagagttcttagatgatactactataccagtgggcttaatggcgcaggagaattcgatggaaagaaaagtccaaggtgctgctccctgggatacttcacttgaggtcggtagacgattcagtccagatgaagatttcgaacataataatttgtctagtatgaaccttgattttgacatcgaggaaggtccgataacttcaaaatcttgggaagaaggaacaagacaaagctcacgcaactttgatacgcacgaaaattacatacaagatgacgatttccctcttgatgatgctggaactattggttgggatctagggattaccgaaaaaaatgaccagaacaacgatgatgacgataactctgttgagcaaggaagaaggctaggtgaatcaatcatgtctgaggagcctacggattttggatttgatctggatatagaaaaagaagcacccgcaggcaatatagatacgataaccgatgccatgacagaatcacagccaaaacaaactggcacaagaaggaactcaaaattactgaataccaaaagtattcaaatcgatgaagaaacagaaaattcagaaagcatagcttcatccaatacatacaaagaggagagatcgaataatttattgactccacagcccaccaattttacgactaaaagattatggagtgaaataactgaaagtatgtcctatttaccagatccaatccttaagaacttcttatcctacgaatctctaaaaaaaagaaaaatacataatgggcgagaagggtcaattgaagaacctgagttaaacgtgtcgcttaatcttaccgacgatgtaattagtaatgcgggaacaaacgataactccttcaatgaactgaccgataacatgtcagacttcgtaccaattgatgctggcttaaatgaggctccttttcctgaagagaatatcatcgacgcaaagactagaaatgagcaaactaccatccaaactgaaaaagttcgtcctactcccggtgaggtggcttctaaagctattgttcaaatggcgaagattttaaggaaggaattaagcgaagaaaaagaagtaatattcacggatgtactaaaaagtcaagcaaatacagaaccagaaaatattactaaaagagaagccagtagaggatttttcgatattttatcacttgctacagaaggatgtattggtttgagtcaaacagaagcattcggaaatattaaaatagacgccaaacctgcactatttgaaaggtttatcaatgcttaa

SEQ ID NO: 1794 - DNA, 1701 bp, Artificial Sequence
  Description of Artificial Sequence: Synthetic polynucleotide
atggttacagaaaatcctcaacgtcttactgttttaagacttgccaccaataagggtccattagcacaaatatggcttgcttctaatatgagtaatataccaagaggatctgttatccaaacacatattgctgaaagtgcaaaggaaattgcaaaagcttctggctgtgatgacgaatctggggacaatgaatacataactttaagaacatctggcgaattacttcaaggcattgttcgtgtatattccaaacaggccacttttctccttacagatataaaggacacattaacgaagataagtatgttatttaaaacaagccagaagatgacttctacagtaaacagattgaacactgtaacaagggttcatcaattgatgttagaagatgccgttacagaaagagaagttttggtcaccccagggttagagttcttagatgatactactataccagtgggcttaatggcgcaggagaattctatggaaagaaaagtccaaggtgctgctccctgggatacttctcttgaggtcggtagaagattcagtccagatgaagatttcgaacataataatttgtctagtatgaaccttgattttgacatcgaggaaggtccgataacttctaaatcttgggaagaaggaacaagacaaagcagccgcaactttgatacgcacgaaaattacatacaagatgacgatttccctcttgatgatgctggaactattggttgggatttagggattaccgaaaaaaatgaccagaacaacgatgatgacgataactctgttgagcaaggaagaaggcttggtgaaagtatcatgtctgaggagcctacggattttggatttgatttggatatagaaaaagaagcacccgcaggcaatatagatacgataaccgatgccatgacagaatctcagccaaaacaaactggcacaagaaggaactccaaattattgaataccaaaagtattcaaatcgatgaagaaacagaaaattctgaaagcatagcttcttccaatacatacaaagaggagagatctaataatttattgactccacagcccaccaattttacgactaaaagattatggagtgaaataactgaaagtatgtcctatttaccagatccaatccttaagaacttcttatcctacgaatctttgaaaaaaagaaaaatacataatgggagagaagggtctattgaagaacctgagttaaacgtgtctcttaatcttaccgacgatgtaattagtaatgcgggaacaaacgataactccttcaatgaattgaccgataacatgtctgacttcgtaccaattgatgctggcttaaatgaggctccttttcctgaagagaatatcatcgacgcaaagactagaaatgagcaaactaccatccaaactgaaaaagttcgtcctactcccggtgaggtggcttctaaagctattgttcaaatggcgaagattttaaggaaggaattaagcgaagaaaaagaagtaatattcacggatgtattgaaaagtcaagcaaatacagaaccagaaaatattactaaaagagaagccagtagaggatttttcgatattttatctcttgctacagaaggatgtattggtttgagtcaaacagaagcattcggaaatattaaaatagacgccaaacctgcattatttgaaaggtttatcaatgcttga

SEQ ID NO: 1795 - DNA, 612 bp, Saccharomyces cerevisiae
atgtcagttgaagaaaaaaagcgcagacttgaagaattgaaagatcagaatgtggtgcttggacttgcaatccaaaggtcacgactttcggtgaaaagactcaaattagaatacggtgttttactggagaggttggaatccaggatagaacttgatcctgagttaaactgtgaggatccattgccgactctggcctccttcaaacaggaactattgacgaagccatttcgaaaatctaaaactaaaagacacaaagtaaaggaaagagatccgaatatgcccaagaggcccacaaatgcatacttattgtactgtgaaatgaataaggaaaggattaggcagaatggctctctggacgtgacaagagatctggcagaaggttggaaaaatcttaacgaacaagataggaaaccgtactataagctttatagtgaggacagagaaagataccagatggaaatggaaatatataataaaaagatatctaatatagatgcggatgatgataaagaagagaatgaacagaagataaaaaataacgaggaaggatcatctacaaaagtagctgattctaaaggaggtgaagatggaagtttagtttcctctaactaa

SEQ ID NO: 1796 - DNA, 612 bp, Artificial Sequence
  Description of Artificial Sequence: Synthetic polynucleotide
atgtctgttgaagaaaaaaagcgcagacttgaagaattgaaagatcagaatgtggtgcttggacttgcaatccaaaggtctaggctttctgtgaaaagactcaaattagaatacggtgttttattggagaggttggaatccaggatagaacttgatcctgagttaaactgtgaggatccattgccgactttggcctccttcaaacaggaattattgacgaagccatttagaaaatctaaaactaaaagacacaaagtaaaggaaagagatccgaatatgcccaagaggcccacaaatgcatacttattgtactgtgaaatgaataaggaaaggattaggcagaatggctctttggacgtgacaagagatttggcagaaggttggaaaaatcttaacgaacaagataggaaaccgtactataagctttatagtgaggacagagaaagataccagatggaaatggaaatatataataaaaagatatctaatatagatgcggatgatgataaagaagagaatgaacagaagataaaaaataacgaggaaggatcttctacaaaagtagctgattctaaaggaggtgaagatggaagtttagtttcctctaactga

SEQ ID NO: 1797 - DNA, 1293 bp, Saccharomyces cerevisiae
atggtagatagtaatgatgatcaaccggaacgccatgcattacttcataatgacatccaaacatcaaataacagtaggccatcactggtccaaaaaaagtacttacctaccccacaagatacaagaaagtctagagcatcgtatacaggaagtgccatgatcaacccgacaagtaaacaaagtcgtacaggatcgggcgctcaaagaacatcacgcacagcacagaaactaaaacttttgccagaagaaccattccaaagagatagcgaaagacttactgatttaaagaatcaggaagtatattctcaggtaaacaggataaaagataagcctgctagaagggatgctgaaaagttgggaaaagctcacagacatttactccccaggtcaactgcatattgtactgctagcagttacaatatgaaagagctggtaaggtggttaaaggactgtcgaaagctacatcatactcatcctaaattgtttgatgaatgcttgtacactcccttcatttacaacgattggaggggcgacaaaagatttgaggatgaagatgtgattaggttggatgatgagggcggtgaaattattgttagtgacaagcacccagatctgtttatctttgaatatggtgttgtcgttatgtgggggtttactgaaagagaagaaaaagctttcttaaacgatatagaaaagttcgaaaaagaaaaattggcggaagaagatattcaagttgaagagttcaattattatgtcacaaaaagttatcaaccaagaatatataacgattttattaccttgagagatggttcaaattacatggtaaaactctctatctctcatgcaattgctcaaagcgtaaaaatttcacttttcgaagagcttgtggataatactattgaagatactcaggatataccacaagaaattgcatacagcggtaaagtttctatgagcaaagaagatataatgaaaagtataggggagctattcattttgaggataaatatcaatctacatggatcagttttagactctccagaaattatgtggtcagaaccacagttagaacccatataccaagcaacaagaggttacttagagatcaatcagcgcgtttcacttttaaatcaaagactcgaggtcatttcagatcttcttcaaatgttgaaggaacagctgggccattctcatgaagaatatcttgaatttattgtcatattactagttggtgtggaagtcctaatatcggtgatcaatatagtggttgacatgctggctagtcaacattga

SEQ ID NO: 1798 - DNA, 1293 bp, Artificial Sequence
  Description of Artificial Sequence: Synthetic polynucleotide
atggtagatagtaatgatgatcaaccggaacgccatgcattacttcataatgacatccaaacaagtaataacagtaggccatctttggtccaaaaaaagtacttacctaccccacaagatacaagaaagtctagagcaagttatacaggaagtgccatgatcaacccgacaagtaaacaaagtcgtacaggatctggcgctcaaagaacaagccgcacagcacagaaattgaaacttttgccagaagaaccattccaaagagatagcgaaagacttactgatttaaagaatcaggaagtatattctcaggtaaacaggataaaagataagcctgctagaagggatgctgaaaagttgggaaaagctcacagacatttactccccaggtctactgcatattgtactgctagcagttacaatatgaaagagttggtaaggtggttaaaggactgtagaaagttgcatcatactcatcctaaattgtttgatgaatgcttgtacactcccttcatttacaacgattggaggggcgacaaaagatttgaggatgaagatgtgattaggttggatgatgagggcggtgaaattattgttagtgacaagcacccagatttatttatctttgaatatggtgttgtcgttatgtgggggtttactgaaagagaagaaaaagctttcttaaacgatatagaaaagttcgaaaaagaaaaattggcggaagaagatattcaagttgaagagttcaattattatgtcacaaaaagttatcaaccaagaatatataacgattttattaccttgagagatggtagtaattacatggtaaaactctctatctctcatgcaattgctcaaagcgtaaaaatttctcttttcgaagagcttgtggataatactattgaagatactcaggatataccacaagaaattgcatacagcggtaaagtttctatgagcaaagaagatataatgaaaagtataggggagcttttcattttgaggataaatatcaatttacatggatctgttttagactctccagaaattatgtggtctgaaccacagttagaacccatataccaagcaacaagaggttacttagagatcaatcagcgcgtttcccttttaaatcaaagactcgaggtcatttctgatcttcttcaaatgttgaaggaacagttaggccattctcatgaagaatatcttgaatttattgtcatattattggttggtgtggaagtcttgatatctgtgatcaatatagtggttgacatgttggctagtcaacattga

SEQ ID NO: 1799 - DNA, 2256 bp, Saccharomyces cerevisiae
atgagtcaagttaatacaagccaaggaccggtagcccaaggccgtcaaagaagattatcatcactaagtgaattcaatgatccattttcgaacgcagaagtctactatggccccccaacagacccaagaaagcagaagcaggcaaagcccgctaagatcaaccgtacgaggactatgagtgttttcgataatgtatctcctttcaagaaaactggttttggtaaacttcaacagactagacgtggttctgaggatgacacctattcaagtagtcaaggtaatcgtcgtttctttatcgaagatgtcgataaaacacttaatgaactactggctgctgaggataccgataaaaattatcagatcaccatcgaggataccggtccaaaagttttgaaagtcggtaccgcaaactcctatggctataagcatattaatattaggggtacgtatatgttatccaatttgttgcaggaactaactattgcgaaaagttttggtagacaccaaattttcttagatgaagctcgtataaacgaaaatcccgtcaacagattatcaagattgataaacacacagttctggaactctttgaccaggagagttgatctgaacaacgtaggcgaaattgcaaaagataccaagattgatacgccgggggcaaaaaatccaagaatctatgttccttatgattgtccagaacaatacgaattttatgttcaagcttctcaaatgcatccatctttgaaattagaagttgaatatttaccaaaaaaaataacggcagaatacgtcaaatccgtcaatgatacccccggtttactagcattggctatggaagagcacttcaatccttctactggtgaaaaaactctcattggttacccttatgctgttcctggtggtagattcaatgaattatatggttgggactcctatatgatggcactaggtctcctagaagccaacaagactgatgttgcaagaggtatggtggagcattttatttttgagattaatcactatggaaaaatattgaatgctaacagaagctactatctatgtagatcacagcccccattcttgactgaaatggccttggtagtattcaaaaaacttggtggtaggagtaatcccgatgctgtggatttgttgaaaagagctttccaagcaagcataaaagagtacaaaactgtttggaccgcatctccaaggcttgatcccgaaacaggcttatccaggtaccatcctaacggtctcggtattcctccggaaactgaaagtgatcacttcgataccgttttactaccatatgcatcgaaacacggcgttaccttagacgaatttaagcaactttataacgatggtaagataaaggagcctaaattggatgagttttttcttcatgaccgtggcgttagagaatctggacacgacactacatataggtttgagggcgtatgtgcctacctggccactattgacctgaattctcttctttacaaatacgagattgatattgcagacttcataaaggaattctgcgacgacaaatatgaagatcctttagaccattctataacaacttcagctatgtggaaagaaatggccaaaatcagacaagaaaagattaccaaatatatgtgggatgacgagtcggggtttttctttgactacaacacaaaaatcaagcacagaacgtcatacgaatccgcaactacattctgggcattatgggctggacttgccacgaaggagcaagcacagaaaatggtggagaaagcactacccaagttagagatgcttggaggtttagctgcatgtacggagcgttctcgaggcccaatttctatttcgagaccaattagacaatgggactatccatttggttgggcaccccatcaaattcttgcttgggaaggcctccgttcttatggttatttaactgtaacgaataggctagcttatagatggcttttcatgatgacaaaggcttttgtcgattataatggtattgtggttgaaaaatatgatgtcacaagaggaacagatcctcatcgtgttgaagcagaatacggtaatcaaggtgctgactttaaaggggcagctactgaaggttttggatgggtcaatgccagttacattcttggtttgaagtatatgaacagtcacgcaagaagagcgcttggtgcttgcattccaccaatatcattctttagcagtttaaggcctcaagaaagaaacctctatggactatag

SEQ ID NO: 1800 - DNA, 2256 bp, Artificial Sequence
  Description of Artificial Sequence: Synthetic polynucleotide
atgagtcaagttaatacaagccaaggaccggtagcccaaggccgtcaaagaagattatcttctttgagtgaattcaatgatccattttccaacgcagaagtctactatggccccccaacagacccaagaaagcagaagcaggcaaagcccgctaagatcaaccgtacgaggactatgagtgttttcgataatgtatctcctttcaagaaaactggttttggtaaacttcaacagactagacgtggttctgaggatgacacctattctagtagtcaaggtaatcgtcgtttctttatcgaagatgtcgataaaacacttaatgaattattagctgctgaggataccgataaaaattatcagatcaccatcgaggataccggtccaaaagttttgaaagtcggtaccgcaaactcctatggctataagcatattaatattaggggtacgtatatgttatccaatttgttgcaggaattgactattgcgaaaagttttggtagacaccaaattttcttagatgaagctcgtataaacgaaaatcccgtcaacagattatctagattgataaacacacagttctggaactctttgaccaggagagttgatttgaacaacgtaggcgaaattgcaaaagataccaagattgatacgccgggggcaaaaaatccaagaatctatgttccttatgattgtccagaacaatacgaattttatgttcaagcttctcaaatgcatccatctttgaaattagaagttgaatatttaccaaaaaaaataacggcagaatacgtcaaatccgtcaatgatacccccggtttattggcattggctatggaagagcacttcaatccttctactggtgaaaaaactctcattggttacccttatgctgttcctggtggtagattcaatgaattatatggttgggactcctatatgatggcattgggtctcttggaagccaacaagactgatgttgcaagaggtatggtggagcattttatttttgagattaatcactatggaaaaatattgaatgctaacagaagctactatttatgtagaagccagcccccattcttgactgaaatggccttggtagtattcaaaaaacttggtggtaggagtaatcccgatgctgtggatttgttgaaaagagctttccaagcaagcataaaagagtacaaaactgtttggaccgcatctccaaggcttgatcccgaaacaggcttatccaggtaccatcctaacggtctcggtattcctccggaaactgaaagtgatcacttcgataccgttttattaccatatgcatccaaacacggcgttaccttagacgaatttaagcaactttataacgatggtaagataaaggagcctaaattggatgagttttttcttcatgaccgtggcgttagagaatctggacacgacactacatataggtttgagggcgtatgtgcctacttggccactattgacttgaattctcttctttacaaatacgagattgatattgcagacttcataaaggaattctgcgacgacaaatatgaagatcctttagaccattctataacaactagtgctatgtggaaagaaatggccaaaatcagacaagaaaagattaccaaatatatgtgggatgacgagagtgggtttttctttgactacaacacaaaaatcaagcacagaacgtcttacgaatccgcaactacattctgggcattatgggctggacttgccacgaaggagcaagcacagaaaatggtggagaaagcattgcccaagttagagatgcttggaggtttagctgcatgtacggagcgttctcgtggcccaatttctatttctagaccaattagacaatgggactatccatttggttgggcaccccatcaaattcttgcttgggaaggcctccgttcttatggttatttaactgtaacgaataggttggcttatagatggcttttcatgatgacaaaggcttttgtcgattataatggtattgtggttgaaaaatatgatgtcacaagaggaacagatcctcatcgtgttgaagcagaatacggtaatcaaggtgctgactttaaaggggcagctactgaaggttttggatgggtcaatgccagttacattcttggtttgaagtatatgaacagtcacgcaagaagagcgcttggtgcttgcattccaccaatatctttctttagcagtttaaggcctcaagaaagaaacctctatggattatga

SEQ ID NO: 1801 - DNA, 606 bp, Saccharomyces cerevisiae
atgtctagcgaagataagaaacctgtcgtcgacaagaaggaagaggctgctccaaagccaccatcctctgctgtcttctccatgtttggtggtaagaaggccgaaaagccagaaaccaagaaagacgaagaagataccaaggaggaaaccaagaaggaaggtgatgatgctccagaatcaccagatatccattttgaaccagtggttcacctggaaaaggtagatgttaagacaatggaagaagacgaagaagttctttacaaggtcagagccaagcttttcagattcgatgccgatgccaaggaatggaaagaaagaggtactggtgactgtaagttcttgaagaacaaaaagactaacaaggttagaatattgatgagaagagacaagaccttaaagatttgtgctaaccacatcattgctccagaatacactttgaagcctaacgttggttctgatagatcttgggtgtatgcttgtacagcagatattgcagaaggtgaagcagaagccttcacttttgctatcagatttggcagtaaggaaaatgctgataaatttaaagaagaatttgaaaaagctcaagaaatcaacaaaaaggcttag

SEQ ID NO: 1802 - DNA, 606 bp, Artificial Sequence
  Description of Artificial Sequence: Synthetic polynucleotide
atgtctagcgaagataagaaacctgtcgtcgacaagaaggaagaggctgctccaaagccaccatcctctgctgtcttctccatgtttggtggtaagaaggccgaaaagccagaaaccaagaaagacgaagaagataccaaggaggaaaccaagaaggaaggtgatgatgctccagaatctccagatatccattttgaaccagtggttcacttggaaaaggtagatgttaagacaatggaagaagacgaagaagttctttacaaggtcagagccaagcttttcagattcgatgccgatgccaaggaatggaaagaaagaggtactggtgactgtaagttcttgaagaacaaaaagactaacaaggttagaatattgatgagaagagacaagaccttaaagatttgtgctaaccacatcattgctccagaatacactttgaagcctaacgttggttctgatagatcttgggtgtatgcttgtacagcagatattgcagaaggtgaagcagaagccttcacttttgctatcagatttggcagtaaggaaaatgctgataaatttaaagaagaatttgaaaaagctcaagaaatcaacaaaaaggcttga

SEQ ID NO: 1803 - DNA, 633 bp, Saccharomyces cerevisiae
atgattttacgggagcagatcgacttcctaatacataaaagacaggatgataataataacaatggtgaagcgattacagatgatgatccatttagctcttcctcatggagatggggaagatggattttttttatttttttcatagttgcactccttatacttctgttttcaactgcaaaagtgaataggagaagaagaattatgggtcaagctccgattaggggaaccgcttggttaaccccgcctacctacaggcagtccgagagagattacaatggcacacagcgttgcgttgaagactatgttcctgaatatacagagacagcaaatgagaatgatttggggttttacgacgaacgaggagagtttcatcctaatggcaaaacggaatatttagcgccaccgcctttatcagaagaacaagctagctcgactgataaagacttacagcgcccagtggctgccgtcgtacgaattcctagtgaaagtgaattcgacttcaatctgctaagacccactatgaataatttcgttaatggtcagagtaatcgcaacgagcagcattctccgactgttgaatcttcttcctttgatgttaataacgcgccggcaagagcgaaagtgagtaagtga

SEQ ID NO: 1804 - DNA, 633 bp, Artificial Sequence
  Description of Artificial Sequence: Synthetic polynucleotide
atgattttaagagagcagatcgacttcttgatacataaaagacaggatgataataataacaatggtgaagcgattacagatgatgatccatttagctcttcctcttggagatggggaagatggattttttttatttttttcatagttgcactccttatacttttattttccactgcaaaagtgaataggagaagaagaattatgggtcaagctccgattaggggaaccgcttggttaaccccgcctacctacaggcagtccgagagagattacaatggcacacagcgttgcgttgaagactatgttcctgaatatacagagacagcaaatgagaatgatttggggttttacgacgaaagaggagagtttcatcctaatggcaaaacggaatatttagcgccaccgcctttatctgaagaacaagctagctctactgataaagacttacagcgcccagtggctgccgtcgtaagaattcctagtgaaagtgaattcgacttcaatttattaagacccactatgaataatttcgttaatggtcagagtaatcgcaacgagcagcattctccgactgttgaatcttcttcctttgatgttaataacgcgccggcaagagcgaaagtgagtaagtga

SEQ ID NO: 1805 - DNA, 123 bp, Saccharomyces cerevisiae
atgacttgcggtatagaaaatagttataagagtgctgaaaaaaaaaagaagtacagaagttttcgtttctttgaaagtcgcgattattccgagttgtgtattatagtaggaacatactattga

SEQ ID NO: 1806 - DNA, 123 bp, Artificial Sequence; identical to SEQ ID NO: 1805
  Description of Artificial Sequence: Synthetic polynucleotide

SEQ ID NO: 1807 - DNA, 1383 bp, Saccharomyces cerevisiae
atgcctagggccttatcaataaaatttgacaatacgtatatggacctttacgatgaattaccggaaagtaaactcctttatgatgaagaattttcatatcttttggatgcagtaaggcaaaatggtgtctgcgtcgtagattttttaacactcactccgaaggaattggcaaggctaatacaaaggtcgataaatgaggttttcagatttcagcaattgcttgttcatgaatataatgaaaagtacttagaaatctgtgaaaaaaactctatcagcccagataacggtcctgagtgtttcacgactgctgatgtagctatggatgaattattaggtggaggcatattcacgcatggcattacagaaatattcggagagagctctactggtaaatctcaattacttatgcagttggcgttaagtgtccaactttccgaacctgcgggagggcttggcggcaaatgtgtatatattaccactgagggcgatttaccaactcagagattggaaagtatgctatcgtctaggccggcttatgaaaaactaggtattacacaatcaaatattttcaccgtcagctgtaacgacctaataaatcaggaacacataatcaatgttcagttgcctattttattagagagatctaagggttcaataaaattggtgataatagattcgatttctcatcatttgagggtggagcttcagaacaagtccttcagagaatcccaagaaaataaaaactatctggataggatggcagagaagctccaaatactggcccacgattattcattatccgttgtggtggctaatcaagttggggataaaccactggctaacagtccagtggcacataggacatatgtaactgattatgattatcagctagggtggctagttggctggaagaactcaaccattctttatcggcagatgaattcgctgcttggagcaagttccaataacgatgaaattctatcagacgatgaagattatatgctaatcgagagagttatgagcactgtaaatgaccggaattatgattttttttcaaaaaagaaaccacccataattgagaataaaaccgttgagcgaaattcatcaagtcctatcagtcgacaaagtaagaaacggaaatttgactatcgtgtccccaatctcggtttgacttggtccaatcacgtttcaacacgaatattacttcaaaaatctttcaaggcttcaacaataattcaaagaggtgaagctcatctttataagggaggtgattcggcaagcttctggcaagttaagaggacaatgaaagtggtatattccacattcgctaagcctggtcaaattgcatatcaaattactaagcgaggaatagaaacagcctga

SEQ ID NO: 1808 - DNA, 1383 bp, Artificial Sequence
  Description of Artificial Sequence: Synthetic polynucleotide
atgcctagggccttatctataaaatttgacaatacgtatatggacctttacgatgaattaccggaaagtaaactcctttatgatgaagaattttcttatcttttggatgcagtaaggcaaaatggtgtctgcgtcgtagattttttaacactcactccgaaggaattggcaaggttgatacaaaggtctataaatgaggttttcagatttcagcaattgcttgttcatgaatataatgaaaagtacttagaaatctgtgaaaaaaactctatcagcccagataacggtcctgagtgtttcacgactgctgatgtagctatggatgaattattaggtggaggcatattcacgcatggcattacagaaatattcggagagagctctactggtaaatctcaattacttatgcagttggcgttaagtgtccaactttccgaacctgcgggagggcttggcggcaaatgtgtatatattaccactgagggcgatttaccaactcagagattggaaagtatgctttcttctaggccggcttatgaaaaattgggtattacacaaagcaatattttcaccgtcagctgtaacgacttgataaatcaggaacacataatcaatgttcagttgcctattttattagagagatctaagggttccataaaattggtgataatagattctatttctcatcatttgagggtggagcttcagaacaagtccttcagagaatcccaagaaaataaaaactatttggataggatggcagagaagctccaaatattggcccacgattattctttatccgttgtggtggctaatcaagttggggataaaccattggctaacagtccagtggcacataggacatatgtaactgattatgattatcagttagggtggttagttggctggaagaactctaccattctttataggcagatgaattctttacttggagcaagttccaataacgatgaaattttaagtgacgatgaagattatatgttgatcgagagagttatgagcactgtaaatgacagaaattatgattttttttccaaaaagaaaccacccataattgagaataaaaccgttgagagaaattcttccagtcctatcagtagacaaagtaagaaaagaaaatttgactatcgtgtccccaatctcggtttgacttggtccaatcacgtttctacaagaatattacttcaaaaatctttcaaggcttctacaataattcaaagaggtgaagctcatctttataagggaggtgattctgcaagcttctggcaagttaagaggacaatgaaagtggtatattccacattcgctaagcctggtcaaattgcatatcaaattactaagagaggaatagaaacagcctga

SEQ ID NO: 1809 - DNA, 1188 bp, Saccharomyces cerevisiae
atgaaatttattgatgagctagatatagagagagtgaatcaaactctcaatttcgagacaaatgactgtaaaatcgtgggcagttgcgatattttcacaacaaaggcggttgcatcagatagaaaattatataaaactattgatcagcatttggatactattttacaggaaaatgagaattacaatgctacccttcagcaacagctagctgctcccgaaacaaaccaatcaccctgctcgtcgccattttattctaataggagggatagcaactctttttgggagcaaaagagaagaatatcttttagtgaatacaatagcaataataacactaacaacagtaatggcaatagcagtaataacaataactattctggacctaatggttcttctccagcaacttttcccaaaagtgccaagctaaatgaccaaaatttaaaagaattagtctcgaattacgattctggctctatgagctcatcgtctcttgattcttcttctaagaatgatgagaggataagaagaaggagcagtagcagtattagcagtttcaaaagtggtaaatcatcgaacaataattacagttctggtacagcaaccaacaatgttaacaaaagaagaaaatcttcgataaacgaaaggccaagcaatttaagtttgggtccgtttggtcccataaacgaaccgtcaagccgcaaaatatttgcttatctgattgctatcctcaacgcttcttatcctgaccatgatttttcatcggttgagccaacggattttgtcaaaacatcattgaaaacttttatttccaaatttgaaaacaccttatattctcttggtagacaaccagaggaatgggtctgggaggtaattaattctcacatgactctttctgattgcgtcctttttcaatattcaccttcaaactcttttttggaagatgagcctggctatctttggaatcttataggttttctttacaacaggaaaaggaaaagagtggcttacctttacttgatttgctcgcgtctaaattcgagtacaggcgaagtggaagatgccttggcaaaaaaacctcagggaaagcttataatagatgatggctcaaatgaatacgaaggagaatacgatttcacttatgatgagaatgtaatagatgataaatcagatcaagaagaatccctacagtag

SEQ ID NO: 1810 - DNA, 1188 bp, Artificial Sequence
  Description of Artificial Sequence: Synthetic polynucleotide
atgaaatttattgatgagttagatatagagagagtgaatcaaactctcaatttcgagacaaatgactgtaaaatcgtgggcagttgcgatattttcacaacaaaggcggttgcatctgatagaaaattatataaaactattgatcagcatttggatactattttacaggaaaatgagaattacaatgctacccttcagcaacagttagctgctcccgaaacaaaccaatctccctgcagttctccattttattctaataggagggatagcaactctttttgggagcaaaagagaagaatatcttttagtgaatacaatagcaataataacactaacaacagtaatggcaatagcagtaataacaataactattctggacctaatggttcttctccagcaacttttcccaaaagtgccaagttgaatgaccaaaatttaaaagaattagtctccaattacgattctggctctatgagctcctcttctcttgattcttcttctaagaatgatgagaggataagaagaaggagcagtagcagtattagcagtttcaaaagtggtaaaagcagtaacaataattacagttctggtacagcaaccaacaatgttaacaaaagaagaaaatcttctataaacgaaaggccaagcaatttaagtttgggtccgtttggtcccataaacgaaccgtctagccgcaaaatatttgcttatttgattgctatcctcaacgcttcttatcctgaccatgatttttcttctgttgagccaacggattttgtcaaaacatctttgaaaacttttatttccaaatttgaaaacaccttatattctcttggtagacaaccagaggaatgggtctgggaggtaattaattctcacatgactctttctgattgcgtcctttttcaatattctccttccaactcttttttggaagatgagcctggctatctttggaatcttataggttttctttacaacaggaaaaggaaaagagtggcttacctttacttgatttgctctcgtttgaatagtagtacaggcgaagtggaagatgccttggcaaaaaaacctcagggaaagcttataatagatgatggcagtaatgaatacgaaggagaatacgatttcacttatgatgagaatgtaatagatgataaatctgatcaagaagaatccttacagtga

SEQ ID NO: 1811 - DNA, 2706 bp, Saccharomyces cerevisiae
atggaccagccaaggacccattcaggacccacgacggccagcaatcctgcccccagctccaccaactcgtcatctgctcccagcgcgactaattcaaagcaggaaagatcctcttcgtcactgtccaaaccttcgtcagtggttccttcaaaggattcaccagatggtgacgctattgctaagactcaagcagccgctttaaaaaacgacatgaaatctggtgataccagtacattagatgggtcatctcaaaatataattccaaacagagcctcaatgcaaaaatatattgaccagtcatcagatctgctgtcgaggagctccggcgtaataacgccctccatgtctttgaatgcaagcactaacgccactaacaacgatagcagtggcaattcagctaatagtagtgatttgaagatccctatagacagggacaatactatattcaagacgttcgacaccaagactggtcaattcttgaaaaacgatgataatgaagaagaaataaggaggaacaataaagttgattcgatacccccaaagaatatttatactaatatcaacaatccatctccctccccaccaccgtcgtcaaagcaaccaccgtctgcatccgcgccgcaattgccaccagcaacggaaccacacaaagaacaagcagcacaacaacagccaccaggaaatgcttctaactttttaaggatcttttcaaataaaaaaatgaggtcgcattccgtacccactattttgcattcttctttaagaaaattatcatcccacaatcaatactatcgtaatcaaaatattcttttaaatcatccaactccttccggcatatcaaagaaaaaattttctagaaaccatcatcaaccatatttgcattctaataatcctctcagttcaaaccctctttcattaaagcgcgcaatttttttaaatcaacaaatatcaggtaacgcaagcactaacgctaataatgacaacattaataattccactgccacttcaatgacaaatcaaagcttcctatcaagctcaaactttgacttaactttggaagatagaataaactacataaaggctactccaacgcctgttccatttcctcctataaatttgcagggcttaaaagagattgacttacaggaaattctgaaaaacccacaactaagacatgatataatattcgacccgctactacaattcaggccaaatcttgatggcgaaagagggaataaaaaaagacaattggcgaatatctattggaatgatgttcaaaatgaaatttatgtttactctaagaggcctgaaatattccaatataacaggtcaagactagtcccactttttgacactttaagggatgtattgttaacgatagtcccacaaaaagagtctccgatgataaataatgtactggacacagaattgaacattcaagaactattgaaaggttctctgataatgtctaacttgtcaggctggttggctgatttatttaaacatcattgtgcccccatgagggacccatgggtggataaaatgagcaacaaatttaaagaagctgaaagagactcttctttaacaaggttaatagaaggtttaaggttggtttttcaaattttggaaacaatgaaattggatattgccaatcatcaaataagaatactaaggccagctctgttaagtaatgctgtagaatttgagaaacagtatttcaacactcttatagcctctaaaagggtgaatttaaatacttccctactttggtttgataaaaaattcaacgaaaatgttaccgctggccttgttagaaatccaagttctatcactatccctgatgtctacaatatttgcattagaagtataattaacctattgtcatgtaggaagatggtgagagagtacccaactccgctttcttttgatcatgcaagattgatccttttgcgtgccgatatacgtcaaattgtttgtattttagtttgccgtttacttttccaacaattggtggccaacgatccttcaatggataaagctacaaaggaatatgttattcatacatactcaactaaaaggctgaagaatgaaattatcagcattataacagatgaacacggcaattgtaggtggactaaaaacacaatgtctattgctgttcatctttgcaaagttattgacgatcttcacagggagtacgacaacaatggtagttgtgaacaagccagaaggcctcaattgccttcattagacaactcaaaaataacctttgctaaatcttggttatctaagcaaactcaacccctcagtgaagtttatggtgtcctagaaaatagagtattcaaatcactagaggacgctatcttcaacaggtccgagtgcacaattgatggacgcgttaaacaagactttgtgtacctctacaacacaaacaatggcaacgtaggtagcactaacactttgagtactactacagatactgctagcgttaaaatcagcccgtctttgatgtctccttctaaaacctccaccaccacacctactggcaatgcgattgcatccagaggtttattcgcagcaacagagctggaggaattcgagaatgtttatcgccacttatatgcattaatcaaccttcattggtccgtattcggtcctcattatatcgaaatgttaggagataaagttaataaaaaaggaatataa

(The sequence listing continues in the following parts.)
